United States Patent Application Publication US 2005/0208558 A1 - sequence listing, part 2

SEQ ID NO: 1066 - DNA, 12822 bp, DROSOPHILA
gagaaactaaaggcatttttcgaggagaacaaacgcgatctgcaagcgcttcggcacgacaagcctctgcgcgccatcaaggtacagagtcatctctctgacatgcccgagtacatagtgccaaaggccctgaagcgagtggttggaacgtcctcttcccctgtcggagcctcggaagccaaacagccacgacagtcggccgccaaggctgccttcgagcggcaggtcaatgatcctctgatggctagccaggtggacttcgggaaacggcgtcctgcccaccggagaaaaaagaaggcgttgtagggtagcaaatggtatctatagtcgcattagtcaataaggaaataaagttaatattgttaatgtaagccaaacataaaagcggccgttgaagatgtttggaattttaaaaatgttattttaccctaaattagaaatgagtaaaattaaacgaaaaatatacctatgttggagatagctgcagattgacaaacccaggttattttctttatatatatgaaaattctgttaatttagaattttgtaatagggctgtaaaaataaccaattgcacatgcacattaacaatgtagtttgttaactctatcgatgatatatatatatttatttgcatgcccgccaaatgtgtatgtttgtacttatccagccgataagcaagtaagtgaatgtctttttaaactcagaaacttgacaagtatatgcttaaaacggccgctgttcgggtggcggtaagtggtaaccacttacccaaatagaggcagaaggcactatatcatttgctcaacttttctgacagcggacggaaaatgaaaataaaaaatatctacgagtcagtcacattacccaaagtgccagtagttccgtaggtcacagcgacgattatgcagcagctggataccatttaaagtccattacaccgagagtcccaggaaaaatagatcaccattaggggcgaaatataagcgatgcatgcgtattcgtttttaacattttattattgtcattgaaatagttaacattcatacaattatttattcatttatttatagcgtttatgcaatacaataataatcatgagggtaataatgaaaaactagtcggttcgatctgcgcggcttagtatatggccaagtctgactgtctatatctgttgttgtctgagaaatcgaaacgcgaaatcagatatggatattgaaacgtattgaaaatagggggagagtttttgtagcgggctctaatccatcgactatcatagtaatgacttttataatatcgctccgttaagtgctaaattaaacgtaaacatttaagttaatttagcataatcgtaataaaactcgctaggtttaggtataggtatgcgcggttggctatcccaggctcctatgaacagtattatttgactattttagatcggatggccacgagatggaggaacaaatgctctgcacactccataactcgctgccattgctctatataaatatatagtttatggtataacttagggaaaacgaacatgaaatcacattgcaaatgaagaatggacaactaacaactgataaactgatactgaggaacaggcacaatcacgaagttaatgaatctagactaaaatgcagccatacacatacatgtatctatgtagacatatctctataaacgtttgctctcattatattgtatataatatgtatataccatacgttttatgctttatttgttacgatgctaaaaaatgttcgcttcaattcaatcccctttttcaaaatcctcgttgtggaagtcccacattcgctttcttacttttttgacgtttttcagttggtttttttctattttttttttctttgtaacacacatacagaacttgtttagattattgttgcaacatgacgtaaaaatatacatattttcatcaaaaattaccaccgctcagtgctaccgtctctaattgaagttgtttgtgggcgaagaaggtcctgcggattcgcaggacaacacattgccgctcttttataggatcttggtatatacacaagtttttatatatgtatatactttgaatatacggaaatttcgttagagtaataagaacgacaaaaaaaaacattaaaataggtccgaagcgatcgatttcctggcgatatcctcagccggatataattggcaaccgatttgccgcctcagggatgtgtgtgggtgagagtgattccatccatctaggccagcttagatgggcacgtaattgcccttgggcttgtagaacaactggccacgcatcagacggcgccgaatctcggagagcagcaggcgtttttccttcttgatcttcttgagcacacccttgttctcctgggcacgacgagacaagtagggcagcacctcttcgactgggccatatggtatgtacttgtacgccgagtatcccgcttgacctgttggtttgaaagaacacatattataaacacatggaagacaagtgaaaggggtaggctatggaaacagacccagtggaaaggtaatgtagtcgcacatgcccagcagttggccgaagcagatcaccttgtcctccggtgagatgccgatctccttcatctgctggatggcaaatcgtacggtgtcttcgttgtgcgaggccaccataataccaatcttcctggcatcgtcatcacagtccttcatcagctgaggttattaataaatacttggtttatttataatcacttataaccaaagtccacaaattcccaccttaatgcgtcgcaagcactccgacaacgtcctgtgatacatgtccgtggtggcctcgaacgtgggatttaccggatccgggtagcccagcgacttggcacggtcccgctcctggtccatataggcaccgcgcaccagcttggcgccgaagtagaagttctggcgcttggcctgctccagatcggtgttcacctcgcggaacgtctcgcgcagatagcactggtacgtattaaagacaatggccttgtccttgttgtacttgcgcatcatttccagggtgatacgggagatggccggctggaagtaagtctgctccgcatccaccatgatacgcacatccaagtccgcagcagcctgaggtttggaaataccatatcagtacgatttcacagctagagtgaaaaaaaccatttacctttacaatcgtgttgagacgacggatcatgttcctgaacatctcctcctccttgggcggtatttgtgagatcagtcgacgcatctgtccggtttggggatcgggaacgcggaacgtgtcgctcagctgcgagtcctcgtcaacaatgcccgaccaggggaacaaatgcaaaattctagatgagatagacgagcatataaagtcagatcggtaagagattagataatataaacggactaacccctccttatcggacgttacattgttcaggaactccttgacgtccttattgtcgcccagcgtggcgtaatacttttcgagatccttgatggtcttgtggtgagtcagcacattgccctgaccgcccaccatatcctccatgtacttgcgtgtgcgcatgattacctcggacagttgcagctgcaaaggaggatcgaggtcatcagagttcatcagttgataaacaaaagcatatgtatgatttagatttacaatgcttctctatagtatggtaacattttaagagttttgattttacaattttaaccgcagcaaaaagtgaaacgtttacgaatcagtggcctttactatgtatctattagcgtcaattaactgtgttcatttcccatttattaacacctattaacccctgtgtttcccccacaaataaagctaagctactcaattatgtggttctcaaggggattactttgtgcgaacttaccagcaattgtggacggcccagggcggtgagtttaatggcggtgatgccagttccaaaggtggcgcctgcaggtcgatattcggatcaatcgatggttggttgttggaaatgaaaagcgtttggaaaaagagcagagcaattggtgaatgcaatgcgatggcagaggcgaaagttggaaagcggactctacagtcatatagcacatatgtctaactacggcacataaaagcgtaaaaagctacggatacgagacgagtacgaattgagctgaagacacagagatacgaagcaacgacaaaacctacgacattgcattacagcaaccaactgaaaaagcatacgaaatggctagaaagtcaaactagtttgctttgctcgctcgaaatacggatttggccatcaatggttactcttccgggtatttcggttacttgttggcattttgggatgtgtcttcgttaatttctcggcttacccgtggccactgcccggggcgccttgcgatcatcatctgttcatattagcattcgcaacgaattcaaattgattatgagtttttgagttatgtgggggttattcgataatcgatgggttggtgccattttcgggatatttgcggggcagaaaagagaatttattaatcatcagttttaatttatttcagggatcgagatcgagtatgtgaaaagatagagaataggagaaagcctagcaggaaacagcctgaaaccccaaaagcattgaatgcaggacggggcaactacacagatctgtggcatgttctcacctagagcggtcatattggtcatatgtagggacatacataagtgagcaagttgttttatacaacattctagttctgatgtcattttgtaggaagtaatattctgattaaagttaagcataaagatttgacttgattaaagtccatctgattggataaagaaaagctcagagctcgatatgtatgtatgtctgacatttgttcagtacacaaaaaacaaaaaaaaataaaaataaaatgcatgcttaacgtttagcaaggaatgcgtttgcttttgcacgttctaaattaaaacatttgtacagaggatgtcggggatggtgagatggaactcaaggaacttgcatgccggagtcagctatcgggaaccagcgagtaaaactggccaagaacatacccgaaacagcctccagacacttgatgaagatctccatgttccgctcgcaggtggcctcgttcaagtagaagtaggtgcgagcactgctgaccttgtagcgccgatccgcaaaggacttgtccacatggtactgcggcatgctgccctcctcctttttgtcgcctgcactggagacggaagatctgaaaggaagtgagtgaatcagtatgcaattaagagtaactaaacaactatgattatgaatatcaggcattgattatacactattatagagtgttttcccactacttagcagaaggcatagcctcagcatatcaggaacttactcaacttcacgtttctcggcctcctcctgggtgatatcctcctcaacggaataatcgagaatcggcttaacgccaaaggatcttagcctgcaagtgcacaaaatacataagtttccgttttcaaaaagccaagaaaaattacacgatattagtaaaataaaagaattttgagtatggcttggttagcggttcgttgagaaaatttaaagttcttttgttaagggggatcaaattcggattggcgattcggatctgaatgttcgagtagatctttcatgcttggtacatgcccaggacttgtgctttctattagtgagagctttatgctcgcttagcttggacatagttttagaacattagtgggaaaatgtgtgtcatatatctacatacatgtgtggcatatacatggatggtaaaaataatagcaaactttctaaattatccactcaaattggtcattaactactcaatctgttgctcagttagcattgaattaagccagtatttgaagagcacgccatcgtgtttttgagtgctattacttcgtctgaaaccatttatatgcacatgtagtatcggatatacatatatatatatatattgggatgcatgggatgctcttgggtagggggagggggttaacctctctagggcgggcacgatcgtgtgacgattctcgccggccacaaagtgtccgtagaagctggacttcatcagcaggacgaagagcttctggccgagcaggttgcgcgccagtttcatcagctgtttatcggcgttatcgaagttcgttcgattattatcggtaaatgtgtttgtcagggattccattgcaatacaagtgtgggcatttaagcgggtttcgcataaccgtttcacagcccgtttcgcggccaaaataataacatgaagtaaacacaaaaccatagggcggcagaaagcgatatggaaacgggaaaaaaaaacaagaaaagaaaagaaaaagaaaaaggcgataagtgagtgggagtgtcgtggtgggcaattacctttccagtgtgggtatgatcttgatctgatcctcgccggcgacaaagtggccatagaaggtcgccttcatcaataatgtaaataaccgttgacccaatacgttctttgaccatttcataagctgcgaaattttcgtttgttttgatcggttttatgcggcatacatagtaagtttgtaagtttttgtaagtaggtttttttggtgtttttcgatattttgtcatgttgtttgcggcgtcaaaaattgaattcgatatagttttaattttccgttttaggcaatacaaagttgatatatgtaacaaggacaaagagtttttgcaatatacaactaatatccatcgattctagctgagatccctcatccgcccaggttctttcaatttttcagcgcctgaatcgcacataaatcatttggaacttggccaagtggtaaaataaaaaacgtgaacggagtcaaggccaaaatctttgccaaagtccaacaaaacagcgtggaaaaatgcgacaaaaagtgcggaggcggcaatgtgtattactcttcagaggctgcacgtcatttaaacgagtgtcaggctaaatacgcatataaacatcacctttccaaaatgagcctagtgctcaaggaaagacgatccgccgcggaaccatcaacttaaacagatatccgctgaacatatgtacatatataagtgatgcgaatattgaaattttagtgtaagaaaaacaaacaaacacttcctgaaaagccgaaaaataacgcaagagattgtacagactcttatccaaacctattaatgcaagatttatgcgactagagacaatactatcccttcggaaatattaatttatttaaataaactcgcaatgcactatccagctttgtgaaaacgagaaaatgttaaactgcacttaataaaactcggcaataaggacaggaagagatcgcctaacttgggaatcaccaagtttccggtttccgggcaacccatgttccttacaaggtggaaaacacaagagcattggcctctgattaatgattcccttgcacgtgtgcgctttgcttgatgcgggatccatcagatgaatgagattctgagaaaggacaggtggggaaagaaaagagcattctccgtctggggaaaccggtttcgtcgagaacactaaagtaattaattgaatacaaagttgtcgaaagagcacactgccgacaatataaatacaccatcaccaaaactggttacataaaacaaattttcgtttcgcattatattttttttgggtatggcatgttttgctttgctagtcttttaacttttctttggcagacaattcgaaaccgaggacaggtgtttgccgttgagctctggccccaaaaaacaaaaaaaacaaaaaaagctgccccagcagagccaacaccacccccggtcacctagcacctggcacctgccacagtaccccatcctcaaccatgttttttacccatcaatacccaacccattctcacatatcacgagacccacaccgctcctcagtccccaaaagcaatcgacgcgctactgtaaatagaaatggcgaaaaaataagtacactctgatacaaattcaaacgaatatgagaccccaattgtgttattgaactgtgtgcaacagttcttgagaatgttctcactatatttagtaccaaaagtataactaattgaatgctagaacgctcaaaatcgattgtgcaaacgatgttttcaaatagattgcgccgagtctggtaaaggaatggcttaccaatttttttctagtgcagagatgtgggcaaagtcgatgtctgactaatgccacatgtgatgtgatgtctacggtcccagggagctgtgcggacattctctgtgacgtccatttagccacccatatatgcaaattgcatcgagcggggcgaaaaaatgataaataagtaacagtcttggcgacgcatgcactttgagtaatcgataagcaatcaaacgatcgccgacgctattaaatagaagcacgctagcgagaatggggtaaatgcgaggggttttccaacgattccgattggcgctcattcgggggcctgactatataacgacctatatatactatgcagtcctacacagttcacacaatccatacgtctcgctgagtaaatacgcacgagttaagagcaaatagcggaccgggcaaggtcgccatcgcagcggcaatttgcatgccaaagtttccctttttcctgccgtcaatcaggcactcattcaatcttctgtgcgactgcagcacctgccagaaagtggcaacaaatgcaacaagcaattagccaggaattcatcaacacgaggggagcaaacgaaaactcgctgcgggtcgggtgaattgaaaagcggaagcagggcggaaaatcggaaggaaagcagccagccacctgacacgggcttcggttgcccggaaaatcggaatcaagcgaatggaagcttggcaggatcgaaaaaattcatgaataagacaaaaaaattcatgaatagaaaaaaggaagcaaacaaaaaaattaaatattcttctacgttcagtttcagacaactttaacattatacatacatggaattcaatagccctagctgttcataacttttgtttactcttcaagtgtccaagaatccatgtacatgaatatatttaaataaagcattttaaaggaagtatttataaaataaatgaatgaattataataagttgaaagcagcagaagaggacagaagaggcgaagagtcagcacacacttcgagagttgaaacaaatggtttcgaaatcggtcactatctaaaacgatacttacttaattgtaatattaagaaagcattaagcaggggttatgtactaacagagccccagatttctcagcaaacagaaccagaaacagagagctagagagagagagagagatctcagctagtcgatggattggaccaattcaagggtcaaaggtcgcaggactcggcagaggaggagtgggggacaccgattaactcaccgtcatgttgtgctcgaccagcttctcgctggaacatatcatgtagacgagataggcgcgtattagctctccagtggtcttgctcttgaaagcagcaatcggatcattaaagctcacgtccaggggatccctctgcggcgagccagcgggcgaggggttcttttcctgggacgactcctgcttcatcgatcgcttcaccgtctcgctggagaccacctccggttggaccagagtggaggcctgcagcggccggtcgccgctgtgcaggaagcgcgctccattgactcctctcgtggactccgatgctgctccttctccggcgatgctggtgctcccgctgccgcgctgatggaaactccggcaggcggcgacggccacggaattgctcgacttgctgctattacggccgtagaccaaactgatggctgttcgttgggcgctcagcgaacggagtagagccattacaagggattctgcggtttatttacgctttctgctcttcggcttttgagacggttattgaaacgcactccaatctcggttgttgctgcaaaaagaaaacaatggaaagcagaggtaatttcactattatctctacaaatcactacgaatctgagggaagacagtggcgtaacgaagagattactaaaggtggttatctcgttttcaactcgattacaataacgttttaaaaagtggaaatgtggtacatatataacaaaattattacgactgtttcaaaatatgcattgattttcaataagatcatatagaattgatttaattgtaattggatgatatctaattaatataaaaataataaacaaatgtataataaaattcaatttataaaaatattaaaatcagtgtacatattattattgcaactttttgcctaattgtgttttttgcccccccacaaaccccacgccaacgccaatgatcacagctgattttgtcggagagcttttcgctctccctctttcgctcgctccgaatgttatacaacaaatgcgaaaaacgtgaggcggcgagggagagcgaagccgaaaaaaacagcacaacacaatcacacgtacgcaagtacaccttcgaaatgttcaattaaaaaagtcaatttctgggcagaaatctatctttcgctattatgtgtcttttgggttttcttcttacttcgttcttattatttattctattacgctttgagcgttgtatacgccgcaaaagcacgaaaccaaatgcgacgaagacgcgtgaaaatggggcgagttgttaagcgacggcaaattcaacgaagcgaaacgaggaaggacccgagggcgagaaaatccttttcgccgcttcgctcccgtttatgtaactgtaaatgtaaccgagattgtaccgtaattgtaactacgactgtgtgacgtcacaggcatgccagccccgtttgcttctgattttgattttgatttggaatttgttttgatttaattgaaatgcgccgaaagcacacactaattggtgttaattgcggctctccttgattctccccaattttcgttctcagttttccacccattaaccccttttccctttttcattttatttattaattagcagcccgctaaataatcgccagacgggaggctgcaatcaatcgaaaaaacttggcgggtttcattgcacagatttcattacacttcattatgggctatatcaagttctgtctcgctctggccgccttggttaaagggaaacagggagctgccgtacttaaattgcgaattcatctgaatggtttttttttttttgtttttttttcttcatttttcttatttgttgctatgcggcgaattgtacctattatataacactgcttactgctctctacctcgctttgtagagatccttttatgatacgaatacaacgcagccactcacatgtacactgcaaaatttcgcttgggtttgtgggtttcctctatttgctcgatataaattttgctttaacggttgttttgtcacttcaaaaaaaacaaactacgatacataaccagcaacgacccaaaaacaataataagggtaaacaatacaattttgtagaatttgtagaattgccaaatatagtttttcggaaaaactcgtgtttgtttgacaaacttctcacagcagcctgcgagaaaagtagaaaagttcccgtttctgtcagcgcatttgctcacctcacaaaagacacacaagtacaagtacaattataattatttttcggttttttcgagtcaatgttgttcttttcgagggtttttggtttttgctgctgcaacagagagcgtgagcacgcgcaagggtctgaattcgcgaataaactgaaacacatgaagcgaaattaaggccaacacggcgaaagctcgtccaaaaaagcttgagagaaattgttggaccagtcggtgaggggcagaaaggggatgggccacccccagcagctgtttgggctgcacgtgagcgaaaaaaagaaacccgatcgaaaattaatcgccatcttgtcaactcttattacccaataaaaatcggcacgcttatctaggcccctggcggttggccgggaatcttcggtgctcttatcttatcaatggactcccacaccagcgtccaacaaaaacgaaccattccttctattcatctctctccctgtctctttcttgacaaccggcgtcttgcaacactggcctcgcaaacaggcttgctttacacccagatcactggagaaatatatcgatacgaaatatacgctcgcaaaatttgaaatttagtttcaggtacgaaaattattcaaaatgtttctctgtgtaaagaacgcttatcgtggactcaagaaagtatcaaacagatttattttaattgcactatttacgcaaatataaggccaccaaatgaatataagttttctaaatctttctaatcggaccctcccaagccaaatatttccttttgctgtgtgccgaaagaagggattttagaaaagtttgaattattgttagttacaaaattgagtatccgaactatttgttactttcagctcgcaatataaatataatataaatatcgatagttatcgccgtctcacaaatctacacaccagcgatctctaaaaatgtcctttgggtttgttttaagcgattttttcggttacaaatttcaaacatattacttcgtataaaatcttttaaactgattaaaattaaaaacaaagcgattcggcttgtgacactaacaaaaaaaaaccttttacgtctcaatttactttactttaaaattgtttatagaaaaaaggtaagaaagtta

SEQ ID NO: 1067 - DNA, 3471 bp, DROSOPHILA
cgcgtgctcacgctctctgttgcagcagcaaaaaccaaaaaccctcgaaaagaacaacattgactcgaaaaaaccgaaaaataattataattgtacttgtacttgtgtgtcttttgtgagcaacaaccgagattggagtgcgtttcaataaccgtctcaaaagccgaagagcagaaagcgtaaataaaccgcagaatcccttgtaatggctctactccgttcgctgagcgcccaacgaacagccatcagtttggtctacggccgtaatagcagcaagtcgagcaattccgtggccgtcgccgcctgccggagtttccatcagcgcggcagcgggagcaccagcatcgccggagaaggagcagcatcggagtccacgagaggagtcaatggagcgcgcttcctgcacagcggcgaccggccgctgcaggcctccactctggtccaaccggaggtggtctccagcgagacggtgaagcgatcgatgaagcaggagtcgtcccaggaaaagaacccctcgcccgctggctcgccgcagagggatcccctggacgtgagctttaatgatccgattgctgctttcaagagcaagaccactggagagctaatacgcgcctatctcgtctacatgatatgttccagcgagaagctggtcgagcacaacatgacgcttatgaaatggtcaaagaacgtattgggtcaacggttatttacattattgatgaaggcgaccttctatggccactttgtcgccggcgaggatcagatcaagatcatacccacactggaaaggctaagatcctttggcgttaagccgattctcgattattccgttgaggaggatatcacccaggaggaggccgagaaacgtgaagttgaatcttccgtctccagtgcaggcgacaaaaaggaggagggcagcatgccgcagtaccatgtggacaagtcctttgcggatcggcgctacaaggtcagcagtgctcgcacctacttctacttgaacgaggccacctgcgagcggaacatggagatcttcatcaagtgtctggaggctgtttcgggcgccacctttggaactggcatcaccgccattaaactcaccgccctgggccgtccacaattgctgctgcaactgtccgaggtaatcatgcgcacacgcaagtacatggaggatatggtgggcggtcagggcaatgtgctgactcaccacaagaccatcaaggatctcgaaaagtattacgccacgctgggcgacaataaggacgtcaaggagttcctgaacaatgtaacgtccgataaggagggaattttgcatttgttcccctggtcgggcattgttgacgaggactcgcagctgagcgacacgttccgcgttcccgatccccaaaccggacagatgcgtcgactgatctcacaaataccgcccaaggaggaggagatgttcaggaacatgatccgtcgtctcaacacgattgtaaaggctgctgcggacttggatgtgcgtatcatggtggatgcggagcagacttacttccagccggccatctcccgtatcaccctggaaatgatgcgcaagtacaacaaggacaaggccattgtctttaatacgtaccagtgctatctgcgcgagacgttccgcgaggtgaacaccgatctggagcaggccaagcgccagaacttctacttcggcgccaagctggtgcgcggtgcctatatggaccaggagcgggaccgtgccaagtcgctgggctacccggatccggtaaatcccacgttcgaggccaccacggacatgtatcacaggacgttgtcggagtgcttgcgacgcattaagctgatgaaggactgtgatgacgatgccaggaagattggtattatggtggcctcgcacaacgaagacaccgtacgatttgccatccagcagatgaaggagatcggcatctcaccggaggacaaggtgatctgcttcggccaactgctgggcatgtgcgactacattacctttccactgggtcaagcgggatactcggcgtacaagtacataccatatggcccagtcgaagaggtgctgccctacttgtctcgtcgtgcccaggagaacaagggtgtgctcaagaagatcaagaaggaaaaacgcctgctgctctccgagattcggcgccgtctgatgcgtggccagttgttctacaagcccaagggcaattacgtgcccatctaagctggcctagatggatggaatcactctcacccacacacatccctgaggcggcaaatcggttgccaattatatccggctgaggatatcgccaggaaatcgatcgcttcggacctattttaatgtttttttttgtcgttcttattactctaacgaaatttccgtatattcaaagtatatacatatataaaaacttgtgtatataccaagatcctataaaagagcggcaatgtgttgtcctgcgaatccgcaggaccttcttcgcccacaaacaacttcaattagagacggtagcactgagcggtggtaatttttgatgaaaatatgtatatttttacgtcatgttgcaacaataatctaaacaagttctgtatgtgtgttacaaagaaaaaaaaaatagaaaaaaaccaactgaaaaacgtcaaaaaagtaagaaagcgaatgtgggacttccacaacgaggattttgaaaaaggggattgaattgaagcgaacattttttagcatcgtaacaaataaagcataaaacgtatggtatatacatattatatacaatataatgagagcaaacgtttatagagatatgtctacatagatacatgtatgtgtatggctgcattttagtctagattcattaacttcgtgattgtgcctgttcctcagtatcagtttatcagttgttagttgtccattcttcatttgcaatgtgatttcatgttcgttttccctaagttataccataaactatatatttatatagagcaatggcagcgagttatggagtgtgcagagcatttgttcctccatctcgtggccatccgatctaaaatagtcaaataatactgttcataggagcctgggatagccaaccgcgcatacctatacctaaacctagcgagttttattacgattatgctaaattaacttaaatgtttacgtttaatttagcacttaacggagcgatattataaaagtcattactatgatagtcgatggattagagcccgctacaaaaactctccccctattttcaatacgtttcaatatccatatctgatttcgcgtttcgatttctcagacaacaacagatatagacagtcagacttggccatatactaagccgcgcagatcgaaccgactagtttttcattattaccctcatgattattattgtattgcataaacgctataaataaatgaataaataattgtatgaatgttaactatttcaatgacaataataaaatgttaaaaacgaa

SEQ ID NO: 1068 - protein, 669 aa, DROSOPHILA
MALLRSLSAQRTAISLVYGRNSSKSSNSVAVAACRSFHQRGSGSTSIAGEGAASESTRGVNGARFLHSGDRPLQASTLVQPEVVSSETVKRSMKQESSQEKNPSPAGSPQRDPLDVSFNDPIAAFKSKTTGELIRAYLVYMICSSEKLVEHNMTLMKWSKNVLGQRLFTLLMKATFYGHFVAGEDQIKIIPTLERLRSFGVKPILDYSVEEDITQEEAEKREVESSVSSAGDKKEEGSMPQYHVDKSFADRRYKVSSARTYFYLNEATCERNMEIFIKCLEAVSGATFGTGITAIKLTALGRPQLLLQLSEVIMRTRKYMEDMVGGQGNVLTHHKTIKDLEKYYATLGDNKDVKEFLNNVTSDKEGILHLFPWSGIVDEDSQLSDTFRVPDPQTGQMRRLISQIPPKEEEMFRNMIRRLNTIVKAAADLDVRIMVDAEQTYFQPAISRITLEMMRKYNKDKAIVFNTYQCYLRETFREVNTDLEQAKRQNFYFGAKLVRGAYMDQERDRAKSLGYPDPVNPTFEATTDMYHRTLSECLRRIKLMKDCDDDARKIGIMVASHNEDTVRFAIQQMKEIGISPEDKVICFGQLLGMCDYITFPLGQAGYSAYKYIPYGPVEEVLPYLSRRAQENKGVLKKIKKEKRLLLSEIRRRLMRGQLFYKPKGNYVPI

SEQ ID NO: 1069 - DNA, 3602 bp, DROSOPHILA
acgaacgaagcggacgagccgagaacgaagacatgtggttcggcgccattttgaagcgatacactgacatggcgaaagcggaatgatgggcacagggaaaacgaaaattagggggaaacggtgagaaaaaatgtgggatgggggttcaaagtgtgtatattgctgtcgcgcttattaaataatgagcaaggtacagtcgaacaaaggccgacggccaccaaatgattttttgcatgaatatatgactgcccgatgactaatctggccttaggtacgcacgcagttcgtacataaccccttttccaacgaaagcgcagacaaaggattggtcaaggccagagaaatgaccaggaccgcgattttactcgccctatttgtctttctgtgtacttaggtctactctagcgctatttttcactcctatacttacgattaaaacaaaaaaatctgttttgctgcgaataaaagtaactttttgcgtagctgttgggctgcttcttctggatgacttgcggtatgaccgtggcctgcttcgtacgcaatggtacagagctcactaaggtgtccaaaaggtggcaacattttggtgaagctgttggctggccccactaaccggacctgaaaatggtgcagcgctgccggacatttaacggaatcaaagattccacaaaagtcatgtttgcattaacaaaattcatatttaaccttaacaaattcaacaaattaagttaagtccattttagtagcgttgcgaggagtttattttcgaaaatacgcctttgtatatattatatatttttcctccactttaaacaaaatcgaaaggtgtccatttgtcagctatttaaacaatatggcatcgccgccttacttgctcagtaagaaaatttaactgttttttttttgcgcacctgaaagcggcgatagacattgtttacttttagtttatatttacattatccaaaagccaaatgaactttgagcaggtcaatataccagagaaactagtgccggacaactatttgcaactgggactggctgcgcaacgcagtaagcagcgcagttttaaggagctgctcgaaaaggtaatcaaaccgaaattaaacccaaattaattgataactccatggataattcttcttttcaagcgaaagcttccgaaaaatggttggtccgatgaacgtatcgaggagctggtgcacatgctggcttccttggacagcaataactatccacataaggtcggtttaggagagcgggaggcgcgtatagcctgcagtaagtaagggatcaggaggcgatatcccccgtaatgaatttgtcattcagaactcgtggctcgccgtcactacaacttcggtcatggtatcggcagatctggagacttactagaggcacaacccaaggcagctggctctacgctgctcgctcgtctcacaaacgccctgattctggaccttattcggggaatcggactgcccagctgtgctggctgctttttggtgccaatgtgtacaggcatgacattgactttgtgcctgcagagtcttcgcaagcggcgacccggggcgcggtatgtgctctggtcccgcatcgatcagaagtcctgcttcaaggccatcacagcaacgggcttggtgccggtagtcatcccctgccttattaaaggagagtccctgaacacgaacgtagatttattccgagaaaagataaagtcattgggagtggatagcatcctctgcctgtacactaccaccagttgttttgctccacgaaacagcgatgacattgccgaagtatccaagttgtccaaacaatggcagattccccatctggtcaataatgcctatggattgcaggcaaaggaaatcgttaatcagttggagtgcgccaatcgagtcggacgcattgattacttcgttcagagcagcgacaagaatttgctggtgccagtgggtagtgccattgtggccagcttcaatgagagtgtgctccacgatgtggccagtacttatgctgggagagctagtggttcccagtcactagatgtcttgatgacgctactctcacttgggcgcaatggctttcgattgcttttcgatcagcggggcgagaacttcaattacctgagagagaaccttaggaaatttgcagagccacgcggagagattgttatagacagcaggtttaactccatatccttggccataacattggccactttggctggggatcagatgaagagcatcaccaagcttggctccatgctacacatgcgtggagtttccggagcaagagtgatagttcctggccaaaataaaactatagacgggcatgagtttctaggcaagtaatattcactatcgtctttgttttccgactaaaatttagaatatttcgcttagatttcggctcccaccgcagcaacctgcaagttccgtacctgactgtagcggcaggaattggaataacccgagaggagattgacaaattcttcgacattttcaacaagtgctggaaccagatttttcaaactaaaaatgaaaaaattatgagcctactagaaacaacaatcaaataaaaaacctattttttaatattaatgataaactttcacttttttagctgatttttataagcacaattttgttaggaatgtacagcgacttttatttgtttagacaatttggcagtgcatgcagtaacgatatcccactaaagagacctacatatacatatatatattttcctaagtcttagctgtgaccattgcctttgggctttctatttgagttggtgattgggtcgctgctgctattgctgggcacgttctctttgtcgcggtgcttctcccgactccgccgctccaggtgctggttcatggtcgcctcgatcttggcgagtgatagctcgtactcgtgcttaatgcgctcatactcgcgtttcatgtgcgcctccttgtcctcggcatacaacttgtaattgtgggcggtacgcttggcactttgatatcgctgctgtgcggatcgcatcgcctcttcgtgggtggaacgcaagctttccagctgctggcgccagtggtgttccacctggtcgactgactggcgctgtttctcccactgagccatcacagccttcatagattgcctttcggagtcgatgctggcgtgctgctcctccacttctcggagcagttcggcaattcgctggttcttcgcttgcagctcctggcggcacttctgcagcatttccttttgcttttcttccctgccggccagaatttcatcgatattctcgcgttctgccaggatagtttgctttagaagatccacctccgtttgccgctgttgcagctctgcacacaccgtttggtattccctttggaggcactggctcctctcctcagatttttgcagccggttagtaaacctcttgagttctgctgcaaaaagtttggccatctcatcacgaacacgttgttcgatcaaccttatccgattctgggtgagctctttgggcgatggatcagacggggaaactgagtttgatttcggactgggcgtacacttattctgctgcttatgctcctcttgctgcctaat

SEQ ID NO: 1070 - DNA, 1431 bp, DROSOPHILA
gaaactagtgccggacaactatttgcaactgggactggctgcgcaacgcagtaagcagcgcagttttaaggagctgctcgaaaagcgaaagcttccgaaaaatggttggtccgatgaacgtatcgaggagctggtgcacatgctggcttccttggacagcaataactatccacataaggtcggtttaggagagcgggaggcgcgtatagcctgcaaactcgtggctcgccgtcactacaacttcggtcatggtatcggcagatctggagacttactagaggcacaacccaaggcagctggctctacgctgctcgctcgtctcacaaacgccctgattctggaccttattcggggaatcggactgcccagctgtgctggctgctttttggtgccaatgtgtacaggcatgacattgactttgtgcctgcagagtcttcgcaagcggcgacccggggcgcggtatgtgctctggtcccgcatcgatcagaagtcctgcttcaaggccatcacagcaacgggcttggtgccggtagtcatcccctgccttattaaaggagagtccctgaacacgaacgtagatttattccgagaaaagataaagtcattgggagtggatagcatcctctgcctgtacactaccaccagttgttttgctccacgaaacagcgatgacattgccgaagtatccaagttgtccaaacaatggcagattccccatctggtcaataatgcctatggattgcaggcaaaggaaatcgttaatcagttggagtgcgccaatcgagtcggacgcattgattacttcgttcagagcagcgacaagaatttgctggtgccagtgggtagtgccattgtggccagcttcaatgagagtgtgctccacgatgtggccagtacttatgctgggagagctagtggttcccagtcactagatgtcttgatgacgctactctcacttgggcgcaatggctttcgattgcttttcgatcagcggggcgagaacttcaattacctgagagagaaccttaggaaatttgcagagccacgcggagagattgttatagacagcaggtttaactccatatccttggccataacattggccactttggctggggatcagatgaagagcatcaccaagcttggctccatgctacacatgcgtggagtttccggagcaagagtgatagttcctggccaaaataaaactatagacgggcatgagtttctaggcaattcggctcccaccgcagcaacctgcaagttccgtacctgactgtagcggcaggaattggaataacccgagaggagattgacaaattcttcgacattttcaacaagtgctggaaccagatttttcaaactaaaaatgaaaaaattatgagcctactagaaacaacaatcaaataaaaaacctattttttaatatta

SEQ ID NO: 1071 - protein, 378 aa, DROSOPHILA
MLASLDSNNYPHKVGLGEREARIACKLVARRHYNFGHGIGRSGDLLEAQPKAAGSTLLARLTNALILDLIRGIGLPSCAGCFLVPMCTGMTLTLCLQSLRKRRPGARYVLWSRIDQKSCFKAITATGLVPVVIPCLIKGESLNTNVDLFREKIKSLGVDSILCLYTTTSCFAPRNSDDIAEVSKLSKQWQIPHLVNNAYGLQAKEIVNQLECANRVGRIDYFVQSSDKNLLVPVGSAIVASFNESVLHDVASTYAGRASGSQSLDVLMTLLSLGRNGFRLLFDQRGENFNYLRENLRKFAEPRGEIVIDSRFNSISLAITLATLAGDQMKSITKLGSMLHMRGVSGARVIVPGQNKTIDGHEFLGNSAPTAATCKFRT

SEQ ID NO: 1072 - DNA, 4723 bp, DROSOPHILA
tttattgaataacagtgaattgggggaaaaaaaataatattttgggatggcgatgttgggcaggcctaccaggatggcgccttaccctcgctgccggcgggacggccgtatagggcactcttgtcccggaacatggtcatacgttccgtttccttcttgtccaggaagtggccaatggcaaatcccagcaggggcaacgcgccccacagtgctcgcttatccagtcccaagaccatggtgtatatttgtgtatcctcttagcgctgatccttcagctgggctcggtgtgccaactggagctgctggcgtttccactggcgggtgtgcgaccaatctgcgtaaatcgatccgactgcaacagtgggaaagaatatcactgcgccgtactttcgagccaattgaaccacaatcccactgcccataggtctgcaagacaagcacaggagatggcgagatttacatatgatttacacaaattgatgtggggattgttatgttatgggttgacattttgccgcattacgtaataaaaacgagtgatttctcccagcgtcgtgataactgtgttgatatttttgagaacttcttacgccgcgtgtgtggaacgctttatattgtattttttgggattctctcgtttagttttaaacacaaatttgctaaattagttttgttttcaacttacttatagcatcgatagcaccagggctgtcgagtcgtttttagtttaataaaattttggcagtaagactatcgccgacagggatgccactcagcttaagtcccgacgtcagctagaaagtagcaatattttatgtaattcaaaaaaaagttttagattatcaaaaaagtgtaaatataggtaattacacaaacatggtcaaatatggtaaattgtaattctaaaaatatatttaatatatttaaagacaagccgcttatcgataagtgggcgtctatcggactttagccatcgctaagccgcccgtcaattgttttcatgaattgacgtgtcttgttgaatgcgaaaaaacccagaatagaccgtaaacacacactcgcatggagttcctgaagagtggcatcaaaacggtgctgggcagcacggagccgggtcagcagccgagtgccgccgagacggtggagaagctggtggaccgtgtctactcctcaacgctcctggaggatcgacgggatgcctgccgagcgctaaaagccctgtcccgcaagtaccgcatcgaggtgggcgcacagggcatgcctccgctggtccaggtgctccagaacgacggacaggatgcagagatcatcagctatgcgctggacacactgtgcaacgtggttactagcgaggagttcgacgaggaggctgataatcccaccgtttcggtgaatgtgggcgagcagttcacggagatgttcatcaagacaccggagcatgtaaccctggtaatgggctatctggacgaatacgattttcgagtgcgtcgcgctgccatccaactgattacgtccctcatttcgaacaagacgcgggagctgcaggatttgattctggtcagtccgatgggcgtttccaagctgatggatctgctgacggacagccgcgaagtgattcgcaacgatgtccttctgctgcttatcgaactgaccaagggcaactcaaacatccaaaagattgtggcctttgagaatgcctttgaccgcctttttgaaattgtccgtgaggagggctgttcggatggcggaattgttgtggaggattgcctaattctgctattgaatcttctcaagaacaactccagtaatcagcagttctttaaggagggcagctatatccagcgattgtcgccaatgtttgagctctcacaggatgcggaagaggttggctggtcgccacagaaggtctcaaacttccattgtctgctgcaggtggtgcgggcactggtcacgcccagtaatcaacagcaggtggtggccgcctgccagcgggtcatgcaaaagtctcgactgctccatgctctttgcgagattctgatgagcagtggtgtccctgcggatatactcacggaaaccatcaatgcagtggccgaagtggtgcgcggcgatcgggacaaccaggatgaattgggaagagttatggctccgagcagtccacccagacctgccatcgtggtccttcttatgtccatgatcaatgagaaacaactgctggcactgcgttgcgccgtactctactgtttcgagtgctttctttatcgcaatgccgatggccagcgggcggttgtacagaccctgctgccctccagtgcgtccgatgtgagtgccctttcgacgggacaactcctttgcaccggactcttctccacagatgcgcttgccaactggttctccgctgtggccctaatgcactcactcgtagagaatgtcgccctaaaggaggaactactgcgcgtactgctggccactcctggtggccaaaagcctatcacgctactcgagcagtgcactaatctcatgcagcaggaacgctaccgtttgcaaagcaaggtgggtctgctaatgctactcagcctgtggctggcgcattgtccaggtgcggtgaaggctttgctggaaacgcagggcaccatggcctacctgaccgctcaactttgctccaacgagcacgatgaacgagagttccttgtccagggcatgtgcgcattcctaatgggcctgtgcatccagttcaatgacaactcgctgccggggcagaagcgcgaggacatcagtcagctgatcatcaagcgaattggccaggagagcttctgtagcaaactagcagaagtgtcgcgacatgaggcctacagtcgggcatgcaagcaggcccagatccgtgccaaatccgctggggaactactgcttgacttcgagtattgcaagctgtacaagggactggaggcgttgattgccaagctggttagcggatttgatgtagatggcattgaactgaccgaactcacgttgagctcggaagcttctgcattggtttcccagtacaaggggattatccgcggcatggatgcccagatccaagcactgcagcaatcctccaaagaactggaacaggagaatgccgagctgaaggagaaacttggtgaggagcagtcgctcaaggcgcagctcttggaccagaacacgctgcttaaggcacagctgggagcctcgaccggtcaggtgcagtccgcccaaggtgcggaagccacgccgcccaacgaggaggagctaaatgccgctcgctaccaggccaacatgtactttgccgaaaacattcgtctaactaaggagctggagacactacgtcagcagttatcagccgaaaaacagagtgcagatgcggcgcaagattccctggcggcgatgcaaaaggatcaagaagatttgctcgaactgctggccgatcaggaggcaaagctaacgcgatacgaagaagcgggctcgactaatacccttccgacttccaatgtagctccaagcgtgccggcagctggcggaggaagccccatcccaagtggcaccgccagcaggtagaaatcgtaacgcggatgagttgctagccacgtacatgttacaactggaaattgctcgactgccctaaaaacgttaaaatatcttatatacacacattctacttgttttacatttatttaacttacgtatagaatatatgtctagatcagaatttaaacgaatccattattgttttggcgggaactgcagcaaatcgcaagagatagctacatatatcggctcacgatttcctgtttccatctctttccgattccgatttgcccatataatggcttatgttggaattcgaagatagtgtttgttctgcgtttatttgtttaacaatattaatatacctatgattgggtaaatcgtaatgttgtaaaaaaaaaaccatttaaacagtttttcgaccttcctttctcagaaaataataaatggccttactttaattgaactatttgtcggaactgttgcatttacctgggggaaaaatagattgaaataattaattaaaaatcaaaaatatttttcagcgtttccgctggcacccgatacattagaatagatatcctaaagcttaattagctcaatcgctcaatatacataattgaacacaacacaccacattctataccatttatcgcgtttatttaacaaaaatggttattgtgatcaacattcagtttctgcttaaacgaagaatgtgggttcagagtctgcggtatttacttcttgccgctgaagacagagcttttcggcttgcgaatggtgacataacggccgcggttggccttggactccttcttgcgcttgaccaacagtttgacgtattcggcgatagcctccttggttgcattctggcgcttcttctggtgcctgcgctgcagcttaacagggatgacctcatcatcttcctcgcacaaatagtagatcttgctgatgttgctggaacgcacgggtcccaggcgacatggggagggattcttcttgagaacgaccaaagtcagcgcggatacgttggcttccacggtgtatttacgcacagtcttgcacttgcgcactttattgcagcgtggatggaagcacgagtgtatcttcttcaggagacgcaaacggcctgttggaaaagatgattgtttttttaagtagtttcttgagaggagtccat

SEQ ID NO: 1073 - DNA, 2723 bp, DROSOPHILA
atgaattgacgtgtcttgttgaatgcgaaaaaacccagaatagaccgtaaacacacactcgcatggagttcctgaagagtggcatcaaaacggtgctgggcagcacggagccgggtcagcagccgagtgccgccgagacggtggagaagctggtggaccgtgtctactcctcaacgctcctggaggatcgacgggatgcctgccgagcgctaaaagccctgtcccgcaagtaccgcatcgaggtgggcgcacagggcatgcctccgctggtccaggtgctccagaacgacggacaggatgcagagatcatcagctatgcgctggacacactgtgcaacgtggttactagcgaggagttcgacgaggaggctgataatcccaccgtttcggtgaatgtgggcgagcagttcacggagatgttcatcaagacaccggagcatgtaaccctggtaatgggctatctggacgaatacgattttcgagtgcgtcgcgctgccatccaactgattacgtccctcatttcgaacaagacgcgggagctgcaggatttgattctggtcagtccgatgggcgtttccaagctgatggatctgctgacggacagccgcgaagtgattcgcaacgatgtccttctgctgcttatcgaactgaccaagggcaactcaaacatccaaaagattgtggcctttgagaatgcctttgaccgcctttttgaaattgtccgtgaggagggctgttcggatggcggaattgttgtggaggattgcctaattctgctattgaatcttctcaagaacaactccagtaatcagcagttctttaaggagggcagctatatccagcgattgtcgccaatgtttgagctctcacaggatgcggaagaggttggctggtcgccacagaaggtctcaaacttccattgtctgctgcaggtggtgcgggcactggtcacgcccagtaatcaacagcaggtggtggccgcctgccagcgggtcatgcaaaagtctcgactgctccatgctctttgcgagattctgatgagcagtggtgtccctgcggatatactcacggaaaccatcaatgcagtggccgaagtggtgcgcggcgatcgggacaaccaggatgaattgggaagagttatggctccgagcagtccacccagacctgccatcgtggtccttcttatgtccatgatcaatgagaaacaactgctggcactgcgttgcgccgtactctactgtttcgagtgctttctttatcgcaatgccgatggccagcgggcggttgtacagaccctgctgccctccagtgcgtccgatgtgagtgccctttcgacgggacaactcctttgcaccggactcttctccacagatgcgcttgccaactggttctccgctgtggccctaatgcactcactcgtagagaatgtcgccctaaaggaggaactactgcgcgtactgctggccactcctggtggccaaaagcctatcacgctactcgagcagtgcactaatctcatgcagcaggaacgctaccgtttgcaaagcaaggtgggtctgctaatgctactcagcctgtggctggcgcattgtccaggtgcggtgaaggctttgctggaaacgcagggcaccatggcctacctgaccgctcaactttgctccaacgagcacgatgaacgagagttccttgtccagggcatgtgcgcattcctaatgggcctgtgcatccagttcaatgacaactcgctgccggggcagaagcgcgaggacatcagtcagctgatcatcaagcgaattggccaggagagcttctgtagcaaactagcagaagtgtcgcgacatgaggcctacagtcgggcatgcaagcaggcccagatccgtgccaaatccgctggggaactactgcttgacttcgagtattgcaagctgtacaagggactggaggcgttgattgccaagctggttagcggatttgatgtagatggcattgaactgaccgaactcacgttgagctcggaagcttctgcattggtttcccagtacaaggggattatccgcggcatggatgcccagatccaagcactgcagcaatcctccaaagaactggaacaggagaatgccgagctgaaggagaaacttggtgaggagcagtcgctcaaggcgcagctcttggaccagaacacgctgcttaaggcacagctgggagcctcgaccggtcaggtgcagtccgcccaaggtgcggaagccacgccgcccaacgaggaggagctaaatgccgctcgctaccaggccaacatgtactttgccgaaaacattcgtctaactaaggagctggagacactacgtcagcagttatcagccgaaaaacagagtgcagatgcggcgcaagattccctggcggcgatgcaaaaggatcaagaagatttgctcgaactgctggccgatcaggaggcaaagctaacgcgatacgaagaagcgggctcgactaatacccttccgacttccaatgtagctccaagcgtgccggcagctggcggaggaagccccatcccaagtggcaccgccagcaggtagaaatcgtaacgcggatgagttgctagccacgtacatgttacaactggaaattgctcgactgccctaaaaacgttaaaatatcttatatacacacattctacttgttttacatttatttaacttacgtatagaatatatgtctagatcaga

SEQ ID NO: 1074 - protein, 836 aa, DROSOPHILA
MEFLKSGIKTVLGSTEPGQQPSAAETVEKLVDRVYSSTLLEDRRDACRALKALSRKYRIEVGAQGMPPLVQVLQNDGQDAEIISYALDTLCNVVTSEEFDEEADNPTVSVNVGEQFTEMFIKTPEHVTLVMGYLDEYDFRVRRAAIQLITSLISNKTRELQDLILVSPMGVSKLMDLLTDSREVIRNDVLLLLIELTKGNSNIQKIVAFENAFDRLFEIVREEGCSDGGIVVEDCLILLLNLLKNNSSNQQFFKEGSYIQRLSPMFELSQDAEEVGWSPQKVSNFHCLLQVVRALVTPSNQQQVVAACQRVMQKSRLLHALCEILMSSGVPADILTETINAVAEVVRGDRDNQDELGRVMAPSSPPRPAIVVLLMSMINEKQLLALRCAVLYCFECFLYRNADGQRAVVQTLLPSSASDVSALSTGQLLCTGLFSTDALANWFSAVALMHSLVENVALKEELLRVLLATPGGQKPITLLEQCTNLMQQERYRLQSKVGLLMLLSLWLAHCPGAVKALLETQGTMAYLTAQLCSNEHDEREFLVQGMCAFLMGLCIQFNDNSLPGQKREDISQLIIKRIGQESFCSKLAEVSRHEAYSRACKQAQIRAKSAGELLLDFEYCKLYKGLEALIAKLVSGFDVDGIELTELTLSSEASALVSQYKGIIRGMDAQIQALQQSSKELEQENAELKEKLGEEQSLKAQLLDQNTLLKAQLGASTGQVQSAQGAEATPPNEEELNAARYQANMYFAENIRLTKELETLRQQLSAEKQSADAAQDSLAAMQKDQEDLLELLADQEAKLTRYEEAGSTNTLPTSNVAPSVPAAGGGSPIPSGTASR

SEQ ID NO: 1075 - DNA, 3216 bp, DROSOPHILA
ctctcttaacttctaaaactctttgttggtaaatgtaaatagaaatgtaacatttaacctgagtgtgtatacaagatacaagaaatataagatatgtatgtattagccagaagacctgagaaaaatttaatggatgttgtgttatccgtcaaataaattgttcaaaaaatatttaaaatatcagcgcgattcttacctgttacttgtaaagcaacgcagactcttaaaatttctttcgttacgcctacttatataaaaggaaattaaaagaattgcttaatatgtttgctttgtttggccttgttaaaagaaataataagtaattctgtgatgaaaacatttttaagcagagagaactatatagtccagttcctcgactatcagataccaattactcagctggtggaaaagttcaacattcattttggcttatctatacaaattggaaaaaaaaataataagatgaaaaataggcaagtaactttttaaaagtgtgggtttggtttggtttgggcgcatccaacatatcttttgccatactgataacaaatagtaaaattaaaaaatgtctacacataaaagtgaagacgtagcagatttcagtgttaaaatgggcgtggtaaaaggtttttggcatagctctagaaattggcaagacaagtaataaaatgaaaaaaaatcgattcatttttttaaattgtggcgttgcatcatcagaaagaaactgaatttctaatcttaactttctagctttaatagttcaagttaatagacaaggatatcaaaaatatatacatttttaaacgaatctagtataaccatctactacacgagtaataggtagaaaaatataattgttttgtgtaaaaatatcattaaaaaataattcaaatgtttagagaaaaagttttgtattaaatgtttgattgcattcagcgctttggatttgttttcagttgatttcgagaatttgcgcactcgcaactctggccacaccgcacgtcacggcaacggcaatcctagaactatctgccacatcagatttttcaaactttgtatactgtttctcaaaagaaaacgatgtcatagcaaattaagagtgaatcgtaaaatcaacatcgaaagtgttgccgcctccatgtagaagtgaccccgctaaagtcctcgccgctttacaaacgccgcagcatcctcaagacagttcttggaccaagtggaacgaatccaaagatacacataacacttgtggaacgcccacacttgtcgaaagaagaattgtagattgcagcgaagacgtgtatctaagataagtgttaggacgaggttgggaaagcacaagcaaaatggcacacactggcgggaacctatccggtaacatgcagccgccaccgccttccggaggcaggttctccgtggacatgcaaaggtgagtaaaccgtaacaaggagcgaatagctaattactcttgaaccctgcagcctgccctcgctatccaacctgccatcaccgctgcagatcttccaaatggtccgaaactccctgcggccctgggtagtcttcttcaacatcaacaatttcaaaacggccatcagcatgcagcggctaaatagccgggttattcggaatctctcctattttcaggccaactacgttttcatcttttttgtactgatgatatactgcctgtaagtgattctaaaaaccttattgcaccccatttaatagttataatcttaagcatcacggctccctgcattctgctggtcatcctggcttccgcttttggctgccataagctgcgcgtgcgcaacagtaacattaccatcgtgggacaacaactgacgcccagccagcagatcatcgcactcaatctggcgacggcaccagtgctattcctggtgggcgcgggtgcggttttgttttggacgctgggtgcttcatgcttcgtgattgctatgcatgctatattctacaacatcgatgctattgtaacggaggagaatgagggtttcctcgcccaggttgtctgaccgccagccagaagctaaaccctaggtcttctgggatcgtggcaaccagggacgaggaaaggggctaaacatattcgccactatggggccttgcaagtcgacacaatatgttgtacacctatttataacgaaatctagttaagccgcagactttaaataatcgaaatacacactatgacagattcatacgactatattctttttggcaaattaatcgcaatatatgaggcgcattcgctgagaacttcgatttaattcgaaaaaaaaaattaatttaaaggatgtggtcaagtcattggactctgtggcacttacaatatttcagatattttcgagctctttagaggcatgcgttttaaaaatgtattcttttaaataaagaataaatataagtaaccggaaaaaaatcgcatagtcggttctccaaaagaagtttccataaataagctgtttaaaatacattgaacaaacggctcaataaatcaactagaaatacaccacgatcggaattctctgcgatatgcaccacaaggaaggtaaataaagttacctaaagtacacacatatacatagctcgcgtaaaactaagtcggtatttcaatgaggtacaggtagttagaactaggaatgctttgttagctgcgtaagtcttggtccttcgcctaggcgtactgggcactcgccagtgtcttcgtctcctgctcctcgtcgctggcctgctggtccagcttctcgaatccgttgcgatcccgatcgagaagtccgcccagcttgaagccatcgcttttctcccacgcgtggcgacgaccgcgtgctccgaaaggcaggcaacctgtgggatatgttggtacaactgattaactaacaattaccatgggatttatatgagcaataacactagtcaccccattcccttcttagttcatgcatagatctgcgatctggcgtgcactggaacaaaccaaaaacgaaaacagaatacacttaaggataaacgtaaattttgtttgtatgcttatgtattttgtataaaaagttgtatataatttgtatataaatgcggtataaattttaattacaataaagttgaacgaaaagtaagccaacgaatacagaacacacaagaagtggacatgctgtgtaattaacgacaccaaaaaaagcgtaaatagggagattcaattgt

SEQ ID NO: 1076 - DNA, 1111 bp, DROSOPHILA
cgtcacggcaacggcaatcctagaactatctgccacatcagatttttcaaactttgtatactgtttctcaaaagaaaacgatgtcatagcaaattaagagtgaatcgtaaaatcaacatcgaaagtgttgccgcctccatgtagaagtgaccccgctaaagtcctcgccgctttacaaacgccgcagcatcctcaagacagttcttggaccaagtggaacgaatccaaagatacacataacacttgtggaacgcccacacttgtcgaaagaagaattgtagattgcagcgaagacgtgtatctaagataagtgttaggacgaggttgggaaagcacaagcaaaatggcacacactggcgggaacctatccggtaacatgcagccgccaccgccttccggaggcaggttctccgtggacatgcaaagcctgccctcgctatccaacctgccatcaccgctgcagatcttccaaatggtccgaaactccctgcggccctgggtagtcttcttcaacatcaacaatttcaaaacggccatcagcatgcagcggctaaatagccgggttattcggaatctctcctattttcaggccaactacgttttcatcttttttgtactgatgatatactgcctcatcacggctccctgcattctgctggtcatcctggcttccgcttttggctgccataagctgcgcgtgcgcaacagtaacattaccatcgtgggacaacaactgacgcccagccagcagatcatcgcactcaatctggcgacggcaccagtgctattcctggtgggcgcgggtgcggttttgttttggacgctgggtgcttcatgcttcgtgattgctatgcatgctatattctacaacatcgatgctattgtaacggaggagaatgagggtttcctcgcccaggttgtctgaccgccagccagaagctaaaccctaggtcttctgggatcgtggcaaccagggacgaggaaaggggctaaacatattcgccactatggggccttgcaagtcgacacaatatgttgtacacctatttataacgaaatctagttaagccgcagactttaaataatcgaaatacacactatgacagattca

SEQ ID NO: 1077 - protein, 193 aa, DROSOPHILA
MAHTGGNLSGNMQPPPPSGGRFSVDMQSLPSLSNLPSPLQIFQMVRNSLRPWVVFFNINNFKTAISMQRLNSRVIRNLSYFQANYVFIFFVLMIYCLITAPCILLVILASAFGCHKLRVRNSNITIVGQQLTPSQQIIALNLATAPVLFLVGAGAVLFWTLGASCFVIAMHAIFYNIDAIVTEENEGFLAQVV

SEQ ID NO: 1078 - DNA, 3854 bp, DROSOPHILA
actgcgtttgcccacacttgaccacagaaagaggcagagaccagcacaagtcaggttaaacacaaattaacctcatttgacaaaacaaagcgagcagcgctaaaatggataatttgttaaataaattgcacgatttttattcaaactattcaaatattcggttgctggtatttgtaaactgcctatttgcatacgatgataaataaaaatgagaaattaaactcttttgttatgcttttccataatctctgttgttttgttttggccgtctatagatacaaatccgttttatttgtttttttgaaaatgtttagtttttatgccttctgctggtcttttttacatcccggcattacggcaaacggcccgaacaccttttcccacccatattcagcccactaccaatgcaatgatatgtaaaaacaaatcctctaaaattattgcgttcattacattttaaacacaggtgattagattttataatttgcatggctaagccgggccaaacaagttcgggagtacagttttgcacattatttatttaaaacaataataaaaattattctgaaaaatgtatttggtttttctttatttattagtggctttattttatttgccccttttcatttcaagcactatcgaaatgcgggatcaacatttgccagcaaatttgagttttttcttattttttgcatgtattgaattccgtagtttctaataatttttagccggcctaattagtttctcctatatatttagctcacgtggagaatatttaaaacattccctttttggtccacctctgttcgacattattaattcagtgcgacaacgcctgtgttcatttgaaatactaaactaattaaaatattttgaccaattttctgacgggaaagttggggttcctttattctgcgcttacagcaggcctgaaaccaaacgtcttatgacaatattcatcattcaaaagttctaattcggatcgtatataacccatgaaatggctcggttgatgttgcgaatgaaagtatccatgatactgaccggtgtattttttacgctttactttgggctccagccagtaacagagtggtttgaaagaaaggatctagtgactgcacccgaggaagtagtctttgtgaacacctccgtgtgtcatgtaagtggccaatggaagccgacggcgttttactctgcgattgagccggtcaacaagttgcggtgccggatgacccaactacttactgcaataactcaagacggtagcaattttctggaggccaaaaggatctcagaggacttgagttgtaggtattggctaaaatctggacacacccgcaaccattcagggcactacacagcgtatggacacttcgatctgaaaaggggtgcgaccagaaaaattaagatcggcactggagagcagatagttcgcattaggtgctcggacaagtttaaagcaagcaaataccatgacgtgctttattttttgtctccgcccgatcccaaattgatgtcgacagagagttctgagaaattgtctgtgatggtcttgggcattgactcagtttcccacatgcattttgtgcgatattttcccctcgtgatggcctttttagaaaaccacccgcacacgaaattcttcggctacagtcgtgtgggcctggatgcaaatgccaatttagtcccttttctaggtggcaaaagcagtcgggcagctggttcagacattctctccgacgagaaggcgtggctgtgggacagcttcaagatggaaggctacagcactgcctacggtgaggataacgccaaaggtatcctctccaataggaacggggataaagagcttcccaaaagtccagtcgattttgatttgactcctgtaattgtcgagatgaataatcacacgcgctatagcatcgatctgaaggagatgatccactgcacggcaggccgtaaattccaagatgttctcagggactttgtactccaactggtaccctatatgcaaggaatgccatttttctcgtttttctggcagtcgcagggtgtccaggagtactatgaatacgcttggcacttggatctttcctatatgatgcttttgaagaagttgctggacgcggatattctgaacaacactctgctgtttctgatgtccgaccacggcctgcgagctggtgaataccgcatgagccttcagggcatgaaggaagaatcacagcctttaatggtggcaatatacccggaatggttgaagcggaaatatcctttggcagtggggaacctcgaaagcaacgcgcatagtctgatcactccgtacgatcttcgcgaaaccttagcggatgttatagctctcggtcaactgaaggacgccaacatagaggtcagcatgaaaaggctccagtcacatcccccaaataggttgcccaggggcattagcctctttcttccgattcccgaccacaggacctgcgacttggctcacataccttccctcttctgcttttgccgggagctcaccgaagttcccacggacgacggtctggtccttcgaagcagtcgctttatggtggaatccatcaaccagcttatcaaaccattcgggcagtgccggcaactgaagctcgaaatggttttactggcccacttcttggacttcggcgaagagtccttcgtctacgagttaaggctgcgggtgcggacgagtccggggaatggggtttacgaggccaccgttcgtctgtcggacgttctactgttgaccagtcccatcagccgggtcagtcattacctggggcagtcccactgcatcggcgatccagacctgcaaatattttgcttgtgtatttgagagatgtatttggtggactgatttaaaatatagaccactaaaaggatgctcaaagtatagtaaaatgatttcatacgggaatgtgtaaataaaaatgtactgctgaagatgccaagtaccagcagagtcccggaattgaccatacgaatacttatgggggaaggggtcaacaaattatacaaattatcaaaaaacaaaagagaatgctatagtcgactaacccgactatcaggtactcgtaactactttagtggaaattcgaatgcgaaatgtaatcttttttttttttgtatatagccaaatgattgtatttatgcattttctcaaatctatatttgcattttaatagaactagaatgtaggcgccgaatattcacatttggttcattaaaactttacaatagcgtataaaggaatacgacgattgggtgaaaggagtattgaaataaatttcattaatcaaatagtaagctcaaagacaatgttccatagcccgtgggcccacagcggataatttgcgtcaaaatgtcggtttgtttgaagagccagtggtgccacagaggctgtttcaatgagcgacgtgcagtggaattaaaatgaaaatattttaaagtgccacatcgaaacaaaaatccgtaataatttgcaatttatttgctgggaacgaagcttctatacacgtgcagagttgtagtgggattcaggacggtagttataaattttaaaaaataattaaaaaccatttggatgacaagtcgcattcaattactgcaaaatgtcctaaaatgaattctttttccattgattgttggcgattgttgtcaggcctcaggttgcacatgtggtgaacagcgcgacgagtaaattgaaatgtcccgttcactggacgtgatcactcccacgcttccaccgcatggagaagagtgcgtgactgctccatttgctttaaacacacatgtattttattgataaataaaaatgcagcatggttgcttccaac

SEQ ID NO: 1079 - DNA, 1854 bp, DROSOPHILA
atggctcggttgatgttgcgaatgaaagtatccatgatactgaccggtgtattttttacgctttactttgggctccagccagtaacagagtggtttgaaagaaaggatctagtgactgcacccgaggaagtagtctttgtgaacacctccgtgtgtcatgtaagtggccaatggaagccgacggcgttttactctgcgattgagccggtcaacaagttgcggtgccggatgacccaactacttactgcaataactcaagacggtagcaattttctggaggccaaaaggatctcagaggacttgagttgtaggtattggctaaaatctggacacacccgcaaccattcagggcactacacagcgtatggacacttcgatctgaaaaggggtgcgaccagaaaaattaagatcggcactggagagcagatagttcgcattaggtgctcggacaagtttaaagcaagcaaataccatgacgtgctttattttttgtctccgcccgatcccaaattgatgtcgacagagagttctgagaaattgtctgtgatggtcttgggcattgactcagtttcccacatgcattttgtgcgatattttcccctcgtgatggcctttttagaaaaccacccgcacacgaaattcttcggctacagtcgtgtgggcctggatgcaaatgccaatttagtcccttttctaggtggcaaaagcagtcgggcagctggttcagacattctctccgacgagaaggcgtggctgtgggacagcttcaagatggaaggctacagcactgcctacggtgaggataacgccaaaggtatcctctccaataggaacggggataaagagcttcccaaaagtccagtcgattttgatttgactcctgtaattgtcgagatgaataatcacacgcgctatagcatcgatctgaaggagatgatccactgcacggcaggccgtaaattccaagatgttctcagggactttgtactccaactggtaccctatatgcaaggaatgccatttttctcgtttttctggcagtcgcagggtgtccaggagtactatgaatacgcttggcacttggatctttcctatatgatgcttttgaagaagttgctggacgcggatattctgaacaacactctgctgtttctgatgtccgaccacggcctgcgagctggtgaataccgcatgagccttcagggcatgaaggaagaatcacagcctttaatggtggcaatatacccggaatggttgaagcggaaatatcctttggcagtggggaacctcgaaagcaacgcgcatagtctgatcactccgtacgatcttcgcgaaaccttagcggatgttatagctctcggtcaactgaaggacgccaacatagaggtcagcatgaaaaggctccagtcacatcccccaaataggttgcccaggggcattagcctctttcttccgattcccgaccacaggacctgcgacttggctcacataccttccctcttctgcttttgccgggagctcaccgaagttcccacggacgacggtctggtccttcgaagcagtcgctttatggtggaatccatcaaccagcttatcaaaccattcgggcagtgccggcaactgaagctcgaaatggttttactggcccacttcttggacttcggcgaagagtccttcgtctacgagttaaggctgcgggtgcggacgagtccggggaatggggtttacgaggccaccgttcgtctgtcggacgttctactgttgaccagtcccatcagccgggtcagtcattacctggggcagtcccactgcatcggcgatccagacctgcaaatattttgcttgtgtatttga

SEQ ID NO: 1080 - protein, 617 aa, DROSOPHILA
MARLMLRMKVSMILTGVFFTLYFGLQPVTEWFERKDLVTAPEEVVFVNTSVCHVSGQWKPTAFYSAIEPVNKLRCRMTQLLTAITQDGSNFLEAKRISEDLSCRYWLKSGHTRNHSGHYTAYGHFDLKRGATRKIKIGTGEQIVRIRCSDKFKASKYHDVLYFLSPPDPKLMSTESSEKLSVMVLGIDSVSHMHFVRYFPLVMAFLENHPHTKFFGYSRVGLDANANLVPFLGGKSSRAAGSDILSDEKAWLWDSFKMEGYSTAYGEDNAKGILSNRNGDKELPKSPVDFDLTPVIVEMNNHTRYSIDLKEMIHCTAGRKFQDVLRDFVLQLVPYMQGMPFFSFFWQSQGVQEYYEYAWHLDLSYMMLLKKLLDADILNNTLLFLMSDHGLRAGEYRMSLQGMKEESQPLMVAIYPEWLKRKYPLAVGNLESNAHSLITPYDLRETLADVIALGQLKDANIEVSMKRLQSHPPNRLPRGISLFLPIPDHRTCDLAHIPSLFCFCRELTEVPTDDGLVLRSSRFMVESINQLIKPFGQCRQLKLEMVLLAHFLDFGEESFVYELRLRVRTSPGNGVYEATVRLSDVLLLTSPISRVSHYLGQSHCIGDPDLQIFCLCI

SEQ ID NO: 1081 - DNA, 2655 bp, DROSOPHILA
tcaaccactccacgcaccacacagcaattggcgcctccaagtataacttatatgtatttgtatcagctaatttttaatattttatagactctggacctgaaaaacgctttgaactcgccttgattcggatacctccctgcgctccggacctgagatatttatgtgtttggtggagtacctagcccataaattgcacgaaattatgcgtaaataaagcaaagccggctgttcggggtccgccggccgtttgatgttgttctgttgttgtgactcggatggtggggtcatgaggtaaactaaatctaaatcatatatttcctcagaaatcggaaaatacaatttataaataaagctctgaacggatttgcccaactgaattgggtttgtgtaaaacaatcatcgttttaatggtgggggggggggaggggggattcgttgaaaattatgtaacaggtagcgtaaaaaaatatattccttatcgggatcaatagccacgtcgatacagccatgccggtcgtatgaactttgactttagtgacgcctacgatgagcaattttcttttagagcgttgccacgcccactcttacgcctaccaaccgcccgaaactgccacgcctgataattgttttgatatttttaactttttttttagtcttctaatcccactatcttagcaacgagtcgagaaactcgaatatagcgttatttcttgttttttgtcatttttattgattattcaatttaattttgatatttccccttgcactcccacttatatcttatatgatcgtaatctgataggcgagagattattttaaacttattatcccttaaactggtaaaaatcgggatttctttctgtccttttttgtagttcatcacattaccaatgcattcattgcctgtcttcatctttcgtcaaaattaaacatgactgttagaataggcaatcaatttgtcagattgacagaataaatttagaaataaggaaattaacaggaaaatcgataaaacagagtacgcagggatcttgttttcaggacaacaaaaagaccattgcttaccaacatatcttgaagaccccataatggatggtctgtcgcggaaggcgttccatcaagtcgttggaaacaattcagaccataccattttgcaggataataaaaagaagtatggcgaagatcccagacagtctttttgggtatccgtaagcgactacgagttggacagggcttacattgtctactgcttctttctcgatatcggtggcattgttgccaaaagcttgacgaaaaccaatcgcatgtacctgaagtacttcagcgtggaggatgcccgaatcgcgctgagctacgatggccaaaaaattggatatggcggggatattcgcgtaaaagtcacagctgagaaccccgtttccgagaatgccgtcagtgaatttctggagcaatgctcagagggcaatggcgatccccctgacaatgaaactacaggaatggctattgtcgatgccgcggatgaaagaaacgcgatcatttccgatcaactgctgatgggaaaccgtggagaaaataagtccaagggcactaccaaaaaagtcggtttttcccagtggcttaaagaaaaactatcttatgtgttctacttttattaaattccaacattgcagctcttttcagggatttgtttgactaactgagggagctgtctctttagacatcgcttcaatgtagttgcttttttattttaatatcttaatgctaaacgttcaaaaatagcaacattatcatagtgggtaagaagtcttcaaagctttttcaagtcgaaaatttattaatatgaattatgcgagtgctacatttataaaagatgattttttgtcctcctatgtaattcaaatggattgcggactgctgtttttgctggaggttaggaaagaaatcaatgagatcgacttttccctttactcccactgtgatccatacttatgtatatgtcttagcgtatggcgtgtttgctgtgtttgaatagtttttgccagtaaatgttacacacttatcaatgccgataaattaaattcgcattgttcagaaaaacatttctgggatgaccgcaaactcggaccctgggagccattatagaatttttaattacaataaatcaatttaaataaaatgtaatttttcaattttatcaaattgtcattatgcgtaattaattcctatgcacaaatgcattttagtataacaacgcgcagcacgtcgaaagtagcgccgtcgccctctaccgccgagaggtgggaactacggctataccggatagtcgccccgatttgccaccattttcgtgtgtgcatttgttttgtcaaaaataatgctgcttaattattatatttgtaatttatttgccccgcagttatcggatccaaatggtaaaaagtatgcgcggtgctttaatgccacattaatcccgcacaacaaacagaccaacaaagcctgatacaaagcaacaacaacagcgacgccgccgcaacaaacgcactcaaaatgggaatgacagtaataaacaacaaaagcaattcaaatgcagcgcatagaatgcataattaatttttattttgatgacaacgtcaacgcaccatcaccatccagcca

SEQ ID NO: 1082 - DNA, 655 bp, DROSOPHILA
gaaaatcgataaaacagagtacgcagggatcttgttttcaggacaacaaaaagaccattgcttaccaacatatcttgaagaccccataatggatggtctgtcgcggaaggcgttccatcaagtcgttggaaacaattcagaccataccattttgcaggataataaaaagaagtatggcgaagatcccagacagtctttttgggtatccgtaagcgactacgagttggacagggcttacattgtctactgcttctttctcgatatcggtggcattgttgccaaaagcttgacgaaaaccaatcgcatgtacctgaagtacttcagcgtggaggatgcccgaatcgcgctgagctacgatggccaaaaaattggatatggcggggatattcgcgtaaaagtcacagctgagaaccccgtttccgagaatgccgtcagtgaatttctggagcaatgctcagagggcaatggcgatccccctgacaatgaaactacaggaatggctattgtcgatgccgcggatgaaagaaacgcgatcatttccgatcaactgctgatgggaaaccgtggagaaaataagtccaagggcactaccaaaaaagtcggtttttcccagtggcttaaagaaaaactatcttatgtgttctacttttattaa

SEQ ID NO: 1083 - protein, 188 aa, DROSOPHILA
MDGLSRKAFHQVVGNNSDHTILQDNKKKYGEDPRQSFWVSVSDYELDRAYIVYCFFLDIGGIVAKSLTKTNRMYLKYFSVEDARIALSYDGQKIGYGGDIRVKVTAENPVSENAVSEFLEQCSEGNGDPPDNETTGMAIVDAADERNAIISDQLLMGNRGENKSKGTTKKVGFSQWLKEKLSYVFYFY

SEQ ID NO: 1084 - DNA, 3955 bp, DROSOPHILA
acgacaccacgtgatgttcccctatcacgaggaaaaggtgaagtgcgatgagtatggggagatcatcaatctagacgactaccggattgcggatgcgacaggctatgagtttgtacctatggaggagcaaaacaaggagaatgttaaaaaggaagaaccgggcataggagcagaacaacaggctaacggaggaatcgtcgacaatgatgttcagttgctggagaagcccaccaagctgataagccaacgcaaaacaatcgaggtgaatgcccaagtccagaggatcgatttcgaaggtcgctctgatggcgagtccatgctaaagatcctctcccagttgaggccacgaagggttatcgtcatacacggcactgccgaaggcacacaagtggtggccaggcactgcgaacagaatgtcggtgcgcgcgtttttactccgcagaagggggaaatcattgatgtcaccagtgagattcacatctatcaggtacgcctgacggaaggacttgtctcccagctgcagttccaaaagggcaaggacgcggaggtggcgtgggtggatggtcgcctgggcatgcgggtgaaggccatcgaagcacccatggacgtaactgtggagcaggacgcttccgtgcaagaaggcaagacattgactcttgaaacactggcggacgatgagattcctatccacaactcagtgctcattaacgagctgaaactgtccgactttaagcagactctcatgcgtaataacatcaactcggagttctccggcggcgtgctctggtgcagcaacggaactctggccttgaggcgagtggatgccggcaaggtagccatggagggatgcttatccgaggagtactacaagatcagggagttgctgtacgagcagtatgcgatcgtttaatattcaaaatgacgtttgtgtaagcccctaatgttttacttgttaagattagaaagtttttatataagagaatcagttgtactttattgcctacataaattgcagcatgggatcttctgcccttggccgcttcttcttccactcctcgatctcgtcctctgtgggcgccttcacatcatacatgctgttataggctcgtttgcgatcgtccagttcctcgggaatatctttttcctttgtcttatctttgtccttggtctccttgttcttgcctttttgttttcgctgctccttagccttctttttcttctcgcgcttcttcgacttcttcttggtcttcttcttctcaggttttacctcctcctcttcggatgaggagggttccgaactcgatgctgagtccacttcggaagtgggcctttcaggtggcacttctggtaccttgaattggctttgagctgcaggttctgtagtagccgctgcagtggagctcgtagaatgatgttccgagtagccctctggctcctgcatgcccacgcagtaggagttcttgatgaaggacttgcagcacttgtaaccccagcgtccggcgttccagaaactgccccaaactgttgtgtgattgttgatatacacatcctcctcgtagatactgcgcgctttcggtttctccacgcccttgataaccttgccgctgcgagagtactcgatgtactcctcggtctgcgccagcaatagcgactttggtggaacctgtagatgctcttcgccaccatatttctccacaatgtgtgttttggtctggaaaaataaaggaaatggatatagtaatgtttccaagaaatttccattttcaattacttacacttgacttgaactgttccttcttctgctcgtactccttctgaagcagctccaacttagtgggctccgctagcagatgcacatcaacccccttgccatgagcttcccaggcaaacaactgggcggtggcttgggctgtagtgtctccagaaaagcgtacaaagttctcgccagcaaactcagctctgcaagaatgagtagttaagaaatttctttatatgtgcaactttttgttactcactcctcttcggggacagcaggattgggattgtcacgcatggagcgcgtcttgggatcatagtaggccgagttgggatccaagttcctcaggtacttcgccgtatcctcgcggatacgcaagttgcgcactgtaattcgctgtttggagtccacttttgtgccgggcatgtccacttcgtccacatatttgtcctcgttgccttcctcatcggatatttcagcatcgggatctaaggggtacatgcgaatgatattaattcaactataagcactctgaattcacttttacctaccatttttcagcttctctgctttaagttgtcgcttggcctcttccaccttttcgtactcctcaatgatctctctgtgattggccggatcgtaactactccagcgatctcgtttctcgtcatagttcaccgccgcttcattgaccaaatgctcgtcgtgcacgacgatggattcagcgtacttggcttggactttccgcggccgctccaggcagtcctttcgtttgtgtgtgacggcgccacagttctcgcaggctcccttgcggaacttggtaatgatgcgtgcggtgttaagtcctttgggcgccctcttgtccagctgtccttgctcgtcctcgtgctgcggtcgctgatgcttgagagtgggcccagccgatccgtaataccatggtgcattcgatatgtactgcggaatgtggggatttatgtcgcgaccctcctcgtcgacggcggccggagctgttcccgcttttcgagcctcctccagctccttggccttgcgccagtcctcacgggacttcttcttgggttcctcctcggcatcctggtcgtgcttgctcagaatgatctgcgagaccggcgtgcgcatgggccccgagctcatattgcctgattttatttactagataatattagttgtaatatttatttctcttttatgttatcggttatcgaaaagtgttggcaagcagagaagcacttggcttaacagcgaaagtgttggacaatctgtagcacccccacgatatgtatcgcccaccttggcacatcgctaacgtttttccaataagaattggagtgaagtgaacatttttatcaatagtaatacgcgaaacagttttaaagccaataagaaaactacccagcaatgcaacggaaaatggtggacactgtgattttgtgaaactgttcgaattcgttggaaaaccaaggaaattgcctgggaaaaccaataaatttataacgctgtgcaaacgggtgcgtttaactgtgtgcgtgcgtgtgtgtataagcgcatacatatgtcgagcgtgtgtgtgtgtgtgctctagtgtgaaggcatccttaattttttcgcacacatagctgaacactttttctctgatatacaagttcctgcgcgcgcatatgaattattttattctttttgtttcattgttgattgcaatattttctgcctatttggtgtcgtgcatacccatttcacataaacattgtaaggaagcgtttcaataacttttcatttgaaacgttaaacattttctatataccaacagtagagagagcaagaaaataagagagtggtatatgtatataaaatccatcgatgggactttctaaatattactccgtgtgtggtgcttgattgtgaagcgaaaaatgtcagcgaaacgtgtatctcatagccaagcggagtggttagcatacaatttaaaaaacaatgaaatataatatttgaactacgaacatagtgcgcatttcgtatgtttaccaacactgcgttcgttagtgtcaagctgacaggtggacagtacggcaactctgccagctggaagaccttcgttttcaccaattagaaaattacaaattttccaattggacgggttagtttagttaattgagcgcacttattggcgtttcgtcaggtgtt

SEQ ID NO: 1085 - DNA, 1631 bp, DROSOPHILA
aaataaatattacaactaatattatctagtaaataaaatcaggcaatatgagctcggggcccatgcgcacgccggtctcgcagatcattctgagcaagcacgaccaggatgccgaggaggaacccaagaagaagtcccgtgaggactggcgcaaggccaaggagctggaggaggctcgaaaagcgggaacagctccggccgccgtcgacgaggagggtcgcgacataaatccccacattccgcagtacatatcgaatgcaccatggtattacggatcggctgggcccactctcaagcatcagcgaccgcagcacgaggacgagcaaggacagctggacaagagggcgcccaaaggacttaacaccgcacgcatcattaccaagttccgcaagggagcctgcgagaactgtggcgccgtcacacacaaacgaaaggactgcctggagcggccgcggaaagtccaagccaagtacgctgaatccatcgtcgtgcacgacgagcatttggtcaatgaagcggcggtgaactatgacgagaaacgagatcgctggagtagttacgatccggccaatcacagagagatcattgaggagtacgaaaaggtggaagaggccaagcgacaacttaaagcagagaagctgaaaaatgatcccgatgctgaaatatccgatgaggaaggcaacgaggacaaatatgtggacgaagtggacatgcccggcacaaaagtggactccaaacagcgaattacagtgcgcaacttgcgtatccgcgaggatacggcgaagtacctgaggaacttggatcccaactcggcctactatgatcccaagacgcgctccatgcgtgacaatcccaatcctgctgtccccgaagaggaagctgagtttgctggcgagaactttgtacgcttttctggagacactacagcccaagccaccgcccagttgtttgcctgggaagctcatggcaagggggttgatgtgcatctgctagcggagcccactaagttggagctgcttcagaaggagtacgagcagaagaaggaacagttcaagtcaagtaccaaaacacacattgtggagaaatatggtggcgaagagcatctacaggttccaccaaagtcgctattgctggcgcagaccgaggagtacatcgagtactctcgcagcggcaaggttatcaagggcgtggagaaaccgaaagcgcgcagtatctacgaggaggatgtgtatatcaacaatcacacaacagtttggggcagtttctggaacgccggacgctggggttacaagtgctgcaagtccttcatcaagaactcctactgcgtgggcatgcaggagccagagggctactcggaacatcattctacgagctccactgcagcggctactacagaacctgcagctcaaagccaattcaaggtaccagaagtgccacctgaaaggcccacttccgaagtggactcagcatcgagttcggaaccctcctcatccgaagaggaggaggaactggacgatcgcaaacgagcctataacagcatgtatgatgtgaaggcgcccacagaggacgagatcgaggagtggaagaagaagcggccaagggcagaagatcccatgctgcaatttatgtag

SEQ ID NO: 1086 - protein, 527 aa, DROSOPHILA
MSSGPMRTPVSQIILSKHDQDAEEEPKKKSREDWRKAKELEEARKAGTAPAAVDEEGRDINPHIPQYISNAPWYYGSAGPTLKHQRPQHEDEQGQLDKRAPKGLNTARIITKFRKGACENCGAVTHKRKDCLERPRKVQAKYAESIVVHDEHLVNEAAVNYDEKRDRWSSYDPANHREIIEEYEKVEEAKRQLKAEKLKNDPDAEISDEEGNEDKYVDEVDMPGTKVDSKQRITVRNLRIREDTAKYLRNLDPNSAYYDPKTRSMRDNPNPAVPEEEAEFAGENFVRFSGDTTAQATAQLFAWEAHGKGVDVHLLAEPTKLELLQKEYEQKKEQFKSSTKTHIVEKYGGEEHLQVPPKSLLLAQTEEYIEYSRSGKVIKGVEKPKARSIYEEDVYINNHTTVWGSFWNAGRWGYKCCKSFIKNSYCVGMQEPEGYSEHHSTSSTAAATTEPAAQSQFKVPEVPPERPTSEVDSASSSEPSSSEEEEELDDRKRAYNSMYDVKAPTEDEIEEWKKKRPRAEDPMLQFM

SEQ ID NO: 1087 - DNA, 7267 bp, DROSOPHILA
tattttttttttttaacataattttgaatagcattaaaattattagctacaaatgaataaaaaacgagcgggggtggggggaaacagaggctgcggggcagctggaaaaaaaattagtgcgaaggactagaagtaaaggaaagaaacgggcgtaccatccttatgtcgggggaagccctctggaacccccattctatcccgtccagcacaaatgcgcataatgagctctggtcagccagcctagacggctgtgggaggttgccatcgcagagatttacgcgcgacaagtttttcttgcccttttccacaacgtaattctttttcatgccctatctatagaattttgggtgtatgccattttgtatcaaaataaagggtatgtcttagattttgatactatatgttacaacaaaatatgacacaccacttatatgatggagatatatatttattcctagcatttcattaaagtgtatagtcttttaaaaatgtagagtagagtattggaaaagtagctcaacccgtcttctattttaggtaacattttttgtagactcgcaacatccagctaaacacttttcagttgatatcgcaaatccttttcgctggcgcttacataatgatatgtggccgcagatgccaagggagggaacatttaaaaaaaatgcatttaaaaataaaatgagaaggaagtagcgtctgctgtttgcctttctccattgaatattgagaatatgaattaaatataaacctgcagcaggataatcataagcaaatcactatatgcaattagggaaatagtttaaacataataaactaaaatctataagtggacagagtcgcaaagatttaggaaaaccatttttgatcgcttgatcacccaataattgaaaatatatgctcgtattatttatagtatatttaaaaatcatttttattccgttatatcatgcttgctgtattgtgtaatatatcagttaaacataactcttaactagacaaaaaaaaaataatcgattatatggtaaatagggtgaccgtgaatagtatgtagctccacttttcagagtttataaatggtgcatttgatcctcgaccagctttttgggccttctcttgcggcgttttcttgcctttcgtcgtaggcgatcgaatttccggatccggtcgcaaatgaaatgcttgaggtcatcgccctcggcggccgattgacgactgcacgacattgtgaatattattagcgagttaaggtagacaaaaaatcttatatcgtagtcatctaatgatggtttgcccttggttcgatgattattattattattatctttctgtcggtcttccctttcccgttcccgttccttttgataattactaaagttgtgcttgcgcaacttggaggcgggatacgtagtgggcgatggatggggctcaaaggtcgagcgctggcgcttcgaactggacaagtgttgccgaaaataatcgtaaatgctcatgttccttataacgatcgtggtggtgttgctaatgtttattaacggtcccgatttatgaggcgccacatgctgtagatttagccaactgccgcctgccgcctgcacgcgagttggcaacgaagtggccactatcttattgtaattgttattggccaacatcgttgtcgtattcaatgtataatgtagcattggctcattggtgttattgttgccgatgttatggcatcggacgttgttgtgttgatggttctgataatcttgattgtagtaaggatttttttgttgggttattgttgatttggttgtattgtaatctacagcagtgactgcaacccgtcaatgatcagcgaccagcggtccccagaacattttcgatatcttcgagtcgtcctcggttaaaaagaactgacggcccaaatgcacaaactccttgagcgacaattggccatcgccgttcttgtctatcacagcgaatgaaacggcagcatcgtcttcggtcagtcccagacaacggaagaagagcttgtattgttcgagatccaaatggccagtgtgatcaaagtccacagcctaagaaaaaaaaaaccggaaaaattatttttctgtttatcgataatagcaacttaacaatgaaactaaccttaaacaagtagggcaggaagcgaccgatgcgtttggccatcttcttgtcgttgagacgatggtgcagatcggtgaggaactgctcggcagttaccagattgtatggggttatctccccgaactgctcttcccaagtatgcttgatcacatcgttgaattcggcagcgacctctggggtcaaatggcccagatcgctaaagcgtttggccagcaaactaaagtcgtcgaaggacacgacgccgtcgtgattaacgtccaaaatgcggtggagagtacgcattttgcggcgccagaatgctgagtcgccctaaaaatgaggaaaaatatacatattaattggtttgccttgcgattttattttaaattttaattatatttgatttaaaacattcacagggcgtgctaaaagcttcttaaactctaaagctcattgcaattctgcaaccaagccttttgctcttttcaaactttaaaaggacttgaaaagtaaaagcttgaaagctttgcaggacttgactgtccttattaaaatgcttttattaacatcagcttatctcatagacgcgcagcgactgcttgtgagcttttagaagctttaaccaaaaggctttgaaaggactttaaggaactgcttgatggcaagtatagtcaggatacaagcaactgctttaagcttcaattcgctttttttgagaaagctaagatttcgtattaataaccaaacaacaaagctttgatcttaaaacagtctgcactcaaaccagttactactgttaaatggccactgttaaccaggttacaatgttggactattttttaaatgccgtagagcaggttcaaaaaacgacattgagcacgataaacaaatttcgaaacacgtttctcggcctgtcgagcaaacacaattgaaatttctcagccacgtggaccgtgtgttttatggatctatttaatggattatgcatttctcaagcagttcactcacccgttcgctgcgcttggaatccattttctggcgacgacgctcgaactcatcatccgagtcggaatcgctatcactttccacctcccgtcgcaatttggccgctccggccttctttgaatattgacggacagcctggaccacggcagttggcatttgatgccaaagcagtgaatgtgctccatgtccacagataatgccgccagatgccaggcgctgaaatcagaaaaaaaaaggaaattagaaaaatgtgaaaatgcaaaatgtattggataagtttctctatcataataatcattttgattgtgctttaaaaaaagagatgctaacgtgtcattaataatgttacgcaatcattatgctattgttttgtattgtttttgtgtatatttcggttttcacagccccatgctgaatgctctttttgttgttgatatggttgctagacgcccttcggtgtgtaagcaatcattatgtttttaattacaactcagcgcactgctgttttcctgtgttgtttttgttgtgcgtgttattttctcattgttaaggtcagttctgtttactcacaaaacaattctaaacctgattcgtcgttatctgtttttttttacgagttttccatctttggttcgccttaaaagtgccaaagagtgactgtcaaaatgtatctcaaaaaactcggtctacagtttgagaggcgcttggtaatggtaaaaaaccacgtggcgatcatgtatgtaacgaatttaaaagaagaaattgtaaaccagcaggaaaatagcttccaatatatataaaatatatgtaaatataggacacggtattttacacatatataatacattcaatgtcctttgctgccaacattgcaactttgaaaattaaaaaagataaatattgatgccaataaccagttcggagaaaggttttttccatcacctgtgccattaggaaaagataaaaaacaaaattcgctactcttttaattacaagaaaccgaattctcttgtaaacgttttgaatttcaatggctctcgataagaaagaatccaagtacagatgttgccagccaccgacgacgatgatatcatgcatcataccatataacattatcataaagcccgcacacttattgtattggactgactgctttgggaccttttttcggttccagttgcttcgtttggttaaacgaactttggattgtttctgtttttcggtgttttttttttcgtaaacaagtttctccaaaatacgaattaatgaatgcaaaaaacgggcctcctttcatttgaatgtctgcgcgtctcgaaaataaagagaaacacgtttcgaccataagaaaattaaacaaaaaacaatgccaatgatttatatgtggaagatgcagagagtaagaagacggcaaataaaaatcaaagtcgagcaacaggtcaatgttaatttagcagcaaacaagaagtagaaaaattgcgaataaaatcactttaatcatttcctgtgattctaaaacttctttttccgtggcggttagagaaaaagtaaagggaggtggggtacttttgttgttataatttccaatgcttttgcgcaagattttcctgctacagaatttgcgcagttttccgactttcaaaatgagggggttgttgtcggtgagaagggaaaacaagctttcacctgaatacacggtgaaaaataccagtaagtattaatattggcttagctggttaaattaatgtatgttgtgtcaacataatatcataaatttcgtttcaaaaccgaaacttttatgcaaatactattggacggtatttttaaagctaacaacataggagtaagatgaaacatgtttatatattaactgaactattttgttgaatctattgattcaataccaacatttctttgtgtgtaatttccacttgtttatcttactgtatcttgttttatttgtttcattgagggatatgcctctttcggcgccgggttttcaatttcttattgattgattgaagtgctgcgccctttaatgattgatgtgcaagaaatttgccagcacctaaacgtattttatagttaatcatcaattgaaaccaaaaatcagcaatatataatgctgctgctaacaacaataaattaataatgcgggaatgaaaagttaataaaaattagagaattaataatcccaaactctcttgtattgctagaattatagttgggaatatctattaatattaatcaagaattgaactcgagttcttacagtttcgaatgcactgctacagtttacttagcactggcctcgtttcgtgaacattcccgctcccaattttcattctccacttcccttgcttgtctgtattcacccctcttcctcactatttacagttctccttccaccacttactgtttttcgaattgcgattctatttttctgctttgttttgagtttatatcatgcggaactgctttttggttggaacatcttttgtggaactggttttaaactctttattttataactgttgcttttaagtttgttttaggaactgctctttcctgtccgctttgtgatgctaagtttttctaactgcttgtttctgtcaattcaattagtaaccttaactacaatgcactgaaagaaaagatgcacttacgtgacaatcgctgtgcgaaatgggcgtgtttgggggcggggaggcattctgctgcagaacgccgacagttgcggccatgttgcgttccagaatttctcttgaagtgcgcaaaataccacggctcacgatggagaatgccattttgtttttcgctcaagttttaacctcggttttcttaaatttttcctcaattttcgctacgttttccttacagtttgaactgcactcgagaaaatgtgcaacgttgcttttttttagggattttgttgttgaactcttgttattatttcgattgcaacgcgcatttaacaaccggttttttcgaagatgcaccacaaaaaaatgtttgcctttatttttctgctttgttttgttacactttgtttttgagtccgctaatttctattttgatttctctgtggtttcagttttttttttttttggatatctttgcttgggagtaaacacaaccgttcgcttaagcgttcgaattcgttttgaaaaccatcgctgcgcaaagaaaagaagtcgacgtcgacgcctgtaaaagcagagcggtctttctgagtgtgtgtgagcgggagtgcgcgtgtgtgtgtgtggttttgtgtgatgaagagggagaggacagcataagaagggagcagggagaacagctgctacttggaatggttaccacaagcaggcagtacacactattgaagccaaaatattagtagttacattttcaaatgttcacgaaatcaaactttgagctgcattaatatacacatgcatatgtgtcgcaagaatatttttgaatatgagcgttcccaaatgttaaaaccagctttaagagatgcggaggaattagtatttaagttttttagttcatatttttgcgcccttggctgtatatatgtaagtacaaacacaaaggcaagaccatgtaagccggttgaagaagaaaatggagaggaagcaggagcacaagaagaagcaaaaacaaacacaaaacccagtgattgtcaaacctcgcttaaatggagaactgtattcgttttcaaaataaagcccaaagaaaatgcattacataaacatgggattacacacacatatacatacacggactacagttttccaattgataacgtaaacgaaggaatccaaaaacaaaagccaaaactcaaaatgaaaatatcataaaatgtgcgtatttaggtcgctgcgtgtgacaaactgtcggtccaatacaatatgccccaagacacccttcccccctcgctacgcacttccccgaaaagtgccctctacgcacacacatacaaatgaagtaacacaaatacctacgcactaatagtttctgtttttccgttgctgttctacttcattgctccacagcaaaacgcatgcttacacccacacgtgtgcggtaaatattataggatcattacaacactttaaaactaataacattaaaagatcgttttcagttacataccaattaa

SEQ ID NO: 1088 - DNA, 2149 bp, DROSOPHILA
aacgcttaagcgaacggttgtgtttactcccaagcaaagatatccaaaaaaaaaaaaaactgaaaccacagagaaatcaaaatagaaattagcggactcaaaaacaaagtgtaacaaaacaaagcagaaaaataaaggcaaacatttttttgtggtgcatcttcgaaaaaaccggttgttaaatgcgcgttgcaatcgaaataataacaagagttcaacaacaaaatccctaaaaaaaagcaacgttgcacattttctcgagtgcagttcaaactgtaaggaaaacgtagcgaaaattgaggaaaaatttaagaaaaccgaggttaaaacttgagcgaaaaacaaaatggcattctccatcgtgagccgtggtattttgcgcacttcaagagaaattctggaacgcaacatggccgcaactgtcggcgttctgcagcagaatgcctccccgcccccaaacacgcccatttcgcacagcgattgtcaccgcctggcatctggcggcattatctgtggacatggagcacattcactgctttggcatcaaatgccaactgccgtggtccaggctgtccgtcaatattcaaagaaggccggagcggccaaattgcgacgggaggtggaaagtgatagcgattccgactcggatgatgagttcgagcgtcgtcgccagaaaatggattccaagcgcagcgaacggggcgactcagcattctggcgccgcaaaatgcgtactctccaccgcattttggacgttaatcacgacggcgtcgtgtccttcgacgactttagtttgctggccaaacgctttagcgatctgggccatttgaccccagaggtcgctgccgaattcaacgatgtgatcaagcatacttgggaagagcagttcggggagataaccccatacaatctggtaactgccgagcagttcctcaccgatctgcaccatcgtctcaacgacaagaagatggccaaacgcatcggtcgcttcctgccctacttgtttaaggctgtggactttgatcacactggccatttggatctcgaacaatacaagctcttcttccgttgtctgggactgaccgaagacgatgctgccgtttcattcgctgtgatagacaagaacggcgatggccaattgtcgctcaaggagtttgtgcatttgggccgtcagttctttttaaccgaggacgactcgaagatatcgaaaatgttctggggaccgctggtcgctgatcattgacgggttgcagtcactgctgtagattacaatacaaccaaatcaacaataacccaacaaaaaaatccttactacaatcaagattatcagaaccatcaacacaacaacgtccgatgccataacatcggcaacaataacaccaatgagccaatgctacattatacattgaatacgacaacgatgttggccaataacaattacaataagatagtggccacttcgttgccaactcgcgtgcaggcggcaggcggcagttggctaaatctacagcatgtggcgcctcataaatcgggaccgttaataaacattagcaacaccaccacgatcgttataaggaacatgagcatttacgattattttcggcaacacttgtccagttcgaagcgccagcgctcgacctttgagccccatccatcgcccactacgtatcccgcctccaagttgcgcaagcacaactttagtaattatcaaaaggaacgggaacgggaaagggaagaccgacagaaagataataataataataatcatcgaaccaagggcaaaccatcattagatgactacgatataagattttttgtctaccttaactcgctaataatattcacaatgtcgtgcagtcgtcaatcggccgccgagggcgatgacctcaagcatttcatttgcgaccggatccggaaattcgatcgcctacgacgaaaggcaagaaaacgccgcaagagaaggcccaaaaagctggtcgaggatcaaatgcaccatttataaactctgaaaagtggagctacatactattcacggtcaccctatttaccatataatcgattattttttttttgtctagttaagagttatgtttaactgatatattacacaatacagcaagcatgatataacggaataaaaatgattttt

SEQ ID NO: 1089 - protein, 298 aa, DROSOPHILA
MAFSIVSRGILRTSREILERNMAATVGVLQQNASPPPNTPISHSDCHRLASGGIICGHGAHSLLWHQMPTAVVQAVRQYSKKAGAAKLRREVESDSDSDSDDEFERRRQKMDSKRSERGDSAFWRRKMRTLHRILDVNHDGVVSFDDFSLLAKRFSDLGHLTPEVAAEFNDVIKHTWEEQFGEITPYNLVTAEQFLTDLHHRLNDKKMAKRIGRFLPYLFKAVDFDHTGHLDLEQYKLFFRCLGLTEDDAAVSFAVIDKNGDGQLSLKEFVHLGRQFFLTEDDSKISKMFWGPLVADH

SEQ ID NO: 1090 - DNA, 2987 bp, DROSOPHILA
gaatcgtttccgacctcaaaaatatatatattcttatctattatcaatagccgagtcgaaccgggtttgtccgtccgtatgaacgtcgggttctcaggaactataaaggctataaggttgagattaagtacacagatccttgagatatagacgcagcgcaagtttgatgacccatgtttccacgctcacaaaccgccgaaaactgccactcctacacatgtgaaacttttttttaatcttttcagttttgtaaatttctaatccaaaaaaaaactttctgctacgcccactctaacgcccacaaatcgcacaaaactggaaaaataccaagacatctctctgaagacgtaaatataaacgcttaccaaggcataatagattttctaccacagtaacaccgctgtttgtttgcagcaaattctgcgtattccatttatttagttgatgtcatagcggatcactagtggtcccattcaagaggggctactgcaaagttttgtcccgacacggttaagttgctatcatgccttggaatagggaggagcatgcctttaccgttgaggatgtttgagcggatgtgtggttattaaaacacagcgtgcatttcggaataaatttcatttatgtgggtcggttaacaaacaaaccgaccgtgcgttgcagtactccttgttttcgatagccgataagatatgctcgaccactcggtgtagttgttctaccgtacagtgtccagcatgaaatccaaactgatgctcgggcagaatacccttcgcttccataatcctgaccatccgggcagcaatcggtctaattggccggtaggacccgtgttcttttcaggctttcgaggtttgtgaatcatggagataacaccgagctgtggagggaagtattgcaccctcactataccgttgaataacaacgttatgtagaggattgcacatcacggtagtgcctttagggtggagttgcagatagtagtatcatgccctggagcttatttggggttttgtttggcgatgacgtcagcaatctcgctgggggtgatcggccggtccatttggaacgcttgcgacagctggtcgtgagtcgcgtcaacatcctggggactggcgaggtttagtggctggaatcagtccggcaccatgcaccgttattatcagccaatggcgctttccttgcacaatgcttttggatagcgcgcgtagcattccatagcgagtgcgtcgcatcacattcgtttccaatgtttgcaaacctgtcatagaaccaagctgatttatgttcgaccagggcgcgatgtaaaacacactttgctctgttccaatccgctttgttcagcgggtggcgagacctcatcctttttttgcgtaaacacctcctctcagctataaggagcagtatctctctggtgatcgggattttagctgctgtgggcctctgcaccgggctaggtcttgccagtctggctgcagccttgatattatgggtgagagtgtcgacagcttctctaggagtttatcgccgtactcaggttcagagaggtctcaagatgctcatggaatcgctccaggtcagtgtgcctaccgattagtcgctccatcttgggataagctgtagctgttgcagcatagtgtaaataggtggaccgtatctcagcatgcatactggagcctctatttccttactggaatcttttaggacctccggttactagggagctcatacctgtgcttaggaccagattcgctagcgcacgccctcttcgattgcatctctccgctccccaaagccagtgggatgtattccagtcgcccgcgggaggacttacaatcttatctttgtttatgaccttttggttgactggatttttacctttgacttcagcacctttgccccaggtagccatggaagacgtcaatgtcgacggtttagctattgtgccgcttggcggtaaacttccatttttcccggtggggatcatcctttttttttaaatttttttctctcgattccccattttttttcttccgctcttcgggcgctgtttgtttttccttattcgccttttctctgttgatgtacgccaaattttggtgggttaacgattcctcgaaattgtaggttctttttgtccgctttttcgtttatttcacacttttgatgatgcttgatttttcttctatgctgctttttaagccaattgcagtacttaccgagttagtatgtgtgttagtatttaagtgaattacccattaacgaaacttccttaaggctaacggcaattgggcaaaagctgccttgcggcacaaaaaatatcactatattttgaatttgaatttgaatttcggttttaggtttgaagcttgggagcccttatctcctactcttctgggaaactttcgcttcttgggaactagaccaagcgcttccagttttttgaagagcacaaccttcacctataaaagatgaacgtcgtatcctctattaatttttcaaggtgtaaacaaatttttttgccatctgagaattgcttttatttcttcttcgaagcatcaaccgatgatgtaaaaatgtatgagactaatgtgtttaaagaatggcacttttaatcaaatttttgttgcttttataatgtcggacagttggcagcgctgctagtctagcgctccgatattccaaaaacaaggtaaatagccattaaaaagaaatctcgattccatgttcaccttaataaattactgtacctaaactgtttaaggtactgtattcaggtttgttctttttttttatcaatactgtttgttgttgtcacatacaaatgtattcgttaccactggttacaataatctattatctgtgcttatacacagtgtgtttgttcaataaagacaaaaacaataagtgtgctattctggaactgttcaaacatcattattttactcaagcaagaaataatatattttaaatattaaacttgagaa

SEQ ID NO: 1091 - DNA, 774 bp, DROSOPHILA
atgatccccaccgggaaaaatggaagtttaccgccaagcggcacaatagctaaaccgtcgacattgacgtcttccatggctacctggggcaaaggtgctgaagtcaaaggtaaaaatccagtcaaccaaaaggtcataaacaaagataagattgtaagtcctcccgcgggcgactggaatacatcccactggctttggggagcggagagatgcaatcgaagagggcgtgcgctagcgaatctggtcctaagcacaggtatgagctccctagtaaccggaggtcctaaaagattccaagaagctgtcgacactctcacccataatatcaaggctgcagccagactggcaagacctagcccggtgcagaggcccacagcagctaaaatcccgatcaccagagagatactgctccttatagctgagaggaggtgtttacgcaaaaaaaggatgaggtctcgccacccgctgaacaaagcggattggaacagagcaaagtgtgttttacatcgcgccctggtcgaacataaatcagcttggttctatgacaggtttgcaaacattggaaacgaatgtgatgcgacgcactcgctatggaatgctacgcgcgctatccaaaagcattgtgcaaggaaagcgccattggctgataataacggtgcatgtccccaggatgttgacgcgactcacgaccagctgtcgcaagcgttccaaatggaccggccgatcacccccagcgagattgctgacgtcatcgccaaacaaaaccccaaataa

SEQ ID NO: 1092 - protein, 257 aa, DROSOPHILA
MIPTGKNGSLPPSGTIAKPSTLTSSMATWGKGAEVKGKNPVNQKVINKDKIVSPPAGDWNTSHWLWGAERCNRRGRALANLVLSTGMSSLVTGGPKRFQEAVDTLTHNIKAAARLARPSPVQRPTAAKIPITREILLLIAERRCLRKKRMRSRHPLNKADWNRAKCVLHRALVEHKSAWFYDRFANIGNECDATHSLWNATRAIQKHCARKAPLADNNGACPQDVDATHDQLSQAFQMDRPITPSEIADVIAKQNPK

SEQ ID NO: 1093 - DNA, 3844 bp, DROSOPHILA
gatagcaggaataaaaattgattgccatgcaaataaaaattcaccgatttctttaggcacgtccatgtcgtcatggtcgcacagtgggcgaaatagcccatccggcacgcataatttaataacttcctaacgatgaaagccaacatttattatgagatataatgagattaacgatttccaagctcaaacaccttttattacatattatccctaaaatgttttttaacaccattaacattagtacgccaatcaaaatgtttatagtaagcaaatagtttaagacaaggtttttaacagcagataaattccaagaattcagctgagaaactaaagatataaatcgatgtaattatagaccttgtagtcacaaacgttttaccgctcagaattaaacattttttttaaatacttatcaaattggccatttcgaccattctgcgttattagaaacttcattgacgactctcaaaattctctgcccagacaacattgtttttgttttgttttgttttgttttttactttcctcgctttcctggaaacgcgaaaatatcaaagccgcttccgagactgccaatcacaaagtgccgcgggtggggccacagcccatcaacttccgctccgggtaaagctaaccaacctgacaccttagaggacaaggagcatggcacattaagcttatacatacaggccgtaacaatggtttcgagaacattttaagctaagcaaataatatatgcatcgataggttgagtttggttacaacaatcttcacgagagtcgtaaaaataaaagagatataggaattctaagggaattacaatttaacagaaataaatgcacaagaactaatcaaattatgtcgtttgaactaaacgaaaatataattcggaggcaatataaaatgacatattcatcttgaattcgactgtatacgagtgttttttgtgtacataatcctaggcttatcacaaaatcttagtttccaaaaccacagcatcctatagatactgcgagtctgcgtaaaggtcgcggaactcaagcagctgatccagcgccgtatcgtactcatcccgctccaatccagaattagagtacgcttgcaacttggccagctgcactcgatgcgattgggcgtgcacattgtccagatgctcgcccagcttggtggagttctgtacggcggccagcatgggtgccgaatccacacgactacccgtctcgcgttccgccccctcaggcaagcggtagccatcgcgtgatataccggctgcaaacatttcataaggaaaaggtagctgtgtctttagtggcagtggtgtggctgccgcatttgtaacacttccatgataggtgcactggtagtatagctgcagcatatgggatatactatcgcagctataggcagccatccgaagttgatcgccggccagctccctgggccgtttcaaacgttccgcgggaatgccacgagccgtcactgattgcaccacgtaggatgtgccaggctcacagcccggtgtgagttgtgtgagcagcgcgtggtcgccactctggtctagaaactctatcagatcctgaccctccctcagcccaaatggcagagccaatccagcggcggtcatctttctgcccgctggagtgacgcattcgcaaaagcgtagcaaagattctggcgtttgccgcaggcggtaactcaaggtggccgtgtcgaaaaaggcggccagcagcgctgatgtctggtagaggttatccgtctcccactggagtcccggcagactgcgcgacttcagattattgtttcgccagatggtctccagcgtggatagcggcgtgaacatcaaagcctgctcgctgagttggtggtagcccaacacattgtttaccacccgaatgctgtgcgacaggcgggtatctgggaattgggcaaactgtgttaatatgctagatttctttaaaaatcaccttacttacccgcttggggataactagtgatcctgggatagtgaagtggcagcgcgaaactcgcccggctgtactcatcgttgaggtgctccaggcacttcccagccagtccgccgaagccatcgtcaatgtcgaacagcacgtggaagccctgcaggccatcgcactcctctacatacaaacggatacgatcgcagaactcctcgttgaaggagacttcctgccacatttctgttccggcagagtaggtacccagggcttgggcagtcggatctcggatcagccccggcaagacattcaaggttctcgggtgatacctggcgtaaaggaagtccacccaactgtttgccgtcgctgccagctgatagttcttctcgggcaccacagcattcttgagcagatcccgctgatattcggaaatggaggccttcgactgctcctgcacttccagctgctccggtgagcatacgccgctctcctctgcccgcttgcgaacctgttccaattcctctccggtgctcaggggcagcaactcctcatcacgctgcacaaaattgccgtacagctcgccggtcaccggcagatgtcccagggtcccggacaaatccacggacagcaggcggggcgtgtaggtggtacgattgaggtcgttgcgcccttcacggtacaaaatatcattgttgggcagctgctcctcggccacctgttcgctttcgtctccgtacctaaagttggcctcctggaaatgtgtaattcgtgaggctcccggctgccaagtgggtaggacaactcacctgctggttccagaagtgtgtgcccacgtaattcgcgtacgttccgaactggaaggtcaaaatttcacgtgtatagtccataacagccggcgaaagtgactaattcggatgcaattgcgcgagcccgcggaactatcgattttcgcggatatatcgatagctgtgtgcggtaataagcgttcttaatttcgttgattggatactctgtattaaaaataaatatatttaaaaatattatttataactgcaaaaaagatttatatattttgaaagttttataggaatatgttatgtttattaattttacttatgtatgtaaatatatcgatatgaccttaatgtctatcacattgagaaaaaaaacataagaaatacgaggaatttttacaatagagcataacaaccttaatatgtaacccgcaaaagccgattgcaaacttatcaagtcatacggtaaaatctcaaaaaagaacggtagcgtttgtggctccaattgtttagttattggattgcaacggattttattttcggtcgatacggtgaaaccttataaataggatctccgaaagaagaagctataagtcggcttaaacgtatttttaaagaaattgtcgattcccatagattcacatatccattcagacggaggataaataagtcagaaaagagcgaattatgagatttctctaataaactagaaaagaagttaaggtgctatacaatgttaagttaaaatatttaattgctgatttttacacacgttactcgtagaataaaagggtatactagattgtgtaacaggcagaaggaagcatttccgactatttaaagtatatatattcttgatcaggattaaggattaggagccgagtcgatctagccaaactttataaattttttctaattttattccccaattagctattgatatcccagaaaaatgatgaaatttcgcgttcgcattcacactagctgagtaacgggtatctaatagtcggggaactcgactatggcattctctctttttatttatttaatttaataaatggaatatattaaattttttttaaaggtatttgcttacct

SEQ ID NO: 1094 - DNA, 1730 bp, DROSOPHILA
ctgttatggactatacacgtgaaattttgaccttccagttcggaacgtacgcgaattacgtgggcacacacttctggaaccagcaggaggccaactttaggtacggagacgaaagcgaacaggtggccgaggagcagctgcccaacaatgatattttgtaccgtgaagggcgcaacgacctcaatcgtaccacctacacgccccgcctgctgtccgtggatttgtccgggaccctgggacatctgccggtgaccggcgagctgtacggcaattttgtgcagcgtgatgaggagttgctgcccctgagcaccggagaggaattggaacaggttcgcaagcgggcagaggagagcggcgtatgctcaccggagcagctggaagtgcaggagcagtcgaaggcctccatttccgaatatcagcgggatctgctcaagaatgctgtggtgcccgagaagaactatcagctggcagcgacggcaaacagttgggtggacttcctttacgccaggtatcacccgagaaccttgaatgtcttgccggggctgatccgagatccgactgcccaagccctgggtacctactctgccggaacagaaatgtggcaggaagtctccttcaacgaggagttctgcgatcgtatccgtttgtatgtagaggagtgcgatggcctgcagggcttccacgtgctgttcgacattgacgatggcttcggcggactggctgggaagtgcctggagcacctcaacgatgagtacagccgggcgagtttcgcgctgccacttcactatcccaggatcactagttatccccaagcggatacccgcctgtcgcacagcattcgggtggtaaacaatgtgttgggctaccaccaactcagcgagcaggctttgatgttcacgccgctatccacgctggagaccatctggcgaaacaataatctgaagtcgcgcagtctgccgggactccagtgggagacggataacctctaccagacatcagcgctgctggccgcctttttcgacacggccaccttgagttaccgcctgcggcaaacgccagaatctttgctacgcttttgcgaatgcgtcactccagcgggcagaaagatgaccgccgctggattggctctgccatttgggctgagggagggtcaggatctgatagagtttctagaccagagtggcgaccacgcgctgctcacacaactcacaccgggctgtgagcctggcacatcctacgtggtgcaatcagtgacggctcgtggcattcccgcggaacgtttgaaacggcccagggagctggccggcgatcaacttcggatggctgcctatagctgcgatagtatatcccatatgctgcagctatactaccagtgcacctatcatggaagtgttacaaatgcggcagccacaccactgccactaaagacacagctaccttttccttatgaaatgtttgcagccggtatatcacgcgatggctaccgcttgcctgagggggcggaacgcgagacgggtagtcgtgtggattcggcacccatgctggccgccgtacagaactccaccaagctgggcgagcatctggacaatgtgcacgcccaatcgcatcgagtgcagctggccaagttgcaagcgtactctaattctggattggagcgggatgagtacgatacggcgctggatcagctgcttgagttccgcgacctttacgcagactcgcagtatctatag

SEQ ID NO: 1095 - protein, 574 aa, DROSOPHILA
MDYTREILTFQFGTYANYVGTHFWNQQEANFRYGDESEQVAEEQLPNNDILYREGRNDLNRTTYTPRLLSVDLSGTLGHLPVTGELYGNFVQRDEELLPLSTGEELEQVRKRAEESGVCSPEQLEVQEQSKASISEYQRDLLKNAVVPEKNYQLAATANSWVDFLYARYHPRTLNVLPGLIRDPTAQALGTYSAGTEMWQEVSFNEEFCDRIRLYVEECDGLQGFHVLFDIDDGFGGLAGKCLEHLNDEYSRASFALPLHYPRITSYPQADTRLSHSIRVVNNVLGYHQLSEQALMFTPLSTLETIWRNNNLKSRSLPGLQWETDNLYQTSALLAAFFDTATLSYRLRQTPESLLRFCECVTPAGRKMTAAGLALPFGLREGQDLIEFLDQSGDHALLTQLTPGCEPGTSYVVQSVTARGIPAERLKRPRELAGDQLRMAAYSCDSISHMLQLYYQCTYHGSVTNAAATPLPLKTQLPFPYEMFAAGISRDGYRLPEGAERETGSRVDSAPMLAAVQNSTKLGEHLDNVHAQSHRVQLAKLQAYSNSGLERDEYDTALDQLLEFRDLYADSQYL

SEQ ID NO: 1096 - DNA, 19603 bp, DROSOPHILA
gggtgttagtatggtattctgtccatatctgtgtttgttggcaattgtgaaggcttaagtacatgtatttaaatgggatttcaaacattcacatatttatatatgacattatttctacataaattgcctgtcacttatttatggtgagatgaacagaaaatcttgtcatatatagtattcctgaacttacacgtaaatatatttgtatatctttttattaaattctataggaacttcttagtagattcttatgtttcgcaacatatgttatattgagttgcggttaacaataaacttatacataaacgagtactaggacgtataaatgtacgttattcagaatgaaataaaataaatatagggctgtatatttaatttttttatattttaattttcagtcaaatattattttcttttaaaaatgttgtaactctttatggtctaaatttgtcctttcaaattattaatagttacattgacaaggaatattttaaaattatatatgtaagtaaacgtaccatataagctgagatttcgctttaaattctatgttgtgtattggaagatttaagaaaaggttatacaattgtgaaatagtaacccctgtcactcccagaagtaagttttttaaacttaagttataaacaaattaatgattggaaataaaaatttatttaataatttttcaactgtgaatgaattgcttaatacggcataataattacttaacaaggaaactgtgatataggtcgaaacaaaattcatgatttaactaaagcccctttccttatctcactgctcttccgatttcttttcatacggaaattggaattttctgcagaacaaattattggcacgattctctcaccataagaatgacgtaaataatataaatttctttaatattgtacagtgtttctaaataaaataggaaccacgtatgtatatatttcagcttttatattcggcatactgaagcagatcttagtattcattggctacattctaatataaaaacaaaggcaaaagcaatcaaatgctaggaactcagtttacatttcactaaatctagttcattatatatgtatctatatgatatcatatttttgtttggagcgacttgttattttaacttatcatgataacgccctccatcttgaattgttaaggattgcctcaagtgtgtataccttaagtttattgctaatttatatttcgaatagttaggaacacttccgtttaatttagagattcttactaatgttggaataggttttcgcaagaattcaatacatatatctgtagattgatggaatgtcaatgtttttgtaaactctttaaaataggaacttttcagttttcgtagtatggttgtttttttttgtttgtatttttgtagggtacgcatatttcgtgtgtcataatgcaaatacttttccttttgtagtctgcaaggtacaatatgtttaacggtttagaaaacgatatgtgtatcaacttacctaaattttaaccactatccacggttataaggccatataaacactcagatttactttccacctataactaataaaataagagttactgattaagctatcagccattgaatatatcattagatgattgtgttacactacttcaactgaaaacttttattcaatattaactttacaaaccaaactattattaagacaacgactaaataataataaaaacgcaagttagtaattaaagaatttgaataaaattaaatgtttattttgtacatgtttcagtatattgatgtgattcggtattgtgtttgttggcttaaccatttataatataatcgtcaatatccaatatcggttttgtagcaccaaaaacttaatttgaaacattttggaaaacatacctataattttgcagcggttgcttcaaaaacgcttcggaataggtagggtacttttagcatgtggtgttttctcggcacttaaagtgacattttcctgaacttactttaaaagccctcacactaagagtaacttgttctcttattctacttgtttagtttttcacacgcaggtatacaatatttgcttacacatattattgtagtttttagtaaaaactatttcgtaaaatgtcaatttgcgaggcgtaaaaatatattcctactgctatagatatgtttttgaacattctggaaaatatcaattcagatgtgggcatcaaaataaaactttttaaaataaacagacaaagcaaacgtgttaaaaaaataacaagctttactgatactttttaatctgaccaacagataagatcaagtagatgatttttgtatcttcccgaaactcttaccggtgatatggtttcggttaaaaagttgctgcataagttcctgattaccagcgatttttcgcgcatcttcagaaacgacttcgttaggtaaattatgctggacatgactcttggaatcgccaccattagtgtcataattaagaatacagttcccttcggcaataacatcagaatcttgtctagctgtatgaatagcgtggcttgtcgcgtttgtcacaacatgttgcaacaaaaatgcctttgataagttataaaatcgtttttccctgtcagaatcgttgtcctcgcttccactgccattgctctgtgcatagagctcggtggtttgttcgagcaatttcttcattttgctaatgtgctcgacactaaaagcatgctttcggatgttgacttgggtgacttgacatagctgacagtcctgtagatttgtttcgaggtccgtatccacggttatgccgttggaccttaggtcgctataaacctctttcccgctagagccatcgtagctattatcgtcagatatgtgtgcataatgtcgctgatttcgcgattttttgtctttggcccgtgaattttgaaaccagaccttgaaaaataaaataaatttatcgttgtaattgcatttttgtccaacgaagctttaagcttaaaaacagttctaggtgttattatttgtattatttaccttcagttcttaagagcaagatgaaaagcatgacttaaaaaaatcaggtgaaacccaaaaatggtttaatttgattgcctatcatttaataggtgtgcgttgcattttcactaaaaaaataaaatataaattaacaaaattaatataagcgaaataagaaatcatctgcgcgttgtaaatatttatagcatatgaagagcaagagcaaattagattcggtaacttaaaattcggtaacttattttcccttgcagtaataattaaataaataataatgaaaaaaaaatagtgtcaagttgctagactcagcagatgggaatgctagggaggaatctgaaaattatgatataaaatgaaataataaatgacttaaatgttttataaaaactgtggtcgtaacaaccgttttgaaacaaacttacgcagtgtatgcgtaactagaatctgcattcttaatctgaactttctaacttttacaatacccgtgataacggctttcataccgacaaacaggcacgcggacggacatggacaaaaccacttggctagtgattaagtacattagtagaagtatatttttattataaagtatatacgtagagtatatcgtagagtaaaagggtatactagattcgttgaaaggtatggaagaatggaaggaagaatttccgaccacataaagtatatatattcttgatcagattcaatagaatcgcaagaacgtataaaaggtaaaatgttgccacgcccactctaacgcccaaaaaccgcaaaaaactgccacgccaactcttttgaaaaatgtgttacaattttttctcaagtttattagtcttgtaaatttctactcattttccaaaaaactttttgccacgccgactttaacgccctaaaaatttcaaaaaattccacgcccacatttttgaaaaattgttggatattttttcataattttattagtcttgtaaatttctaccgatttgcaaaaaaaaactgtttgacacacccactctaaagccttaaagccaccaagccacgcccacactgttgaacaattctataatttctctcagaaattatgatttttcgcgttcgcattcacactagcttagttacgggtatctgattgtcggggaactcgactatagcattctctcttgtgttttaagtataaaaccaaacgtgtggtacttacttgaactacgcgtttctttaagttaactttcttagatatctcttcaagcatttttctacttggatttgattcggattgataacattcatacaaaaagttcaattgctccggaaggatggttgttcgtaagcgcttattttgcttggatgaaacgttaaccggagacacagaggaccgcttctcaattgcattggaattttgagtaagttcatctttttggcatgctttttcgtcatcattaaaagttaaagtctgggagttgttctctatcattgtggcatccaggaagtcctcaagattatgtaagtagtgcgacttttccttgtcatctttttgtttggatctcgtgcatagatacttgttttcatcatccatcgcaattaatgatgattcctgcgtacactcttcttttgtttcaactgaagggacaccgccgttcgtctcggttaaattgctttgatccacgttaatattgttgttattaatattttccactttgtttttgttcattgataagtcgttttcttcgcttggcctgtctatgcgtagttgttcatcttgtttctctctttgtagttctgttgcctgctccaatgatgtttctccaatataaggggcttcatctgaagtggattttggtattcgcaaggatggtttgtagcctgggacatcaggaattatttggggcgaggcaactaactgaaaaaactttttcgactcattaagttggtagtactgaagtagaaactcgatggttggctttttactggagctaaatgtatgctgttggctggatttcgcctcttcatgtgtgcgatagtactgtagtaaaaagtcatagttactgactttttttaattcgttctgttgatagaagttagttaggaagtcaagttcaaaatcgcattcgtttccttgttctaatttcttttgttgttgttgcatgaggaactgctgctttacttcttgactcgtttcattttgcataaaatacttgtacaggtattcgtgcttcttttgtgaggcctcaagctccgacaaggactgcatttcatctgcattggaagagcaatccgagtatttccgtttttttgttgggggctgttgatggtgttgctgctgctgttgagccgccgcttgttgtagactttgcaaaatgctgccaaagggaccgaaattggcttcagggttagagttctgacctacatctgaacaaatgtttcctggattcatcaagtgtaatagttgatgctctcgcaatttttccaattggttaaaatttaactcgcatttgtcgcaatcaaacttgggaggtcgttgaatttgatctaaactgttgctgcgttctcgttgtggcggcgtgggggtcgtggatggactgaagtcagtaagcgaagaagattttgcaaacaaatgctgtggcgagggcagtgcgccaaatgaatgctgggtgtactgtcccggaagaggagctgccgagcccggtgttgacagggtatgcgaagcaactgctgagcctggtggacaaattccaacatggtgtatatccatggaagaattagaatcctccgagcttaaattctgcgcgatttgagctgcagcgatttgtgccttggcagactttttattattctcctctttgaagcagtgatttttctgatgccgtattagctcgtagtacctttgaaataccaagttacacttcttgcacgcatagttaatgttttgttttttcgtctcctcattttcaaaaagggtattgttcggctggttttcataaatcttacgttgcttttgcctggcgttttgaaaccaaaccactataacccggggagacagtaacaaaagcttacttaaatattcgagatcgctgtcctttggatatgagttgttctcgaagaactcctgcaaaacctttatttggtagtctgtaaaacgcgttcgattagctcgcttgccacctgatgtcgacgatgaggagctcgatgagttcgaagagttgctttcgaactgagtactaacactgcctgaggtcaccattggagctacgttcttttcaaacgtttttccaacaatctgcattttttttggtggtcccatgttactacccatgttctccaattgctggtttaataaatcattcatgctgccatacacatttccggcagctccactattcggagacggagggcgtgacagtacatcggaactcccactttctgatttagtttcaaatatatttatttgctgttgactttgacaattggatgcaagagacgaacccgctagcaaggattggtcctgtgccgtatctgcgttttgatttgtcaagcactgttctgggggatccactagatcctgttgctgttttaaaaagctaaaacttgaatgctgctttgtttggtatgcaaaatcagttgccccaatcatatcatcctgcggctctgactttatttgcccgtctaaagagtatggcaagatctgttccttgctcccgagctgtccgaaaaatatattattgcctatatagtcggatatattcccgcttgagttcgtcgattctggacgagataacggtgttgaaactggaactgtcgcagaaaatgtaacaggtcctgatgcgttagcttttcccgccgctagtacctttgaagtggcgttttccttagagcttaaattgatattaccagatggtggtaatgaaatagttgatgaagtcattggccctgttactgcgacgctacaagtatcatttaaaggtgtaactttggcttgtcctgtacgttcatactcttctaaattcagagtggtcgatggtggattattaaaattataaggagagtccttattacgttgtctttccttaaatagcgtgttccggaaccaatgtttaaccacctggaaagaaatatttttgtttaactgcactttcaatcaactcccagcagccttaccttcattggtaaatttgctttctgagacatctccataatgctctcttcgcttggcgaattatttatatcaaaatgggcccgcaatattttaagctggtcatctgtaatacgcgttcgagctcgtttttggttgctggccagctgctaaaaaagtcaagataaaaataagatatttacgctcatttaaacagtgtgtcaagtgagatgtgttaaaaacttggtaacatataaaagaaaacttatatatacatttgtgatcaggatcactgccaagttaatctggccatttctgtctgtacgtcaaaaaacgtcgagatttcggagactgtaaaagctataaagtccaaaccatagacagacaaattaacaaagaaaccgacaaaaatgttaatttttataggttctccgaaattttgcttaggtaatatcctttaaacgaaaaattcgttgaaaaattagtaggaaatagagtgatacatttgcgaccatataaaatacttatattctttatgagtatcaacagccgaatcgatttagtcatgtcagttggtctgtaactacgcaaaacttgtctcaatgctttaaagctatctgcatgaagcattcgcaaaaggagaggtataagatcggacgactatatctcaaggtgcaatgggaacattcgaaaaataaaaaaaatagtttcgttgctcttgctagctttctctcttgaacatgtagagataaggtttaagtgtaagtccaagcgtatttttaacaagaattattttttagacgtcactgaccgttataagccttaaaacatattactagaaataattttactgcaaagaagactggacaatgtaattagtgtgtaatttgtcatttttaaaacgtgttctgtgatacccaaatttccaattcgcaagacaatagaataaaactaaaaaaggtaattaacttcgacaaaagaataagatcaatttatgattgataacacagaaactaattcttttaaaattagtttaattaatgatgtaaattgaactaattttgatatcctgacattaaaaccatttatggttaaatatgttatacaaaatcgtttatatataattcattataatgtttggtttaaaaatcataggcttaatatagtacctgagagtttgcgttagcattgagctgagtttgaggtggaactgcggtagctttccccgaatctaccggtatagagctgacaccactggtaaggtgtgtatcacctagtcctgaagcagatgttgcggtggatgttgtaatgctgttatttagcgccgatggcccagatactgcattgcctgcagcattggcgccgaatactaggggcggtgctaagttcatgaagttgagggacatcaagtggtgaaattgcattatattaagcatatcgaccgggttaattggaagtcccgctgcggcagcaactgctccaaaatgctgttgtatatgctgaagattttgtagacccttaaacaattatttgtattagctgtgtgacctttatggattcaaagaagatctacctgcaattgagggggcatctctccagtggacattgacagtgcttcgggatgaagtcctccagcatctgagttacactgctgttgtttgagcaaagcagcgaaagtcgcgaggtgtttttgatgggattgggaatcgagggacataggagtaggtgacaaatgtctagtttctttgtttaggtgcgtttccagttcaattggcgagacatcacttcctgaaacttctaaaacaaatccagattttttctaccggaattcttattttttagaaatgaatttgttttacctctttctactgcatgggactccgctaaaagatgcttgtgggtctcctcagtacttaacatcggcgtctgcggactgtttgtccttgtggatggcgttccatcctcagcgtgtgcttgctccatgtgtttctgaagcgcctgtgtactgcgaaagttacgttggcaaaaggagcactttgtagcatcccgcatcgaatggtacagcatatgcgtggtaagtttctcttgtgttttaaatgctaaggagcactgtttgcaacgatacttgtagacatggcgctccgagataataaggctcatgtgcaagtcttgaaagtggctgatcatagtcggaatggtcctgaaagtcatgaagcaaggacggctgatgtggctggctgcaagacacaaatactccccgttttgcaaagaaaagtgctgattctgttgggcatgcttaagtagctgttcctcgtgcttgaagcttgcctcacattgctggcaagatagtccttgcaagctcactgactggcttgggttagctgaggttgatttgataaggctaacattgcaggtgttttcaataggagttggtgctctctcgagcgcattcgtatttgcgtatggagctttgtctgtggggcacgctatgtctgtgctctcttttttcaaagctttctgatccaccagaagtaagagtcgagagaggccatctctcgtaacgctatgaacgcttgttaaatggtcctccaagtactgtttttcacggaaatggttttcgaggcaaagcggacactgtaccccaacttcagtttctgcaacttttggcgactctggagctccaaaatctgtcgcttgtgaggctaagtctttagtaacatccattgatgtcgtacgatcaacttcctgttcgaggcgctcttgttttatgcccacaggaccatcactgacattcgtatctaagtccttgtcttcatcgacggtatcctgtgtcggtggatttataacggcgcatctttgatgcactgcagctagagcagctgcagccacagctgtttggaaagcctgcaaggcagccgtgttggttggtatagttatgaattcatcactctcagcacatgagtgctcagtctcaatatgagcagcaatttcgctcttagattggacgaagtattcgcagagattacacttgaatactgttgtagggacgcctgaaccaaggttatttacgtttggcaatacaatttgactcaaattcttatcgcaagatgttgcgcaacttgagggagatgttggtgaaaacatactgacatccggaatggcaggaactgccgcagatgatgccgcagcatagctggcatccgttgtggcatcattggttgtggttctagccaaatttaggccaggtgcgagagaaacatctgaaaacataacaccttaataaggttaagtatgaaaaaataattcgtatgcctagttagccttacaataaggcggtacagcagatacgataatatgcctatatcgacggcgcctaactaaagaaaaaaaaaattatattcccttgcagtaaaaacgttcttttttatacccgttacacgtagattaaaagggtataccagatttgttgaaaagtagtatgttcttaaacccgttgctcgtagagtaaaagggtatactagattcgttaaaaagtatgtaacaggcagaagcaagcgattccgaccatataaagaatcagtagccaaatcgatcgcccactctaacgccctcaaaccgaccaaagctgccccgcccacacttttgaaagttcgcattagcattcatactaactgactaacgggtatttgatagtcggcgaactcgactatagcattctctctcgttttttttttaacttctatatatgaacttctatcgaactattctatcgttatgtgaacttctatatatttgtcaaaaaagatttttccacgtttactttaacgcccacactttcgataaatgttttaactttcatctgtttgaatatatttgtctttttaatttctatctgtataccaaaaatatttgatatactaacgcacataaacgtagcaaagttgtcacggccacaattttaaaaatgttgatttttttcattttattattttttgtcgttaatttctatcgatataccaaaataaatttgaaatgatgaaataaatgaaatttctcattagaactcccactggctgggtaacaggtttctggtagtagaggaagttggttatagcgttctgtgttgttttctccacagtttttcagtcattacgtcaacggttcaggcgttcgaaaactatgggatttttgttaaataaacttttaatcgtaacataatttgttattagacatttttaatcttgaagttaccaatgaaacttaaagtcgaggacgctctaagaggtgcttttaatgaataaatgcctatgtttaaaactaacattacaaattgttaaatattgacttcaaccaatacttatactagttaaactcaatgtgtagttagaaatgtcaagaaggccactaataatggttcaaagctcactaatcaacagagtaattaattgaacttatcgagagacaaacgaaaacaaggggaaacatcaggctgcattcgcagggaaaaaagcttttcggatccgcaggcacaatactctttagccaaagcgagctggcagaaatcgtttggacctttattgtctacattcacaggtatttcgttttgcatatagacccgagacaccctacatcagtgtagagcagcatgcgcaattatcagcatatgaaaaggagtgggcgcaggtgagctcatggcgaggggcaagtgcgaatctggcctggcttcaaattgatgtggtacggagtactgctatgtgttctccaaatccgtatgtgcgcaagaagtggcggtggagcggcgactgtttgttgtgtctctgcgaggttcggtctttcagttcggggtttggggttcggcgtcgcgtcggtgttctgtggttaggtgctatgcctgcggttcggacctgcacgacgccgcgcatctgatatgggaatctcacactgcggagtggagtaaatttgtttggccttttggattgtgggcttcgaatacccatgcccaagcaaagaaagactagcctgagtctgggctgcatactgagtctgagcctgagactgaggatcagagactcgtgtggagcaaagtgtgcacgtcactaattgcaaattcgatggatacacataatcgtttttgcattcttaagtaatttgtaataatttccttaagggtcagcgtcagcgtataaatctcagaacgcataagtcgctaaagaaaagagggggcgaagacgagaggaagcacagagaagaatttacgtaaacgcgacgatgattcggagcccaaaacgtgaggatgtgtacgaggacgaggccatggcgaagccgcagacgaagacgataataatcgaagagcggcgaagaagaaattgaactgaaatcagcgcttaatgatgagttacgaacgaacgaaccgtattatacaatgcaatatggttatggtctgtggaaggtgaaactcttaaaaatcatgagcagcatttgtatttatcagaagcatttaatatatgcgtgatggacaatcttacctaatatctctacacaagatcatattcttttaaattgtatattatatatatttatttatattttctgtttttgaacaactttcatgcgagttttatgccctgatacggtattatcaggaagatatacttgcagagtaaacaaaaatcctacattcattaaaaactctcgtaacaaattaccctacctgtcagatcagaaacaaggcccgagttgatttagccaaagacactagaattattataatgcctttgatctagtcatgcccgcccagccattattaagctggcagattcctaaaacgtcacgcccatacttgttagtaatattttatttatacatgttactcgattagcaaaagggtatactagattcgttcaaaggtataaacgtccagatcttgcagcttgaaagtttgttcagaagatttatttttcatttgatgtgctaatttttatcaatatacaagcaagaagcttttatgcccacaatttttagaaatgatttaatatttttgtatgttatatatttagcctaagataaattgatttcagtttaaggcttgcaacccttcaaagagatatttgcaatctcgtagagtatatggagtaaaagggtatactagattcgttgaaaactatagaacaggtagaaggaagcgtttccgatcatataaaggatatatattcttgtcgaggatcaatagctcaggaacgataaaagctggaaggttgagagtaagcgtagagattctagagccatagacgcagcgcaagttgagcctttggcttgccaaagctagatttctttcttgttttcaaactaaaatacttgtaccatgtcaattcctaccgtattgcatagaacattttgattttttatacaaaatattaatgtgttctaacataccttcgttttccatgacccattccgtcactttaaatacctcgttcagtgcgggtatttcttgattttcactgcgacgctgcaaacagataaattgttcgacttgcaagtgtcttattcctttcacatgctgtaccatttcatggatgttctgagcggtaaagttgcacagctgacaaaggagcagttttttggacgattgcaactgcaattgctgatcttcatccgggcaggcgcattgaggatcatcttcagcagaacccgacgacttattgtgcatttcactttgctgaacaatgtacagcaaatgctgaaatatcattcgcattgtgtcgtgacgcatctgttgtgtgtgcagactcagcttctggatagaatttgtgtgaaagtcgcagcagttgcacttaagttgcactacatttgcggcaagctgttgctgctgatactgcattttatactcattttggggaccgccctctctgatgtggttaataaagttgagcttctgcaagtgcttgtccgtcttgctgtgtagttgaaaatttgccttgagattcgtcttgtagttgcacagccggcatatatagttgttattgtgaataaccattatttcggaggatgcgctggaggattgtcgggatcgatctagcagcaaatgctggttcagatcgtccaggttgttcgtactatagcaatcgcagactagacagctgtagaaagccatgggccatttatccgtttttgtcagcgggtgaggatcccctgataattcgcaggacacttcgttcgagtggctcattcccattcccattgccattccaatccccatggcagctcctgttccatgattgagctttattggcttgggagaaaaggaaaactgatcaggagtgctcacgggcgaagacgacggcgatagtttggtattagctgattgctgatgttgttgctgttggtgaagtagctggatcataagggcctggttgtaagcgagatcagccaaagccacctcgggcataaaacttccggagctgtggctagcaatattgccagtaccgctctgttgttgttgctgtaagaaattaaatgcctggatgtgcttgatattattctgaagcactgccatgttgtgggtgtgcttctcgctggtcatgtggatgcgtaggttgcgggccacggaagtatcatagctacagatatcgcatcgaaatgaaggctttggcttggtaccggcgttgtttgtattacttccggcattggcattagaactatttgctccagttacggaaggcgttgcgtttccgctcagggatgcggtgccgccgacaatgttggatgagccactgcctgcgccagacccgctgttggatggacatgcagcagttacttggggcgaggagctggagagcagcagtttgccagtcaccgcagcagcagccgcagctgcaaccatattttgagagctgtttagctcctgcatgttgttcagatgtttgtccgattgcatatgaatggaaagattacccttggtggtcgtggagtagttacagatttcacagcgatacggtttataaccgcaagagtaggattccccccgtgccagccgaggatgctgttgtcctgtgccataggaaaagggtttaaataaattggtaactgatttaaactcttttaaaaatctaagatcgttttattacaggactaaaccactgttcacattataaaaagtaataaaaacaacaatgtaacgccatttcgtagtggacgagcaaaaaaagacagatgtgccccactttaagggtataaaaactacaccatattgtgttcaataaacaaccgagcaatagaacaatgagcaatcgaaaaaaaataaaatataccggttttatatgttctatttgctgcaataaccctaaattatatgtagtaaaattatgaaaaataaatttttcttgaattttgtatattaaaagactaagtagtatttttgtaagcttaatgaacttagtacctgcaaggcaataaccacaggcactctccccatctggatgtttctccctcatgtggatctccaatgtttcctgatatttatagtgccaattgcattggggacatttaagagtcttgcaggaattgcgagtagacatttgcacgccgctatttaatcgagccgagtttagaagcatttcacagctgaggatcgaaaatatggatagtaatataataatcattaaacaacgaaacagaatatgtaatttaaaatatagttcagaatggccaagcgatttgatttaattgtattcgattagtagtttactatgtagtagtatcattggtggtacctaacaaagtgacagaaaaattatagtgataccgaaccgacagttgttcgcctcgacccaggcgacaccattaaattgtaacaattggggtccggacggacaggcgttcagaaacatttattaagtgaaatcagcgcaattggtttaatttttgttggttcagccgccatcataaacttacgccactgcaatatttaactttgcccctccgtgcagatcatatcaacataacaaagatttcccaacaaactcttaattgaaatatacaggcatataatatatatttatgggaccggagactaaaagtggtgtggaccttattaacaacaacagattcctcgaatagatccgtaatatacaatgtactctgctccattcaacaatttatgatggtatattcttataatcttgtttgctttctgttcgcatttgtaaatataatatttacccttttaataaagaagcaacctaaatgttccgcgtgatacaaatttccaacaacattaaattgtaagaatgaaaaaaactagtgcacctgttggtagggcatttaacactctcctctctacaaattcaccaaagaatattttcattggtgcttcttgtcaatgccggttgggatttggaagcaaacgtgattattcaagtgtgaagcaattagtgggatgcaactaaccgaagggctttttataatcaacccaatcggcatttgcgttttaatgaacagcctgtaagcatgtcccgcgggcgcaactaatcaacccatgacgttactgctgttggcctaatgacttattgttcaacagtggcaaaaagttttcagatccagtcacaagttcaaatatccttaataattccgcatattacggcattattaatgaacgtacccctttcaaaagatcaataatcacacccttcacgtggtatgtgcggtcctcaaagacaacccttcaccaatcacccattaaatgcctgcagcaaggcctatgattgcccatccataaaaacctatccatcccccgtaataggactgagaccccaaatgctactgcatactagttcgaacctattgcttaccgcgcacagtctactccttggggacgaccattgatgtgctcggaacaggcaccgattgtaaagctggatgtggcggtcgacgcatttccaacgctggccaccgaggaggcgctgggtgatacgggcagggcaacactgttgctgcaaggtgagcgatgtggggtttgctgcggctgcgactgaatttgcagctggggaagagattgagaaaactggtgatgtgaagaggacggcgactttgaccgctgctggatgtcaaggagttcgcaggttttgcagtccacaccattaaggtcggggtgatcgggacatgggcttggaaataaggaactctgatgttgctgcagctgctgttgaaggaactctgtgatcagcttaacccggttgtcattcgattcgttggcggccagcgcagctaaagatgcatggaaggaactgacttgaggagtatatgcaccacctgttgtcatgtgctgcatttgcaaaaaccctgagcatggaacatccgaatcatttgtttgaggtgatgtggacatagagccaattttcatttccacctctgacgaagacgacgagggtggctctgtttcttggttgcaatgtgttgacttatggttacttatattatcagtactgggtgataagacctccccggatgcgtatgtcgatggtggtgaactggttgaggaaacttttgataggttattagtctttgctgttgctgagtttaaggaaccaaatttcacagttaattttcccgctactttgggcgatgataatgggatatatgcactaggtgccgccattttactactactagtgtgctgatctgattcaggctcttgctcccggtcctggttcaggagccgattctgctcagtctcttgcttattttcgggctcgagttcagagacattcctgaaaactggctgcggagacgaaggcagagtggcgtcactgccctcagttgctgtttgaagcttctctgtatcattggtatcagcagaggcgtcattattagccaatggctgtagaaaggatatctgtggcttttcatccatatttctctgtataatggcactggagtactcgcgattaagtagctgctggtcaagctcttccaaattgagtcggtgttcagtgtttgcatgcaagctaaaggacttaacgttgccgaaagacaacttgcatataaaacacattaaaattggtttctggattttaaatgctctgatttgatcctgacaagttgagttagcatcttgcgcggacactacacgaaaagaatggattttcggacttgatttgtagcaagcgcttcctaaggattcgactccaggacgattgtccacagcttcctcctgcctcttgttatcgctttgctctcgatgatactgggacgggtgttctatatctttctcttcctgccctcgacctttatcctttgacaggttctttagtgaattcgttgttgaaccataacaattttggccagaccctgatccacctccattggtattatctgtggcgatgatgtgtgcgctgccatcaagattgtaaactattttcccattaaaagtttccacatcaaaactggacattggagagccgtcgtcattaccattattggacctaaaaaaagttaagaatacacatttgtagtttaataccccatttaattaatatgttttatatagtccgaaaaaagactgtagaacgcgattccatcctaaaatgattaattttctttaaaaatcttgtttaaagatttaaacgctctgtatgaaaagtatgcaacaggtgaaaggaaccgttaacgatcctttgaaattcctattttgattcggatcggtatgaacgtcaagatctcggcaaatctattctggtggctcctacgctgtccaagttcttttgagaacttcgttattcttaatatttttgatttgccaatttccttatgaagcttttggcgcttatgtagcctgtgtaatgcccaacttaaaatgcaaatcgcaatatgttgttttgtatgaaatcttcgtttaagagttctacgacaataacatttcaatctgaaccacttttaatctgtttttgaacaccctgtcaatttagcgggcaatcggcaaaaattaaaaagtttgtgtattaatttatagaagacttaatcaattaaaattttgattttatgtgcttgttacgcttttttcatttaaatttttatttaagatttcgtctatatataattgatatccacctccaaaaattgatgatttgaaattttgtgacggtctatataaaaaacctttttaaagctaagctaatatttaactattgcacatttagcattaaaaaaaaaaaggttaaacctttgtacactttttgctccgaatgcaattgaaactggttttctggttcgttgtgagattcttcatgactctaatctaaataaaagattagtcgaggtccccgacaattagatacccgtaactcagctagtgtaaatgtgaacgcgtaatttcaatattttgctgggatatcgatagatcaacaaacttgcgctgcgtctttgtctcaagaatctgcttaatgcttaatatc

SEQ ID NO: 1097 - DNA, 10202 bp, DROSOPHILA
atgtccagttttgatgtggaaacttttaatgggaaaatagtttacaatcttgatggcagcgcacacatcatcgccacagataataccaatggaggtggatcagggtctggccaaaattgttatggttcaacaacgaattcactaaagaacctgtcaaaggataaaggtcgagggcaggaagagaaagatatagaacacccgtcccagtatcatcgagagcaaagcgataacaagaggcaggaggaagctgtggacaatcgtcctggagtcgaatccttaggaagcgcttgctacaaatcaagtccgaaaatccattcttttcgtgtagtgtccgcgcaagatgctaactcaacttgtcaggatcaaatcagagcatttaaaatccagaaaccaattttaatgtgttttatatgcaagttgtctttcggcaacgttaagtcctttagcttgcatgcaaacactgaacaccgactcaatttggaagagcttgaccagcagctacttaatcgcgagtactccagtgccattatacagagaaatatggatgaaaagccacagatatcctttctacagccattggctaataatgacgcctctgctgataccaatgatacagagaagcttcaaacagcaactgagggcagtgacgccactctgccttcgtctccgcagccagttttcaggaatgtctctgaactcgagcccgaaaataagcaagagactgagcagaatcggctcctgaaccaggaccgggagcaagagcctgaatcagatcagcacactagtagtagtaaaatggcggcacctagtgcatatatcccattatcatcgcccaaagtagcgggaaaattaactgtgaaatttggttccttaaactcagcaacagcaaagactaataacctatcaaaagtttcctcaaccagttcaccaccatcgacatacgcatccggggaggtcttatcacccagtactgataatataagtaaccataagtcaacacattgcaaccaagaaacagagccaccctcgtcgtcttcgtcagaggtggaaatgaaaattggctctatgtccacatcacctcaaacaaatgattcggatgttccatgctcagggtttttgcaaatgcagcacatgacaacaggtggtgcatatactcctcaagtcagttccttccatgcatctttagctgcgctggccgccaacgaatcgaatgacaaccgggttaagctgatcacagagttccttcaacagcagctgcagcaacatcagagttccttatttccaagcccatgtcccgatcaccccgaccttaatggtgtggactgcaaaacctgcgaactccttgacatccagcagcggtcaaagtcgccgtcctcttcacatcaccagttttctcaatctcttccccagctgcaaattcagtcgcagccgcagcaaaccccacatcgctcaccttgcagcaacagtgttgccctgcccgtatcacccagcgcctcctcggtggccagcgttggaaatgcgtcgaccgccacatccagctttacaatcggtgcctgttccgagcacatcaatggtcgtccccaaggagtagactgtgcgcgctgtgaaatgcttctaaactcggctcgattaaatagcggcgtgcaaatgtctactcgcaattcctgcaagactcttaaatgtccccaatgcaattggcactataaatatcaggaaacattggagatccacatgagggagaaacatccagatggggagagtgcctgtggttattgccttgcaggacaacagcatcctcggctggcacggggggaatcctactcttgcggttataaaccgtatcgctgtgaaatctgtaactactccacgaccaccaagggtaatctttccattcatatgcaatcggacaaacatctgaacaacatgcaggagctaaacagctctcaaaatatggttgcagctgcggctgctgctgcggtgactggcaaactgctgctctccagctcctcgccccaagtaactgctgcatgtccatccaacagcgggtctggcgcaggcagtggctcatccaacattgtcggcggcaccgcatccctgagcggaaacgcaacgccttccgtaactggagcaaatagttctaatgccaatgccggaagtaatacaaacaacgccggtaccaagccaaagccttcatttcgatgcgatatctgtagctatgatacttccgtggcccgcaacctacgcatccacatgaccagcgagaagcacacccacaacatggcagtgcttcagaataatatcaagcacatccaggcatttaatttcttacagcaacaacaacagagcggtactggcaatattgctagccacagctccggaagttttatgcccgaggtggctttggctgatctcgcttacaaccaggcccttatgatccagctacttcaccaacagcaacaacatcagcaatcagctaataccaaactatcgccgtcgtcttcgcccgtgagcactcctgatcagttttccttttctcccaagccaataaagctcaatcatggaacaggagctgccatggggattggaatggcaatgggaatgggaatgagccactcgaacgaagtgtcctgcgaattatcaggggatcctcacccgctgacaaaaacggataaatggcccatggctttctacagctgtctagtctgcgattgctatagtacgaacaacctggacgatctgaaccagcatttgctgctagatcgatcccgacaatcctccagcgcatcctccgaaataatggttattcacaataacaactatatatgccggctgtgcaactacaagacgaatctcaaggcaaattttcaactacacagcaagacggacaagcacttgcagaagctcaactttattaaccacatcagagagggcggtccccaaaatgagtataaaatgcagtatcagcagcaacagcttgccgcaaatgtagtgcaacttaagtgcaactgctgcgactttcacacaaattctatccagaagctgagtctgcacacacaacagatgcgtcacgacacaatgcgaatgatatttcagcatttgctgtacattgttcagcaaagtgaaatgcacaataagtcgtcgggttctgctgaagatgatcctcaatgcgcctgcccggatgaagatcagcaattgcagttgcaatcgtccaaaaaactgctcctttgtcagctgtgcaactttaccgctcagaacatccatgaaatggtacagcatgtgaaaggaataagacacttgcaagtcgaacaatttatctgtttgcagcgtcgcagtgaaaatcaagaaatacccgcactgaacgaggtatttaaagtgacggaatgggtcatggaaaacgaagatgtttctctcgcacctggcctaaatttggctagaaccacaaccaatgatgccacaacggatgccagctatgctgcggcatcatctgcggcagttcctgccattccggatgtcagtatgttttcaccaacatctccctcaagttgcgcaacatcttgcgataagaatttgagtcaaattgtattgccaaacgtaaataaccttggttcaggcgtccctacaacagtattcaagtgtaatctctgcgaatacttcgtccaatctaagagcgaaattgctgctcatattgagactgagcactcatgtgctgagagtgatgaattcataactataccaaccaacacggctgccttgcaggctttccaaacagctgtggctgcagctgctctagctgcagtgcatcaaagatgcgccgttataaatccaccgacacaggataccgtcgatgaagacaaggacttagatacgaatgtcagtgatggtcctgtgggcataaaacaagagcgcctcgaacaggaagttgatcgtacgacatcaatggatgttactaaagacttagcctcacaagcgacagattttggagctccagagtcgccaaaagttgcagaaactgaagttggggtacagtgtccgctttgcctcgaaaaccatttccgtgaaaaacagtacttggaggaccatttaacaagcgttcatagcgttacgagagatggcctctctcgactcttacttctggtggatcagaaagctttgaaaaaagagagcacagacatagcgtgccccacagacaaagctccatacgcaaatacgaatgcgctcgagagagcaccaactcctattgaaaacacctgcaatgttagccttatcaaatcaacctcagctaacccaagccagtcagtgagcttgcaaggactatcttgccagcaatgtgaggcaagcttcaagcacgaggaacagctacttaagcatgcccaacagaatcagcacttttctttgcaaaacggggagtatttgtgtcttgcagccagccacatcagccgtccttgcttcatgactttcaggaccattccgactatgatcagccactttcaagacttgcacatgagccttattatctcggagcgccatgtctacaagtatcgttgcaaacagtgctccttagcatttaaaacacaagagaaacttaccacgcatatgctgtaccattcgatgcgggatgctacaaagtgctccttttgccaacgtaactttcgcagtacacaggcgcttcagaaacacatggagcaagcacacgctgaggatggaacgccatccacaaggacaaacagtccgcagacgccgatgttaagtactgaggagacccacaagcatcttttagcggagtcccatgcagtagaaagagaagtttcaggaagtgatgtctcgccaattgaactggaaacgcacctaaacaaagaaactagacatttgtcacctactcctatgtccctcgattcccaatcccatcaaaaacacctcgcgactttcgctgctttgctcaaacaacagcagtgtaactcagatgctggaggacttcatcccgaagcactgtcaatgtccactggagagatgccccctcaattgcagggtctacaaaatcttcagcatatacaacagcattttggagcagttgctgccgcagcgggacttccaattaacccggtcgatatgcttaatataatgcaatttcaccacttgatgtccctcaacttcatgaacttagcaccgcccctagtattcggcgccaatgctgcaggcaatgcagtatctgggccatcggcgctaaataacagcattacaacatccaccgcaacatctgcttcaggactaggtgatacacaccttaccagtggtgtcagctctataccggtagattcggggaaagctaccgcagttccacctcaaactcagctcaatgctaacgcaaactctcagcagctggccagcaaccaaaaacgagctcgaacgcgtattacagatgaccagcttaaaatattgcgggcccattttgatataaataattcgccaagcgaagagagcattatggagatgtctcagaaagcaaatttaccaatgaaggtggttaaacattggttccggaacacgctatttaaggaaagacaacgtaataaggactctccttataattttaataatccaccatcgaccactctgaatttagaagagtatgaacgtacaggacaagccaaagttacacctttaaatgatacttgtagcgtcgcagtaacagggccaatgacttcatcaactatttcattaccaccatctggtaatatcaatttaagctctaaggaaaacgccacttcaaaggtactagcggcgggaaaagctaacgcatcaggacctgttacattttctgcgacagttccagtttcaacaccgttatctcgtccagaatcgacgaactcaagcgggaatatatccgactatataggcaataatatatttttcggacagctcgggagcaaggaacagatcttgccatactctttagacgggcaaataaagtcagagccgcaggatgatatgattggggcaactgattttgcataccaaacaaagcagcattcaagttttagctttttaaaacagcaacaggatctagtggatcccccagaacagtgcttgacaaatcaaaacgcagatacggcacaggaccaatccttgctagcgggttcgtctcttgcatccaattgtcaaagtcaacagcaaataaatatatttgaaactaaatcagaaagtgggagttccgatgtactgtcacgccctccgtctccgaatagtggagctgccggaaatgtgtatggcagcatgaatgatttattaaaccagcaattggagaacatgggtagtaacatgggaccaccaaaaaaaatgcagattgttggaaaaacgtttgaaaagaacgtagctccaatggtgacctcaggcagtgttagtactcagttcgaaagcaactcttcgaactcatcgagctcctcatcgtcgacatcaggtggcaagcgagctaatcgaacgcgttttacagactaccaaataaaggttttgcaggagttcttcgagaacaactcatatccaaaggacagcgatctcgaatatttaagtaagcttttgttactgtctccccgggttatagtggtttggtttcaaaacgccaggcaaaagcaacgtaagatttatgaaaaccagccgaacaataccctttttgaaaatgaggagacgaaaaaacaaaacattaactatgcgtgcaagaagtgtaacttggtatttcaaaggtactacgagctaatacggcatcagaaaaatcactgcttcaaagaggagaataataaaaagtctgccaaggcacaaatcgctgcagctcaaatcgcgcagaatttaagctcggaggattctaattcttccatggatatacaccatgttggaatttgtccaccaggctcagcagttgcttcgcataccctgtcaacaccgggctcggcagctcctcttccgggacagtacacccagcattcatttggcgcactgccctcgccacagcatttgtttgcaaaatcttcttcgcttactgacttcagtccatccacgacccccacgccgccacaacgagaacgcagcaacagtttagatcaaattcaacgacctcccaagtttgattgcgacaaatgcgagttaaattttaaccaattggaaaaattgcgagagcatcaactattacacttgatgaatccaggaaacatttgttcagatgtaggtcagaactctaaccctgaagccaatttcggtccctttggcagcattttgcaaagtctacaacaagcggcggctcaacagcagcagcaacaccatcaacagcccccaacaaaaaaacggaaatactcggattgctcttccaatgcagatgaaatgcagtccttgtcggagcttgaggcctcacaaaagaagcacgaatacctgtacaagtattttatgcaaaatgaaacgagtcaagaagtaaagcagcagttcctcatgcaacaacaacaaaagaaattagaacaaggaaacgaatgcgattttgaacttgacttcctaactaacttctatcaacagaacgaattaaaaaaagtcagtaactatgactttttactacagtactatcgcacacatgaagaggcgaaatccagccaacagcatacatttagctccagtaaaaagccaaccatcgagtttctacttcagtactaccaacttaatgagtcgaaaaagttttttcagttagttgcctcgccccaaataattcctgatgtcccaggctacaaaccatccttgcgaataccaaaatccacttcagatgaagccccttatattggagaaacatcattggagcaggcaacagaactacaaagagagaaacaagatgaacaactacgcatagacaggccaagcgaagaaaacgacttatcaatgaacaaaaacaaagtggaaaatattaataacaacaatattaacgtggatcaaagcaatttaaccgagacgaacggcggtgtcccttcagttgaaacaaaagaagagtgtacgcaggaatcatcattaattgcgatggatgatgaaaacaagtatctatgcacgagatccaaacaaaaagatgacaaggaaaagtcgcactacttacataatcttgaggacttcctggatgccacaatgatagagaacaactcccagactttaacttttaatgatgacgaaaaagcatgccaaaaagatgaacttactcaaaattccaatgcaattgagaagcggtcctctgtgtctccggttaacgtttcatccaagcaaaataagcgcttacgaacaaccatccttccggagcaattgaactttttgtatgaatgttatcaatccgaatcaaatccaagtagaaaaatgcttgaagagatatctaagaaagttaacttaaagaaacgcgtagttcaagtctggtttcaaaattcacgggccaaagacaaaaaatcgcgaaatcagcgacattatgcacacatatctgacgataatagctacgatggctctagcgggaaagaggtttatagcgacctaaggtccaacggcataaccgtggatacggacctcgaaacaaatctacaggactgtcagctatgtcaagtcacccaagtcaacatccgaaagcatgcttttagtgtcgagcacattagcaaaatgaagaaattgctcgaacaaaccaccgagctctatgcacagagcaatggcagtggaagcgaggacaacgattctgacagggaaaaacgattttataacttatcaaaggcatttttgttgcaacatgttgtgacaaacgcgacaagccacgctattcatacagctagacaagattctgatgttattgccgaagggaactgtattcttaattatgacactaatggtggcgattccaagagtcatgtccagcataatttacctaacgaagtcgtttctgaagatgcgcgaaaaatcgctggtaatcaggaacttatgcagcaactttttaaccgaaaccatatcaccgttataggtggaaagtaaatctgagtgtttatatggccttataaccgtggatagtggttaaaatttagactacaaaaggaaaagtatttgcattatgacacacgaaatatgcgtaccctacaaaaatacaaacaaaaaaaaacaaccatactacgaaaactgaaaagttcctattttaaagagtttacaaaaacattgacattccatcaatctacagatatatgtattgaattcttgcgaaaacctattccaacattagtaagaatctctaaattaaacggaagtgttcctaactattcgaaatataaattagcaataaacttaaggtatacacacttgaggcaatccttaacaattcaagatggagggcgttatcatgataagttaaaataacaagtcgctccaaacaaaaatatgatatcatatagatacatatataatgaactagatttagtgaaatgtaaactgagttcctagcatttgattgcttttgcctttgtttttatattagaatgtagccaatgaatactaagatctgcttcagtatgccgaatataaaagctgaaatatatacatacgtggttcctattttatttagaaacactgtacaatattaaagaaatttatattatttacgtcattcttatggtgagagaatcgtgccaataatttgttctgcagaaaattccaatttccgtatgaaaagaaatcggaagagcagtgagataaggaaaggggctttagttaaatcatgaattttgtttcgacctatatcacagtttccttgttaagtaattattatgccgtattaagcaattcattcacagttgaaaaattattaaataaatttttatttccaatcattaatttgtttataacttaagtttaaaaaacttacttctgggagtgacaggggttactatttcacaattgtataaccttttcttaaatcttccaatacacaacatagaatttaaagcgaaatctcagcttatatggtacgtttacttacatatataattttaaaatattccttgtcaatgtaactattaataatttgaaaggacaaatttagaccataaagagttacaacatttttaaaagaaaataatatttgactgaaaattaaaatataaaaaaattaaatatacagccctatatttattttatttcattctgaataacgtacatttatacgtcct

SEQ ID NO: 1098 - protein, 3005 aa, DROSOPHILA
MSSFDVETFNGKIVYNLDGSAHIIATDNTNGGGSGSGQNCYGSTTNSLKNLSKDKGRGQEEKDIEHPSQYHREQSDNKRQEEAVDNRPGVESLGSACYKSSPKIHSFRVVSAQDANSTCQDQIRAFKIQKPILMCFICKLSFGNVKSFSLHANTEHRLNLEELDQQLLNREYSSAIIQRNMDEKPQISFLQPLANNDASADTNDTEKLQTATEGSDATLPSSPQPVFRNVSELEPENKQETEQNRLLNQDREQEPESDQHTSSSKMAAPSAYIPLSSPKVAGKLTVKFGSLNSATAKTNNLSKVSSTSSPPSTYASGEVLSPSTDNISNHKSTHCNQETEPPSSSSSEVEMKIGSMSTSPQTNDSDVPCSGFLQMQHMTTGGAYTPQVSSFHASLAALAANESNDNRVKLITEFLQQQLQQHQSSLFPSPCPDHPDLNGVDCKTCELLDIQQRSKSPSSSHHQFSQSLPQLQIQSQPQQTPHRSPCSNSVALPVSPSASSVASVGNASTATSSFTIGACSEHINGRPQGVDCARCEMLLNSARLNSGVQMSTRNSCKTLKCPQCNWHYKYQETLEIHMREKHPDGESACGYCLAGQQHPRLARGESYSCGYKPYRCEICNYSTTTKGNLSIHMQSDKHLNNMQELNSSQNMVAAAAAAAVTGKLLLSSSSPQVTAACPSNSGSGAGSGSSNIVGGTASLSGNATPSVTGANSSNANAGSNTNNAGTKPKPSFRCDICSYDTSVARNLRIHMTSEKHTHNMAVLQNNIKHIQAFNFLQQQQQSGTGNIASHSSGSFMPEVALADLAYNQALMIQLLHQQQQHQQSANTKLSPSSSPVSTPDQFSFSPKPIKLNHGTGAAMGIGMAMGMGMSHSNEVSCELSGDPHPLTKTDKWPMAFYSCLVCDCYSTNNLDDLNQHLLLDRSRQSSSASSEIMVIHNNNYICRLCNYKTNLKANFQLHSKTDKHLQKLNFINHIREGGPQNEYKMQYQQQQLAANVVQLKCNCCDFHTNSIQKLSLHTQQMRHDTMRMIFQHLLYIVQQSEMHNKSSGSAEDDPQCACPDEDQQLQLQSSKKLLLCQLCNFTAQNIHEMVQHVKGIRHLQVEQFICLQRRSENQEIPALNEVFKVTEWVMENEDVSLAPGLNLARTTTNDATTDASYAAASSAAVPAIPDVSMFSPTSPSSCATSCDKNLSQIVLPNVNNLGSGVPTTVFKCNLCEYFVQSKSEIAAHIETEHSCAESDEFITIPTNTAALQAFQTAVAAAALAAVHQRCAVINPPTQDTVDEDKDLDTNVSDGPVGIKQERLEQEVDRTTSMDVTKDLASQATDFGAPESPKVAETEVGVQCPLCLENHFREKQYLEDHLTSVHSVTRDGLSRLLLLVDQKALKKESTDIACPTDKAPYANTNALERAPTPIENTCNVSLIKSTSANPSQSVSLQGLSCQQCEASFKHEEQLLKHAQQNQHFSLQNGEYLCLAASHISRPCFMTFRTIPTMISHFQDLHMSLIISERHVYKYRCKQCSLAFKTQEKLTTHMLYHSMRDATKCSFCQRNFRSTQALQKHMEQAHAEDGTPSTRTNSPQTPMLSTEETHKHLLAESHAVEREVSGSDVSPIELETHLNKETRHLSPTPMSLDSQSHQKHLATFAALLKQQQCNSDAGGLHPEALSMSTGEMPPQLQGLQNLQHIQQHFGAVAAAAGLPINPVDMLNIMQFHHLMSLNFMNLAPPLVFGANAAGNAVSGPSALNNSITTSTATSASGLGDTHLTSGVSSIPVDSGKATAVPPQTQLNANANSQQLASNQKRARTRITDDQLKILRAHFDINNSPSEESIMEMSQKANLPMKVVKHWFRNTLFKERQRNKDSPYNFNNPPSTTLNLEEYERTGQAKVTPLNDTCSVAVTGPMTSSTISLPPSGNINLSSKENATSKVLAAGKANASGPVTFSATVPVSTPLSRPESTNSSGNISDYIGNNIFFGQLGSKEQILPYSLDGQIKSEPQDDMIGATDFAYQTKQHSSFSFLKQQQDLVDPPEQCLTNQNADTAQDQSLLAGSSLASNCQSQQQINIFETKSESGSSDVLSRPPSPNSGAAGNVYGSMNDLLNQQLENMGSNMGPPKKMQIVGKTFEKNVAPMVTSGSVSTQFESNSSNSSSSSSSTSGGKRANRTRFTDYQIKVLQEFFENNSYPKDSDLEYLSKLLLLSPRVIVVWFQNARQKQRKIYENQPNNTLFENEETKKQNINYACKKCNLVFQRYYELIRHQKNHCFKEENNKKSAKAQIAAAQIAQNLSSEDSNSSMDIHHVGICPPGSAVASHTLSTPGSAAPLPGQYTQHSFGALPSPQHLFAKSSSLTDFSPSTTPTPPQRERSNSLDQIQRPPKFDCDKCELNFNQLEKLREHQLLHLMNPGNICSDVGQNSNPEANFGPFGSILQSLQQAAAQQQQQHHQQPPTKKRKYSDCSSNADEMQSLSELEASQKKHEYLYKYFMQNETSQEVKQQFLMQQQQKKLEQGNECDFELDFLTNFYQQNELKKVSNYDFLLQYYRTHEEAKSSQQHTFSSSKKPTIEFLLQYYQLNESKKFFQLVASPQIIPDVPGYKPSLRIPKSTSDEAPYIGETSLEQATELQREKQDEQLRIDRPSEENDLSMNKNKVENINNNNINVDQSNLTETNGGVPSVETKEECTQESSLIAMDDENKYLCTRSKQKDDKEKSHYLHNLEDFLDATMIENNSQTLTFNDDEKACQKDELTQNSNAIEKRSSVSPVNVSSKQNKRLRTTILPEQLNFLYECYQSESNPSRKMLEEISKKVNLKKRVVQVWFQNSRAKDKKSRNQRHYAHISDDNSYDGSSGKEVYSDLRSNGITVDTDLETNLQDCQLCQVTQVNIRKHAFSVEHISKMKKLLEQTTELYAQSNGSGSEDNDSDREKRFYNLSKAFLLQHVVTNATSHAIHTARQDSDVIAEGNCILNYDTNGGDSKSHVQHNLPNEVVSEDARKIAGNQELMQQLFNRNHITVIGGK

SEQ ID NO: 1099 - DNA, 6587 bp, DROSOPHILA
agccttctttgttggggaatagacgaatgcagcgggtctggtacttgagcgaggactcccgcttcatgatgtagctgtccatcttgcgaaggtcccagatgagcaccttgcggtcggaggtggccaccacgatcttttcgtcgatcacggacatggagtacacctttccgttgttctgttcgaaggttccaacgcagcgcttctcccgcatgtcccacagcttcacggtattgtcccagctacccgtgaggatgccattgacatactcggcgtgctccacgcatctgatgggctcctcgtgggcaccaattatgctttccgcctgggtgttgacatcaaagagacgcagctggttgtccagggagccactgaccacgtgcactatgtcctgcggatcgttggttgaataggggattgttaatgtgtacgaaggagtctcaccatgaaggcacagtcgagaagaggggcatcctgcacgaatttctgacgcagctggtttgccggcacatcatagaatctaagtgttccgtcccaagaagacgccgccatgtattgattcgatttggggccgaatttcacagcggagatcaggtcctccggcggattgttaagcttgaactctgggggacgcattttgtcaagttttctgctagcaacttgtggataataaaacaataaattcaaacagaaactgcttaaaacaaatcaaactccgaatttgcacggcgtctggagaagagatgcgagtatttcgatatcactatcgatacattgcatatttgcatcaaggggactccctaaacaggtacacttttaataatgtaaaaaattttacaaacccctgttaaaccaatataaatttagtttttgtggtaagtatctatctgataaatacaccctctcattatgagcattgtaagcttgcagtcagcagtaaccgataaccgatatcaagcgatcgatttggcggcgaatctgcccatctctataagcgacgccactcaattcagaagatacaattattatttcgcggtaaataggagtaataaccgccatggaggaatcgcacgacttccagttcgtccttcccctgaatgcatctgatctgatcaactccagcggagatcagtattacgtgaaggagatttttggcgcccaggagattcccgcgaaactacaaggtaagtttccgttttcgcggttggtttttaaattgagtacagttttcggacgcgcaatcttcatgtttccttcccagaatgcaagcgcaaagtgcacttgggcgatcctttttatatattcgagcacttcgacttgtattactcgatcatcgaggcccgcggttcagatggcgcctctgcacagaatctaatgaggtcctttgacctgctctacctgaccgtggagaaactgttccaagacttgcagcccctgctgacggccagtgagcccatgtctaaccagcagcgcaatagttacctcaacctgaccaaaatgacgctgttcctccaggtgagcaccgtcaagaagatcaacaacagtgtccagcaggccatgcgggatcagcagctcaatgttcagaagaagcgtgccaagccatcggagggattggagcagtttcccaactgggaggttaagcgcggcaagttcttggtgcagctcttcaacgtgctgcagtgcccgctggagaagctctggagtccgcccgtagccgaggaggactttataaagtaagagcaaagcatttagcatcctatttcttcgatctgcaatgtatccatcttccccagtttgctctgcgacccctgctatcgaacaatcgaacttttgccgcttcgcatggacaacaaacacgtattcgacacgatcttccagatcttgggcacatcgatcaagcgctttaaccaggccatgaccttcccggtgcgcattctgcagatcctacgcggtaccgagcatgcagcccattcagtagcagctggaattttgcttctgcacgaggagtacggaatttcttcggtcttctccattctaatcaagagcattgtggatgctctaaggatggacagttctgactcttcggtgtccaaacacttctccaatttcctggccgagttctcgaacatagcaccttcgctgatcgtaccgcacctggaaaagctggcggaagatttactagattgtcagtctcacacgctgcgaaattgtgtgctccagatcatcggcgacaccgtggttagcgaactgacctcggaggatcttagcgaagaactgaaggaagtacgcaatgagttcctcgagcacctaatggcccacatcctagacatttctgcacacgtgcgctccaaggtgctcagtatctggcatcacctgaaaacccagcacgccattccgcttaacttcctgaccagagtgctggaggaagccatcggaaggttggaagacaagagctcgctggtgcggcgtgccgccatgcatctgatcaaatccgccctggaaagcaatccatacagcagtaagctttccatagatgaactccgtgccaagcatgaacacgaggtgcaggcaatggagaaacttaatgaggtactcgaggaagagcgcaagcaggaggagaagctcaacgacgagtttagcagcttggcgcccgaactgctgcctttcatagaggagaaccttacggagtgtgagttcatgcagttccgctagttcgacgtatatattaaagtttattgttatattacagttcccgatatgcagttcgacaaggaggagagcgacgagaccttgatggagcggatcattccgctgatgcgcgaaaagaactacaaggatgttattgttctagtgcgaaaggtagactttttggcgggaaatcagaatatgaggtatgttgctaatcaaagatggttttgttttaccataaatatatttactttccagttccttactgaagcacgaggagcattgcgtgtatgtgctggccttgctaaagacatatcacctgctggctgctggatttaaacagagcgtatgtttaatcttagaaagttatattcccttctaaccaaatcttttaatttagagcgaggaaatgctgcagcaaatcaaaacggtgcagttcctaaaagacagcattgactttgccgtcttgatgacttcagccttccccaaactgcacgagatgctcatgtccaagacaaacacggatgtttttgaggcggtggacttgttcaccaccgggtacatgttcggaattcacggcacggagtcgggaatgcagagaatgctgcaactggtctggtcttcggacaaggagaaacgagatgcagtgtcggatgcctacaagcgcgttctgttctccacggaccaaacgggtcgcgctcatgccattaaggtggtgcagaacctgtcgaagtttctttcggaaatcgagtatggtcactacacggccttggagtcgctgatgaccgagtgggtgttgggtggcgacatcgatgctgctgtcatccaggtgctctttgagcgcttcacgctaaaactggagggcactacatccaacgaatctcgcctgtcgctccagctcctgataatggcctcgcaatcgaagtctagtattgtttcggccaacactgccatcatcgaggatatcgccgtcggagagcgggtgcgtcgggatccacggatatttacctcctgtctgcagctgctggtcaactcaatcgatgcaaacaacactgccaagtattataagcgtcagaacagcgatgcagaattcgtgggaaagatcacgcggctcttcctcgacttctttttccacagaagtctatacgacttcgacgcactggccatgagtgtttttgaatacttctataggatgtgccaggcgccggatgtgattgcgcagcaactggtgacggctttactcaagcaattcaatgagagctggctggtcaaggaagcggctgcaatagttccctctccagacaaagcggatacggaaactgttccggactcgcagcccttggagattccgcattcgcagacccttactcccactcagactcaagctgatagccaatcgcagatgcaaggcaccttgattcccgtgtatctcgtctcccgcttaatcttttgcatcggctacatgaccatcaaggagatgatctttctcgacatggatatctataataacatgaagtatcgcgacgagctgacggctcttgaagagcgtaaaaaccgcaatcagcaggcgggaagttcacataatgcggccagacttacgcttaatatgtcagcgatggaggtgcgcaagaggctgtccggagtggcagcggaaccacagcaggagccagacgacgatctggtgggagcgactgcagaggacaacatcgccgaggaaatccacggcatctgcgaggacatgctgctttacaacccggatgctctgctctccaagctggcgccatttatcatagagatttgcaagcgtccaggtgagtttggtgatcccacgttgcaacaggccgctactttggctctggcccggctcatgaccgtctcctcccgtttctgcgagtccaacatgagctttttgatgaacatcctcaacctaacgaagaacattcgaatcaagtgcaacacggtggtggggctgtcggatctcactttccgtttcccaaacatcatcgagccgtggacggggcacttctacgctcagctgcacgaatcgaacaccgagttaaggctaactgccgtcaaaatgctatctcatctgatcctcaacgagatgatacgcgtcaagggtcaaatcgccgacatggcactttgcattgtggacggcaacgaggagattcgcaatatcaccaagcagttcttcaaggagatagccaacaagtcgaacattctgtacaacgtcctgccagatatcatctcccgtttgggggacataaacctcaacctggatgaggacaagtaccgcattatcatgtcctatatcctgggtctcatccagaaggatcgccagattgagacgctagtggagaagctgtgtctgcgcttcccggtaacgcgggtggagcgtcaatggcgcgacatcgcctactgcctcggcctgctcacctacaacgagcgagctgtgaagaagctaatggacaatatgcagcactacagggacaaggtccaggtggacgaggtttatcagtccttcaagctcatcattagcaacaccaacaagttggccaagccggagctcaaagctgtagtcaccgagttcgagaaccgactgaacgagtgcctgcaagtcaacccggataccgctgcccagggtgatcaagaaagcactccagaaggtcagggcaacagaaccagagcggcgccaaggacaaagaagggtggtcgcaagccggcggccaacaggaacaatactgtgcgaggacgcggaagacgtgctcgccgggattccacctcagaagagagcttcagttccagcagcagcgactagttcgtgctccatcttaagttacgatctgagcgggtttttaatgatgtacaaagatggtttttaataaaatagttaatagaacctattattgatatatttattactttgaagtcaacaaacatctagtaaactactaagatccgtttccacatccatcagaaagggaacaaatatttggttgcactaagctactgggatggggaaaccaacacacgtaaatggcaatactctagacgctttggaagtactaagtttggtggttgcgttcatgttgtctctgggcctccgacagatgagcactgggcactggcttcacttaattttcttgcgaagggagcgctggagggcaggaccgtcgtccgcggtgctcagcgcaatggcaaactgggcggcgtagtaggtgatcatgatctggaggcgggcgcagggcaggggcacgcccacgaacatggtgaccgcgatcagggcgtcggagatcacaaacagaatggctccgatggcacagaacacggcgaggaagttcctggagtccacggcgcgggccagcgatctccacagcattgtggtgatcaggaaacagtagatgggcactccgatgatgagaatctcgtccagtttcgtgtgcacgaagtaaacaactgggggtttcaaatattccaggtaaggtatacgtatataatgaccagtaaacttacaaagcgatacggccacgtacaagagcagtccaatgaaccactttatgggcttccagccaaaggcgctgatataaaacacgtgcgccactccaaaggagatcattccgaagggaaagagatttatgttgagcagagcatcaccaccactcgagaaaaccagacccaatagaatccaaagtgagcgacggtatctgttaaaaatttcttgttaataagtaagtagtatatagtatttcgatgctataaagcttactccttcttgagcgagattcccttggccaccacatagaatacaagcgcgaaaatgggcaggcatttgagcacggtggtccatagctctccttgaggatccttcctcaccagcgagaagtataggacaatagtaacca

SEQ ID NO: 1100 - DNA, 4281 bp, DROSOPHILA
ctcaattcagaagatacaattattatttcgcggtaaataggagtaataaccgccatggaggaatcgcacgacttccagttcgtccttcccctgaatgcatctgatctgatcaactccagcggagatcagtattacgtgaaggagatttttggcgcccaggagattcccgcgaaactacaagaatgcaagcgcaaagtgcacttgggcgatcctttttatatattcgagcacttcgacttgtattactcgatcatcgaggcccgcggttcagatggcgcctctgcacagaatctaatgaggtcctttgacctgctctacctgaccgtggagaaactgttccaagacttgcagcccctgctgacggccagtgagcccatgtctaaccagcagcgcaatagttacctcaacctgaccaaaatgacgctgttcctccaggtgagcaccgtcaagaagatcaacaacagtgtccagcaggccatgcgggatcagcagctcaatgttcagaagaagcgtgccaagccatcggagggattggagcagtttcccaactgggaggttaagcgcggcaagttcttggtgcagctcttcaacgtgctgcagtgcccgctggagaagctctggagtccgcccgtagccgaggaggactttataaatttgctctgcgacccctgctatcgaacaatcgaacttttgccgcttcgcatggacaacaaacacgtattcgacacgatcttccagatcttgggcacatcgatcaagcgctttaaccaggccatgaccttcccggtgcgcattctgcagatcctacgcggtaccgagcatgcagcccattcagtagcagctggaattttgcttctgcacgaggagtacggaatttcttcggtcttctccattctaatcaagagcattgtggatgctctaaggatggacagttctgactcttcggtgtccaaacacttctccaatttcctggccgagttctcgaacatagcaccttcgctgatcgtaccgcacctggaaaagctggcggaagatttactagattgtcagtctcacacgctgcgaaattgtgtgctccagatcatcggcgacaccgtggttagcgaactgacctcggaggatcttagcgaagaactgaaggaagtacgcaatgagttcctcgagcacctaatggcccacatcctagacatttctgcacacgtgcgctccaaggtgctcagtatctggcatcacctgaaaacccagcacgccattccgcttaacttcctgaccagagtgctggaggaagccatcggaaggttggaagacaagagctcgctggtgcggcgtgccgccatgcatctgatcaaatccgccctggaaagcaatccatacagcagtaagctttccatagatgaactccgtgccaagcatgaacacgaggtgcaggcaatggagaaacttaatgaggtactcgaggaagagcgcaagcaggaggagaagctcaacgacgagtttagcagcttggcgcccgaactgctgcctttcatagaggagaaccttacggagtttcccgatatgcagttcgacaaggaggagagcgacgagaccttgatggagcggatcattccgctgatgcgcgaaaagaactacaaggatgttattgttctagtgcgaaaggtagactttttggcgggaaatcagaatatgagttccttactgaagcacgaggagcattgcgtgtatgtgctggccttgctaaagacatatcacctgctggctgctggatttaaacagagcagcgaggaaatgctgcagcaaatcaaaacggtgcagttcctaaaagacagcattgactttgccgtcttgatgacttcagccttccccaaactgcacgagatgctcatgtccaagacaaacacggatgtttttgaggcggtggacttgttcaccaccgggtacatgttcggaattcacggcacggagtcgggaatgcagagaatgctgcaactggtctggtcttcggacaaggagaaacgagatgcagtgtcggatgcctacaagcgcgttctgttctccacggaccaaacgggtcgcgctcatgccattaaggtggtgcagaacctgtcgaagtttctttcggaaatcgagtatggtcactacacggccttggagtcgctgatgaccgagtgggtgttgggtggcgacatcgatgctgctgtcatccaggtgctctttgagcgcttcacgctaaaactggagggcactacatccaacgaatctcgcctgtcgctccagctcctgataatggcctcgcaatcgaagtctagtattgtttcggccaacactgccatcatcgaggatatcgccgtcggagagcgggtgcgtcgggatccacggatatttacctcctgtctgcagctgctggtcaactcaatcgatgcaaacaacactgccaagtattataagcgtcagaacagcgatgcagaattcgtgggaaagatcacgcggctcttcctcgacttctttttccacagaagtctatacgacttcgacgcactggccatgagtgtttttgaatacttctataggatgtgccaggcgccggatgtgattgcgcagcaactggtgacggctttactcaagcaattcaatgagagctggctggtcaaggaagcggctgcaatagttccctctccagacaaagcggatacggaaactgttccggactcgcagcccttggagattccgcattcgcagacccttactcccactcagactcaagctgatagccaatcgcagatgcaaggcaccttgattcccgtgtatctcgtctcccgcttaatcttttgcatcggctacatgaccatcaaggagatgatctttctcgacatggatatctataataacatgaagtatcgcgacgagctgacggctcttgaagagcgtaaaaaccgcaatcagcaggcgggaagttcacataatgcggccagacttacgcttaatatgtcagcgatggaggtgcgcaagaggctgtccggagtggcagcggaaccacagcaggagccagacgacgatctggtgggagcgactgcagaggacaacatcgccgaggaaatccacggcatctgcgaggacatgctgctttacaacccggatgctctgctctccaagctggcgccatttatcatagagatttgcaagcgtccaggtgagtttggtgatcccacgttgcaacaggccgctactttggctctggcccggctcatgaccgtctcctcccgtttctgcgagtccaacatgagctttttgatgaacatcctcaacctaacgaagaacattcgaatcaagtgcaacacggtggtggggctgtcggatctcactttccgtttcccaaacatcatcgagccgtggacggggcacttctacgctcagctgcacgaatcgaacaccgagttaaggctaactgccgtcaaaatgctatctcatctgatcctcaacgagatgatacgcgtcaagggtcaaatcgccgacatggcactttgcattgtggacggcaacgaggagattcgcaatatcaccaagcagttcttcaaggagatagccaacaagtcgaacattctgtacaacgtcctgccagatatcatctcccgtttgggggacataaacctcaacctggatgaggacaagtaccgcattatcatgtcctatatcctgggtctcatccagaaggatcgccagattgagacgctagtggagaagctgtgtctgcgcttcccggtaacgcgggtggagcgtcaatggcgcgacatcgcctactgcctcggcctgctcacctacaacgagcgagctgtgaagaagctaatggacaatatgcagcactacagggacaaggtccaggtggacgaggtttatcagtccttcaagctcatcattagcaacaccaacaagttggccaagccggagctcaaagctgtagtcaccgagttcgagaaccgactgaacgagtgcctgcaagtcaacccggataccgctgcccagggtgatcaagaaagcactccagaaggtcagggcaacagaaccagagcggcgccaaggacaaagaagggtggtcgcaagccggcggccaacaggaacaatactgtgcgaggacgcggaagacgtgctcgccgggattccacctcagaagagagcttcagttccagcagcagcgactagttcgtgctccatcttaagttacgatctgagcgggtttttaatgatgtacaaagatggtttttaataaaatagttaatagaacct

SEQ ID NO: 1101 - protein, 1380 aa, DROSOPHILA
MEESHDFQFVLPLNASDLINSSGDQYYVKEIFGAQEIPAKLQECKRKVHLGDPFYIFEHFDLYYSIIEARGSDGASAQNLMRSFDLLYLTVEKLFQDLQPLLTASEPMSNQQRNSYLNLTKMTLFLQVSTVKKINNSVQQAMRDQQLNVQKKRAKPSEGLEQFPNWEVKRGKFLVQLFNVLQCPLEKLWSPPVAEEDFINLLCDPCYRTIELLPLRMDNKHVFDTIFQILGTSIKRFNQAMTFPVRILQILRGTEHAAHSVAAGILLLHEEYGISSVFSILIKSIVDALRMDSSDSSVSKHFSNFLAEFSNIAPSLIVPHLEKLAEDLLDCQSHTLRNCVLQIIGDTVVSELTSEDLSEELKEVRNEFLEHLMAHILDISAHVRSKVLSIWHHLKTQHAIPLNFLTRVLEEAIGRLEDKSSLVRRAAMHLIKSALESNPYSSKLSIDELRAKHEHEVQAMEKLNEVLEEERKQEEKLNDEFSSLAPELLPFIEENLTEFPDMQFDKEESDETLMERIIPLMREKNYKDVIVLVRKVDFLAGNQNMSSLLKHEEHCVYVLALLKTYHLLAAGFKQSSEEMLQQIKTVQFLKDSIDFAVLMTSAFPKLHEMLMSKTNTDVFEAVDLFTTGYMFGIHGTESGMQRMLQLVWSSDKEKRDAVSDAYKRVLFSTDQTGRAHAIKVVQNLSKFLSEIEYGHYTALESLMTEWVLGGDIDAAVIQVLFERFTLKLEGTTSNESRLSLQLLIMASQSKSSIVSANTAIIEDIAVGERVRRDPRIFTSCLQLLVNSIDANNTAKYYKRQNSDAEFVGKITRLFLDFFFHRSLYDFDALAMSVFEYFYRMCQAPDVIAQQLVTALLKQFNESWLVKEAAAIVPSPDKADTETVPDSQPLEIPHSQTLTPTQTQADSQSQMQGTLIPVYLVSRLIFCIGYMTIKEMIFLDMDIYNNMKYRDELTALEERKNRNQQAGSSHNAARLTLNMSAMEVRKRLSGVAAEPQQEPDDDLVGATAEDNIAEEIHGICEDMLLYNPDALLSKLAPFIIEICKRPGEFGDPTLQQAATLALARLMTVSSRFCESNMSFLMNILNLTKNIRIKCNTVVGLSDLTFRFPNIIEPWTGHFYAQLHESNTELRLTAVKMLSHLILNEMIRVKGQIADMALCIVDGNEEIRNITKQFFKEIANKSNILYNVLPDIISRLGDINLNLDEDKYRIIMSYILGLIQKDRQIETLVEKLCLRFPVTRVERQWRDIAYCLGLLTYNERAVKKLMDNMQHYRDKVQVDEVYQSFKLIISNTNKLAKPELKAVVTEFENRLNECLQVNPDTAAQGDQESTPEGQGNRTRAAPRTKKGGRKPAANRNNTVRGRGRRARRDSTSEESFSSSSSD

SEQ ID NO: 1102 - DNA, 8043 bp, DROSOPHILA
tccgtcggttgttgtggtaacttaactatgtccacctttccgttttcctggcacacaaaactactagtttttagcgtttcttttttggtttattgttttttgtgatatgatatcgatatcgatatcaggaggcgttattacgctttcccttcaacgcacaaacaaatacacccccaccaacaaaagtcgatggttcggattatagtatcgatagacaagcgcgatgcaaagtgcccacctattcgcgtctcgaatgtgggtgtttccactgtacaagcaatttgtatacatgtggaaagctctttgtccaaattggtaaatggctaaatgtttttgaaaaaaagataattaacaaccataaaactacaagaaaattacaaaatttaacccaagtgcatatgtatacatgaatgacaaaacggtaaaaccatgcaaatgaataaccatccacgtcgaataatacctagttcaccctgataaggcactcccaatttgtcttattaaacagctaattttgttagggcttaaaaatacccaacgttatgtatgtctagtgttgtctagtttcggggggcggaaaagccaattgcacacaaatatacaaagtattgccgaaacgttgattctttcaataaataaggcacattttaatgaacttatgcttatgccaacaaaagcggtcgcttatttttattacttattgatataaattccaaaacagctgacatttttaacggttactttgcctagtgttggccaagacatcaatcttaataataaactctcaagttgtcaaaattatacttgtatttctactaaaaagtcataaatatacccaaaaactacttagccaatagtaaccctgcttaatatggattttattcacttattaacacgccaattgtctcacttttcaaacacaacggctgattgccagcactgtttgcgctgcagtccagtgctgcgcaacgcggcggggacaaaaaacaatggcgaggcgaaactaaaaaattgtgttgctgacatctggtcgcttgcaaaactatttctagcagattttgtgatatttcgttgtgatcggtcgataaatccgccagttttttttttaatggaaagtgctaacacattgtagcggttgggaagatagcaggaaaggtgagcgaaaggcagaagattgcgaaaaattcaattaaatttccgcgaccgtctgttttctgcatcggtgtgtgtttgtgtttgctcgcaagtgtgtgtgggtgctctgtgtatgacgtaaagcgataaagcaaacgcattccccccactccttgcatatgtgtgtgtgtgcaagtgttgtgtttctctctcatcagttttgcatctaattaggagcggaaagcattgattggctgccaaacgccgcggtttgttgtttttttcgctgcatttcggccaaaaggcttgccgcagctgcatatgtgtcgctatgtgtgtgtcagtgttgcacagtgccgccagtgcccacaaaatgggcgcacaacaacaaaagcagcaactcggttgggattttcgcgatcctacgctggctcggagctccccttttcctatttccaattcccagccagcgggctgccgtttttcctttttgttatccgttgccagacgcaacgaaaacgacagttggcatttgaattcagcacaaacacacatactaacgccgacccgcaagcagcacacacacacacactgggacactcgaaaaaaaaaaaacagacgctgtcggcgacctcgacaagcagttgggttcgatttagttgtcaatgccttgaattcggttcggggcttagtttccacaagtttatcgctcgtcaagaaacaacgaaataaaattattttcgacctaaaaaatctgactaaattgtgttttttgtttatgtatttatttaggcacattttgcacaccacaacgtagttactacatctacgactaacggaactcctcctgcaagcagtggaagttgctgtccatcaagcagtactcggagttaacgcaggataagccgggagaaagagaaagagatcggtggagaatagagatatacaggtggagtcaaagaggaaggatcatggacatgattacggtggggcagagcgtcaagatcaagcggacggatggccgcgtccacatggccgtggtggcggtgatcaaccagtcgggcaagtgcatcacagtcgaatggtacgagcgcggcgaaacgaagggcaaggaggtagaactggacgccatactcacgctcaatccggagctaatgcaagatactgtcgaacagcacgccgccccggagcccaagaaacaagccaccgcgccgatgaacctctcgcgtaatcccacacaatcggctatcggtggcaatctcaccagccgtatgaccatggccggaaacatgctgaacaagatccaggaaagccagtcgattcccaatccgattgtcagcagcaatagcgtgaatacaaacagcaactccaacactacggccggcggaggtggtggcaccacaacgtcgacgaccactggattacagcgtccacggtactcgcaagctgctaccggccagcagcagacaaggatcgcctcggcggtgcctaataacacattgcccaatcccagcgcggcagccagtgctggtccggcggcacaaggagtcgccactgcggccacaacccagggagctggcggcgctagtacccggcgatcgcacgcattgaaagaggtggagcgactgaaggagaatcgcgagaagcgacgcgcccgacaggccgagatgaaggaggagaaggtggcgctgatgaaccaggatccgggcaatccaaactgggagacggcgcaaatgatacgcgaatatcagagcacgctggaatttgtgccgctgctcgatggccaggccgtcgatgaccatcagatcacagtgtgcgtgcgcaagcgtcccattagccgcaaggaggtcaatcgcaaggagatcgatgtcatttcggtgccgcgcaaggacatgctcatcgtgcacgagccgcgcagcaaggtcgacctcaccaagttcctggagaaccacaagtttcgcttcgactacgccttcaacgacacgtgcgacaatgccatggtatacaagtgagtatccaatccaaataacaagctccaaaacaactccatatatggtctgtttgaattactagtagtgattctaaacaaacgctcgatatggtgaccacacattccaatgtcttggggaggcttcttcaattactaatgcgtatccttgctagcaaacggctttatttcaattgaactgaactatagaaaatcttatttcgttatagatgaccctctatagctatcattcaatcttaaacctaatttgttgatgcagtggaatcatatatagtataaagcagcatatcctttaaagaaatcattgccccatttatcagatttccatcgagtaaccaaatgtgccagtcacttttcgagctcgtttcgttggcgcatctctgttagagcgacccattgagtcatgccgacagagacggcaacagagccacacacatgcatcatgaaagcggttgctcccgaaatagccaagttcgttgaatgactaacttggaagccccagacgcttcacctgcccccgcccggccactccgtccgccgatctgcacacgagctctctaaacccaattctccagcggaagagatttcgaaaaagtaactgccttgtggcccggcatttgtccattagcaattgtttggcttcaattgaattaaagctgctacggctgctgctgcccctttcctttctccgccaacttcttgcttagcttctctttccggttttcgcactcgtatgtattgtgtggctgtcgggaattggtaatgccattagttgcgtcacggcaatcgcttaagtatagcccaaaaagtataccccatgagtaatatagcccggcattaatgcacaaaatctcgccgatgataacgtagtctcgtgttgacaaatccaaatgggtgaatcaactgctgacatcgtgcgttatcaatactcagtattggcagaaaacaatgcaacttacacatttattgattacatttcaatatgcgttccttaattagtcgtatgtataattcttatcgataatcatttttactaagcaactgctaactttgaatgcaaatcgatgtatttatctatgattaatgctaaagtctgaaacacaacagtccatatagtattgaatgcttgcatatagcacatatctgcattgaataaccatgctaatctataatcttgcacttcatccgcgcagatacacagccaagccgttggtgaaaaccattttcgagggcggaatggcgacgtgcttcgcctacggccagacgggatcgggcaaaacgcacaccatgggcggtgagtttaatggaaaggtgcaggactgcaagaacggcatctacgccatggcggccaaggatgtctttgtgaccctgaatatgccgcgttaccgcgccatgaatctagtcgtctcggccagtttctttgagatttacagtggcaaggtgagtgagacaacatacaacttggcatgattatcatacttagctgtattaatcgatcgttgtgttgttgccataggtcttcgatcttctgtccgacaagcagaaactgcgcgtcctggaggatggtaaacagcaagtgcaggtggtgggactcaccgagaaggtggtcgatggcgtcgaggaggtactgaagctcatccagcacggcaatgctgcccgaacatccggccagacgtcggccaactccaattcgtcgcgttcgcacgccgttttccagattgtgctgcggccgcagggctcgacgaagatccatggcaagttctcgttcatcgatctggcgggcaatgagcggggcgtggacacttcctcggccgatcggcagacgcgtatggagggtgccgagattaacaaatcgctgctggccctcaaggagtgcattcgtgcgttgggcaaacagtcggcccacttgcccttccgtgtctccaaactcacccaggtgctgcgcgactcgttcattggcgagaagagcaagacgtgcatgatagccatgatctcgccgggacttagctcctgcgagcacacgctcaacacgctgcgctatgcggatcgtgtcaaggagctggtggtcaaggatatcgtcgaagtttgccctggcggcgacaccgagcccatcgagatcacggacgacgaggaggaggaggagctcaacatggtgcatccgcactcgcatcagctgcatcccaattcgcatgcaccggccagccagtcgaataatcagcgtgctccggcctctcatcactcgggggcggtcattcacaacaataataataacaacaacaagaacggaaacgccggcaacatggacctggccatgctgagttcgctgagcgtaagtatttgcatatttctcacctagaagttacacacaaggccataatataatatatattctataatatatgttatatagcttagtaggcttagtttagggcatttggcattgtcactcacttccgtcagtcagcatctagtcccagctcagtttgcaactccctttagttcgggttacaagttatatgttataaatacatgtcgataccatcaccatccaacacaatgctccagctaggcaaagacaaggcaaaggcgagagcacgcgatagccacacgccaaatgtggctgtttacaccaatgtacagaccctgcgatccgtgtacagcatggtcagccaggcggcaggcaggaaagctgctgctgctgctgccacctcgattcccatggcgcaagtcaaagatcacgaggaaccgtcacgcgtttggaactgcaacaagcccaagaaaaaggaatataaaacatataacgtctactccaaacaagcggacaagttaagcggcgaagagggatccaagatgggcattcgacagtgggtccatcccccgtatcccgttcatcgtgagcgcaagaagcgcgacggcccgggcaactacgaatccttctatgtgccctacgaacaagacgatgggataatagtgaaagacaatccctggaccgagacaaaggagctggcagtgaatctacgtagccgatcatttaagcgcttgccgacggcgggcgaacggtatgcgctaaatatcaccaaaatggccagtctgattgagaaggtcaagtcgcatccgaatcacgacggtgtgtcgaaggctgcgaggcagatgtgtccgttgttgccgccgccgccgcagttcgccgaggatcccattgattccgggcggcgcttcgccctgcttcgctcacgaacggagttgtgcttctcgattttggattgcgatgacttgctgtacaagtacgcgtgtcatctgccctttgtgcgcgatccattgcagccagatgccgtgcggccaaagatgaaacgattgtcgtgctcaattggggggaattcgtgcaccatactcaactagccatcaatgatcttatatattttataacttgttctcgttgaattccagtaaaattcacgtgttcccctttgggtcatactcgtatggaaataagtatagggctttttccccatagacagatccctaatgaaacatacaacctataatgttcatttatacacactgcacattgccattttgcaggaacacgagatgtccgacgagctgattgtgcagcaccaggccatcgacgacctgcagcagacggaggagatggtggtggagtatcatcgcaccgttaatgccacactggagaccttcctcgccgagtcgaaggcgctgtacaatctgaccaactatgtggactacgaccaggactcgtactgcaaacggggcgagtcgatgttctcgcagctgctggacatcgccatccagtgccgcgacatgatggccgaatatcgcgccaagttggccaaggaggagatgctgtcgtgcagcttcaattcgccgaatggcaagcgttagttcattcccgcattcgacccgttcatccacaatcaccaacaatcatccaccacacccaaccaggcgtacactttacattacaaattccctctggcttcccaatggacgtgtctgtcgtgcagtcccctaaaacaatctctctatcacctttgccccaaaccgtcgagtttatgtcgctgcgagtttatggtttattaagtttttaactgataaataatagtcgagagcctatattttacaaacgaactaagcacgggaacagaccagataccacagcattaataccattatgagagcaacgcaaaccaataaaaaggaactcaactgaaaactgaagacaggctaggctggctggccacgactttgtttggattcgccgtgaactatgattatatgaatataattgtaatttcagcgcagtcgatactctaattgtgtaaaagaaaaagacatttactatacaatatatatatatttactacttacaaacatacgttctactctaaacaatgatatgagattccatttaatttttaacaaataaccttatgcgattcgattcgatgcgatttgtttccctcatttttgttcattttgtagaattactcgaccagagttgtttgttcatgccacggcacaaatctactagtttttaaattacgaactaatcgcgcattgtatttatttaaaggccacaaaactgtatttaatttgtattaatttattaaagtactactgcaccaaatccgatttacatacgtattcccatagccagtaactattaatgattttcacacgcaaaccgaactgcaatcttagacagcaagtgtttttttttgtgaaactttttatgccccttctttataaatttatatatctacatataaattatttacattatatttttttttgtcattttaagcgacttcggtgaagaatttaaaatgcaaactgtttttgctatacgattattatgatttagagatgatttgcatttcatt

SEQ ID NO: 1103 - DNA, 3081 bp, DROSOPHILA
aaactaaaaaattgtgttgctgacatctggtcgcttgcaaaactatttctagcagattttgtgatatttcgttgtgatcggtcgataaatccgccagttttttttttaatggaaagtgctaacacattgtagcggttgggaagatagcaggaaagagccagcgggctgccgtttttcctttttgttatccgttgccagacgcaacgaaaacgacagttggcatttgaattcagcacaaacacacatactaacgccgacccgcaagcagcacacacacacacactgggacactcgaaaaaaaaaaaacagacgctgtcggcgacctcgacaagcagttgggttcgatttagttgtcaatgccttgaattcggttcggggcttagtttccacaagtttatcgctcgtcaagaaacaacgaaataaaattattttcgacctaaaaaatctgactaaattgtgttttttgtttatgtatttatttaggcacattttgcacaccacaacgtagttactacatctacgactaacggaactcctcctgcaagcagtggaagttgctgtccatcaagcagtactcggagttaacgcaggataagccgggagaaagagaaagagatcggtggagaatagagatatacaggtggagtcaaagaggaaggatcatggacatgattacggtggggcagagcgtcaagatcaagcggacggatggccgcgtccacatggccgtggtggcggtgatcaaccagtcgggcaagtgcatcacagtcgaatggtacgagcgcggcgaaacgaagggcaaggaggtagaactggacgccatactcacgctcaatccggagctaatgcaagatactgtcgaacagcacgccgccccggagcccaagaaacaagccaccgcgccgatgaacctctcgcgtaatcccacacaatcggctatcggtggcaatctcaccagccgtatgaccatggccggaaacatgctgaacaagatccaggaaagccagtcgattcccaatccgattgtcagcagcaatagcgtgaatacaaacagcaactccaacactacggccggcggaggtggtggcaccacaacgtcgacgaccactggattacagcgtccacggtactcgcaagctgctaccggccagcagcagacaaggatcgcctcggcggtgcctaataacacattgcccaatcccagcgcggcagccagtgctggtccggcggcacaaggagtcgccactgcggccacaacccagggagctggcggcgctagtacccggcgatcgcacgcattgaaagaggtggagcgactgaaggagaatcgcgagaagcgacgcgcccgacaggccgagatgaaggaggagaaggtggcgctgatgaaccaggatccgggcaatccaaactgggagacggcgcaaatgatacgcgaatatcagagcacgctggaatttgtgccgctgctcgatggccaggccgtcgatgaccatcagatcacagtgtgcgtgcgcaagcgtcccattagccgcaaggaggtcaatcgcaaggagatcgatgtcatttcggtgccgcgcaaggacatgctcatcgtgcacgagccgcgcagcaaggtcgacctcaccaagttcctggagaaccacaagtttcgcttcgactacgccttcaacgacacgtgcgacaatgccatggtatacaaatacacagccaagccgttggtgaaaaccattttcgagggcggaatggcgacgtgcttcgcctacggccagacgggatcgggcaaaacgcacaccatgggcggtgagtttaatggaaaggtgcaggactgcaagaacggcatctacgccatggcggccaaggatgtctttgtgaccctgaatatgccgcgttaccgcgccatgaatctagtcgtctcggccagtttctttgagatttacagtggcaaggtcttcgatcttctgtccgacaagcagaaactgcgcgtcctggaggatggtaaacagcaagtgcaggtggtgggactcaccgagaaggtggtcgatggcgtcgaggaggtactgaagctcatccagcacggcaatgctgcccgaacatccggccagacgtcggccaactccaattcgtcgcgttcgcacgccgttttccagattgtgctgcggccgcagggctcgacgaagatccatggcaagttctcgttcatcgatctggcgggcaatgagcggggcgtggacacttcctcggccgatcggcagacgcgtatggagggtgccgagattaacaaatcgctgctggccctcaaggagtgcattcgtgcgttgggcaaacagtcggcccacttgcccttccgtgtctccaaactcacccaggtgctgcgcgactcgttcattggcgagaagagcaagacgtgcatgatagccatgatctcgccgggacttagctcctgcgagcacacgctcaacacgctgcgctatgcggatcgtgtcaaggagctggtggtcaaggatatcgtcgaagtttgccctggcggcgacaccgagcccatcgagatcacggacgacgaggaggaggaggagctcaacatggtgcatccgcactcgcatcagctgcatcccaattcgcatgcaccggccagccagtcgaataatcagcgtgctccggcctctcatcactcgggggcggtcattcacaacaataataataacaacaacaagaacggaaacgccggcaacatggacctggccatgctgagttcgctgagcgaacacgagatgtccgacgagctgattgtgcagcaccaggccatcgacgacctgcagcagacggaggagatggtggtggagtatcatcgcaccgttaatgccacactggagaccttcctcgccgagtcgaaggcgctgtacaatctgaccaactatgtggactacgaccaggactcgtactgcaaacggggcgagtcgatgttctcgcagctgctggacatcgccatccagtgccgcgacatgatggccgaatatcgcgccaagttggccaaggaggagatgctgtcgtgcagcttcaattcgccgaatggcaagcgttagt

SEQ ID NO: 1104 - protein, 803 aa, DROSOPHILA
MITVGQSVKIKRTDGRVHMAVVAVINQSGKCITVEWYERGETKGKEVELDAILTLNPELMQDTVEQHAAPEPKKQATAPMNLSRNPTQSAIGGNLTSRMTMAGNMLNKIQESQSIPNPIVSSNSVNTNSNSNTTAGGGGGTTTSTTTGLQRPRYSQAATGQQQTRIASAVPNNTLPNPSAAASAGPAAQGVATAATTQGAGGASTRRSHALKEVERLKENREKRRARQAEMKEEKVALMNQDPGNPNWETAQMIREYQSTLEFVPLLDGQAVDDHQITVCVRKRPISRKEVNRKEIDVISVPRKDMLIVHEPRSKVDLTKFLENHKFRFDYAFNDTCDNAMVYKYTAKPLVKTIFEGGMATCFAYGQTGSGKTHTMGGEFNGKVQDCKNGIYAMAAKDVFVTLNMPRYRAMNLVVSASFFEIYSGKVFDLLSDKQKLRVLEDGKQQVQVVGLTEKVVDGVEEVLKLIQHGNAARTSGQTSANSNSSRSHAVFQIVLRPQGSTKIHGKFSFIDLAGNERGVDTSSADRQTRMEGAEINKSLLALKECIRALGKQSAHLPFRVSKLTQVLRDSFIGEKSKTCMIAMISPGLSSCEHTLNTLRYADRVKELVVKDIVEVCPGGDTEPIEITDDEEEEELNMVHPHSHQLHPNSHAPASQSNNQRAPASHHSGAVIHNNNNNNNKNGNAGNMDLAMLSSLSEHEMSDELIVQHQAIDDLQQTEEMVVEYHRTVNATLETFLAESKALYNLTNYVDYDQDSYCKRGESMFSQLLDIAIQCRDMMAEYRAKLAKEEMLSCSFNSPNGKR

SEQ ID NO: 1105 - DNA, 4109 bp, DROSOPHILA
aaacagctgtcacaattccaaagttaatataacctattaaaaatgaaattaattttaatgatagttatatcatacttcgcgtttctaaaaggcgtaaccacagccagtaagtatgccccatcttttgtaacagggtatcgagtatatacttacctttttttctactgccaaacgcaggtcaacaaagtttttattaagctgcgtcgaaggggaaaactaatggtgggtgggtgtttatagagaggatccagtggcaaggacaaataaataaaatacacacaaaaaaaaaaccagatagtgggcaaagcgggaggggagaggtcctggcagggcagggagatacggatacaaaggaaaacggaaaccaaagcgatgtttagcaggggtgtagttaatgggggtggtgaagtgggggataattaacatttatgggaggttgccagagcgggacaacaagctcggcgagggaactaactgtaactgttgctgattgatcaagtgtgtgggtgagtgtgcgtgtgtgtgtgtctggctggggcacaaacaaaaaccatatgtttctcgttcgactcccgcacgcactcactcacaaaccgaattactcactcacccccaccagccccacactctaaccccccgccacctctcgctcactcttgctttcgttgtgagtaggaactcaaagtcagcggctgcgcactctctccgtctctcccgctctccgattgcccggcaatgtatgtgtgcgatattctgttacacaaaaaggcaaaaacaaaaggcaccgttagaaggtgtgcgcgtgtgagtgagttcaccacgaaacgaaaatcctcaccgccagcctacgtatacgtgttcgttgctggctgtgcgtgtgtgtgttagtgtgcgactgcgagagagcctggcgcagtgcagctgtgtgcgggcgtatctgtgtgtgcgtacttggcgttacgacgtcaacgacggcatatccgtcagtacgtttgtacgcgtccgcagcgccgcttcttcagtttttcggttttcgggatttcgagattttgagatttcgattcgattcgatttcggcagatcagtttgcgatccgtttgcgagttcgatattttcattccgagccaacgatccaacgatccgattccgctagcgattcacaacagatagagatcctatatcgaacgccgcgagaaattatgctggcccgctgctctcgcactacgcgcaataatttatttttactccatataaacaaattcaacgtctatttccaaaaataaatggcaacaataataaaaataacaacagccgtcggacaattataagtttttatttttaacttttatttgcgccaaccgcggccgcgacatccccgcccccgcctgcccggactttgtttatatttacaaaaagctaaagcacacgacaaacacaacagcaaacatatcactgactgcatttcgccccgatgtttatcgaacgagcggcgtaaacaaagccagaattcaaacaataattcaatttgcatctcaattgcaaagattttcgtgtgtgtgctcggaaacatttgtgcaaacacctcgccagcgacctgacatccccagaaaagttcaaaactcgtcggtttctattgagtagtgtatttttgagaacattttttcgagaaaacggaagctcagctaaaaagcgattcatacttcattatccttaatgcaggtgcgccgagcagcgaccaggatgtgcgtctggcagccgtcgccgtgcagcagcaacagcagcagccacatcagcaacagcaactaggcgactacgatgcccccaaccacaaacggccgagaatatcgggcggatggggcacatagccggcacgagctgctggtagcagccactacaagccacatcacaacaacaacaccggctgcagcagcatcaacggcagcaacaccagctgcagcaccaacaacaccatcaccagcagcagcaacagtagcagcagcagcaacaagaagccggcggagtgcgacgacctggtcatgatgccgccaccgcctcgtaaggacataggtcgcagctcctacagcctcctgcagtccggctacgactgctatggccagcaactggcggtggcctacggagcgcagcagcatccgtagcccccgcgtcctccgtttccggaccagtgcaatagttgagagaggaaacaggaggcagttttgttttgttttcggattaagcgaacagtgacagtgtcatatctatagttattgtaacttaaatgaattacgattacagacctacggtaatagttataattttaaattatatacgcagagctggcggggctgccgccgcatcctgccgagaaatttgagcatgttagagtgttgagctgatttagtttagttacaattacaaatacagttacgagtacggttaaagttaatgttaaatctaatcttaggaatgaaatcatgcagacaaacaaaaagcaaaaaacaaaaaacaaaacggacgcgattgatggaagagctctttatgctgtacatatttgattttagtgtcataagttttaaacttagttcgtaggtaactacgagatacgtaaaccatgcaagtcatacgatgaaacgattgagaaactctaagcaaaacacagaccctcatgcagatgtactcagtgttctatcataatttgtaattctgtgcaatttattgtcaatttttagttgtcttttatctatctatgcacacgctctactgagattctggagttcatcatggaaccaaaaacgttttttgatggttggcctaattgatttgagccgagatcacagccttgtgcaagcaaggcatacacacttatggtttaatttagttccgatttaagcgattatttaatagacacttttctcttcatctcttaagcgaaacgaagtcataatttgtaatttaaatttaaagtggatttctattcaatttgaagtgtttcaaattcttgtgcctaagttttgtattttttacatttaaatgcagtttgtaaaacaacaacaatcgcaacagcaacaacaactcaacaaaatataatttaaataaaattattcgaagcaatttttcgttgtcgttgacagttttatttgattagtccatatctttatttgctctctgtacatttcacatttcactcggccatatatttaaacaggccatattaaacagtgggcgtgtctgcgcctgtgtcaatgtcaattgcccatttcgaaattgccaatatttggctaaggggtaaacgcgcccgccaatatttgcactggccacatgacctgttgcactttatacagcagcgcgaaaaggcgcaaacaaaaacaaaaaagagtaaaatattttatgtatatttgtatttgtatttgtattcgatatagggctgcatcagctgtgcatatttgaatagagaacgtgaaaatgcaggtgcatgcaggtgcagccggcggcaagcattaacaataagcaaacacacactctacaggtttccccattgaacaagctttacaacacctacatatttaagcagattgtacagattcgagcagatcgaacggatcgctgcgaaattattatcagcacgtgaacgatattttctagccatatacgatatatacaatacatacactaagcgagttgccgcggttccccaaaccgaagcgcacttttaggatgaggtagaggagttaccctggttgatccacagtccattctatcgcaaatgttttccagtaactccaagaccggctaaagatggcctgctctttgttggttatattatatatatataaatgtatatgatgtacataagtattatatgtgaatatctgtgggcatacttgttgcaccactgaatgttgtaacctgaaccccatgttgacccccaatggttttcatatgatttgcaaaacctttcggattctcccatatctatcattttcattaggacctcgttctgtttatgtacatagatcctgctaaacaacttcactgtgtagtgttgccttaaaaacagtgcctctttttgatgaacaaacagatacatgaagatataactgaatgttgta

SEQ ID NO: 1106 - DNA, 3833 bp, DROSOPHILA
gtccgcagcgccgcttcttcagtttttcggttttcgggatttcgagattttgagatttcgattcgattcgatttcggcagatcagtttgcgatccgtttgcgagttcgatattttcattccgagccaacgatccaacgatccgattccgctagcgattcacaacagatagagatcctatatcgaacgccgcgagaaattatgctggcccgctgctctcgcactacgcgcaataatttatttttactccatataaacaaattcaacgtctatttccaaaaataaatggcaacaataataaaaataacaacagccgtcggacaattataagtttttatttttaacttttatttgcgccaaccgcggccgcgacatccccgcccccgcctgcccggactttgtttatatttacaaaaagctaaagcacacgacaaacacaacagcaaacatatcactgactgcatttcgccccgatgtttatcgaacgagcggcgtaaacaaagccagaattcaaacaataattcaatttgcatctcaattgcaaagattttcgtgtgtgtgctcggaaacatttgtgcaaacacctcgccagcgacctgacatccccagaaaagttcaaaactcgtcggtttctattgagtagtgtatttttgagaacattttttcgagaaaacggaagctcagctaaaaagcgattcatttacctggggacaatttatacggaaacacaattatataaaattatatacacaactatatacaagtagaacttgccgttttaacaagccgtccacttataaaacaaacagaagggattatatatagacaacctatataaatatgccccacgtctgccacgccaggaagagccacagcaattcgcagggcagcaactaacggagtttccccgccagctgccggaaatccagtagcaaatccagcaaaccagcgacccagtcagcaggaatcagccagccgagccgagcacaaggacaccaccatctccgtttccatcgcaggaggataggaaatctgttgccatgggccgcaaaaaaattcaaatatcacgcatcaccgatgaacgcaatcggcaggtgaccttcaacaagcgcaagttcggcgtgatgaagaaggcctacgagctgtccgtgctctgcgactgcgagatcgccctgatcatcttctcgtcgagcaacaagctgtaccagtacgccagcaccgacatggatcgcgtcctgctcaagtacaccgagtacaacgagccccacgagtccctcaccaacaagaacatcatcgagaaggagaacaagaacggcgtgatgtcgccggactcgcccgaagccgaaacggactacacactcactccgcgaacggaggccaagtacaacaagatcgacgaggagttccagaacatgatgcagcgcaaccagatggccatcggcggtgcgggtgcccctcgccagcttccaaacagcagctacacgctgcccgtttctgttccggtgccgggatcttacggcgacaacctgctgcaggccagtccacagatgtcccacaccaacatcagcccccgtccatcgagttcggagacggattcagtttatccatcgggttccatgctggagatgtcgaacggctatccgcattcacactcgccgcttgtgggatcaccgagtccgggtcccagtcctggcatagcccaccatttgtccattaagcagcagtcgccgggcagccagaacggacgagcttccaatctaagggtcgtcataccgcccacaattgcccccataccgcccaatatgtcagcgccggatgatgtgggatatgcagatcaacgacagagccagacatcgcttaacacgccagtggtcacgctgcagacgccgattcccgccctcacgagctattcctttggggcgcaggacttctcctcctccggcgtaatgaacagcgcggatatcatgagcctcaacacctggcatcagggcctggtgccgcactctagtctctcgcacctggctgtctcgaatagcacgccgccgcccgccacctcccccgtctccataaaggtcaaggctgagccgcagtcgccgccgagagatctttccgccagcggtcatcagcagaatagcaatggttccacgggcagcggcggatccagcagcagcaccagtagcaacgccagcggaggagcaggaggcggtggagccgtcagcgcagccaatgtcatcacgcacttgaacaacgtcagtgtcctggcgggaggtccttcggggcagggaggaggaggcggaggcggcggcagcaacggaaatgtcgaacaggccaccaatcttagcgtactgagccacgcgcagcaacatcacctgggcatgcccaactcgcgtccctcgtccacgggccacatcacacccactccagacttcattatccttaatgcaggtgcgccgagcagcgaccaggatgtgcgtctggcagccgtcgccgtgcagcagcaacagcagcagccacatcagcaacagcaactaggcgactacgatgcccccaaccacaaacggccgagaatatcgggcggatggggcacatagccggcacgagctgctggtagcagccactacaagccacatcacaacaacaacaccggctgcagcagcatcaacggcagcaacaccagctgcagcaccaacaacaccatcaccagcagcagcaacagtagcagcagcagcaacaagaagccggcggagtgcgacgacctggtcatgatgccgccaccgcctcgtaaggacataggtcgcagctcctacagcctcctgcagtccggctacgactgctatggccagcaactggcggtggcctacggagcgcagcagcatccgtagcccccgcgtcctccgtttccggaccagtgcaatagttgagagaggaaacaggaggcagttttgttttgttttcggattaagcgaacagtgacagtgtcatatctatagttattgtaacttaaatgaattacgattacagacctacggtaatagttataattttaaattatatacgcagagctggcggggctgccgccgcatcctgccgagaaatttgagcatgttagagtgttgagctgatttagtttagttacaattacaaatacagttacgagtacggttaaagttaatgttaaatctaatcttaggaatgaaatcatgcagacaaacaaaaagcaaaaaacaaaaaacaaaacggacgcgattgatggaagagctctttatgctgtacatatttgattttagtgtcataagttttaaacttagttcgtaggtaactacgagatacgtaaaccatgcaagtcatacgatgaaacgattgagaaactctaagcaaaacacagaccctcatgcagatgtactcagtgttctatcataatttgtaattctgtgcaatttattgtcaatttttagttgtcttttatctatctatgcacacgctctactgagattctggagttcatcatggaaccaaaaacgttttttgatggttggcctaattgatttgagccgagatcacagccttgtgcaagcaaggcatacacacttatggtttaatttagttccgatttaagcgattatttaatagacacttttctcttcatctcttaagcgaaacgaagtcataatttgtaatttaaatttaaagtggatttctattcaatttgaagtgtttcaaattcttgtgcctaagttttgtattttttacatttaaatgcagtttgtaaaacaacaacaatcgcaacagcaacaacaactcaacaaaatataatttaaataaaattattcgaagc

SEQ ID NO: 1107 - protein, 516 aa, DROSOPHILA
MGRKKIQISRITDERNRQVTFNKRKFGVMKKAYELSVLCDCEIALIIFSSSNKLYQYASTDMDRVLLKYTEYNEPHESLTNKNIIEKENKNGVMSPDSPEAETDYTLTPRTEAKYNKIDEEFQNMMQRNQMAIGGAGAPRQLPNSSYTLPVSVPVPGSYGDNLLQASPQMSHTNISPRPSSSETDSVYPSGSMLEMSNGYPHSHSPLVGSPSPGPSPGIAHHLSIKQQSPGSQNGRASNLRVVIPPTIAPIPPNMSAPDDVGYADQRQSQTSLNTPVVTLQTPIPALTSYSFGAQDFSSSGVMNSADIMSLNTWHQGLVPHSSLSHLAVSNSTPPPATSPVSIKVKAEPQSPPRDLSASGHQQNSNGSTGSGGSSSSTSSNASGGAGGGGAVSAANVITHLNNVSVLAGGPSGQGGGGGGGGSNGNVEQATNLSVLSHAQQHHLGMPNSRPSSTGHITPTPDFIILNAGAPSSDQDVRLAAVAVQQQQQQPHQQQQLGDYDAPNHKRPRISGGWGT

SEQ ID NO: 1108 - DNA, 8563 bp, DROSOPHILA
ccataacttcggtttctgaaacactcgaatcaaacgctcccattattaagtgtctactagcgtgcgtttaagcttgttttaattgcactcttataatgagatccgaacctgcagttaatgagcgatcgtagaatcgagcggctttatcccagtgccagccttcttgcaaaaagctatccaaggctgtctggtggctatgtctgggcggaactcaacctccgatccaatcctataactttcaatagacttcaaaaagggttgacaagtaaacgcccctctttgccgactgaatatgatgagatctttcagcttttgaagtttgccattcaggcacaagggcgagatacaaaagcgcttggtaagaaattatgcgaatcaataggttgggtaagacgaagatatactgctcttaccaattcaatttctgatattcgaaaatcaaaatttatggtgtgtgtgccatactactaccacaccaagaagaagttctactgctattctcataacatttcacactagtgatgctatatcgattgataaaaagaacagatttagttcaagttcaaattaaatagcttttgagaccaacacatatttacatagaaacacgtttaacccaacatctgcattcgaaaacaggtataatgaaataatacatttcccttttggcacagctttcttcagcattgacaaacttcgaattggaactgaaatgcctagggcatctaggggcttaaaagtacacaaacgtcacatatgaaatcgtaatccaaactgcagcgatttgtaggtcccataaacagtggaaaggcccagtcatctaggcaacaatgcgactgcaagtcgcttgttttggccaccttttttgccccgtctttgtatgtgtgtgtctatcgctattaccactactggcgagcccggctaagagatcgagatactcacgaatactggcgcagatactcagcctcagttacaaatgcgattcaaagccgagttcgcgagacgagagctcgaaacccgaaacgcttggcccgaaatttttagcacttctttttaaatttttgtgcaatctcggttttttggttagttgtctattggagttcgcagcgcttgaatcgacgggtccgggttcgaatctccgtgcgataaggatatatagcaaatagaaagtgagactgaacgcctatagatctgtggatactccgcgaagatgtcctcgaaagtgataacctcgttaatggccgagagcatactgctctcaaaagtgggccaagtgatatccggctactcgccgatcacggtttttctccttggatccattctaattttcctcgtagtctacaacaagcgccgatcccgactggtgaagtacatcgaaaagatcccgggacctgcggccatgcccttcctgggcaacgccatcgaaatgaatgtggatcacgacggtgagtgttcggagtcacaaattcttacggtcgttgtggttgctccagttagtcatattgaccctggagtcattctctgattgctagggcaaacaatcgccgacgaacaggtgctaatttctgtgatcagctcccaatgaggcagtcatccacgtctcgaaataattcgaatatctgttaaagaccagtgttaatgaactttactttccggaattccgaattgccgatcttcactttcgttgcggaagatggcgtgcccaagattttggccaagttcgtggtctctttggagccaactgctaattgatttatagaatctcacgggcaaacatttcaaaatgcgaaaacctgttaaaaattagattgcaataagctgtgatttatgcattttctgttcctctttgttttgtcgtccggcggagcacataatttaattaacaaattttgtatttgtttgcgatacgccacatcgtcgattggaggcaaataaaacgtgaaaaagtcgccgccataaggggcaattgagcgtgcagttttggcataattctaatgaattttaattgcgggaaagtttcggtggagaagaggttccagcctttgaatattttaacaactattccactattccacaaaccagtcgaattacgtctgatctcgatataagggccggatccaacgactttcaccggacaaggggcaatttaacccgcaatttcacacgcagtttacgtgaatttgtttgctcatctcagaaacaattaccgaatatgaagaatcggcgccgaaacagcagccagaagccgttcataaatcactcacataacaagctcgccaaacactcggcgccgtgataaaaatagccataaactgcgaatagactgggctcagagcttaaggcccagaaaaagataaagaagaaaaggtccaaaacgctagcggacaatggaagcggacttgatcttgacactgaatcgcataatatagccatcgtaattggacccggcttggttcggattctcaatcgatcgatcgaggggctgattaattcgcattccgcggatccggcgttttgcaacctcccccccttttgaagacaaagcgaattaacataaatttcaatgcggaagagccagatacaagatacaagttcgaattcgaattcggcacttggccactgcaatggattcgtgtaggaaatggatttgataaacgtatgaaaaattgctactcattcgatgggtgctaagccccgaatggattcgattcgtttccgtttcgagttctttgtctttgtcttcgtgattgtggagccccaatcaagttttggatacttcatttgggggggttctatgggttctctcaatgctcctcgtctagcccaattagcatttacatttaacagatttacaacctgctttgatagtctcgaaaagaaccttagaaacccgtttgattagtcagagaaatgccttgctaattcgtgccattaacatccaaaactttaaggtcgcgataaaatcaaaagacttgctcaagaatatttctgccaaggcaagcgagcaacttgcatatcatttatggaccgattagcagccagtgagttttattaattttttataatttaatttaagaacgaatctcgaaatgtccgccgtctgtttgcctgcgcaattacgaggcttttgttaagtgctaaaaactgaaaataaaatgaaaaatgaaatatgatgttgcagcaactcgggctgaaggtcaagcggttcttgatcgcatacattttccaaagatacctcgggctgttgaagaggcagctcggcaacatttagagtggaatgatgtggagtgctgccaaggctcaaacgggttttcagttctgagtcttcagagttctgctgccaacaaaacgggggtcatggatttttttcgagtggctgtaggtgtttcgggggtttgttttggcctctgtgcgatctggtaactgctttttaatctgcactaccaatgtcagccaagaaattgtgacaatcgcaaatgataccaaattgcctgcgtaatcgcagtctattcaaatgacacacaacatctaaaaaaatcggttgcgaagggaaatccatgaggtagggtagcaaaatgcgcctagcgtaatgtaaataggtttgtttccataggtgatacgacctctagagtttcaaatgaaacagcgaaggtgtgtcggcttagacttggctaaggtttaatcacacacttttcccttttagcaatcgagagagatctttgttcttggcaaaatcccccaacactttcacttagtaacgttatttcagttttaccacttcaaattcagtttgctatgatataggttctgctaaatctttgtattgtaaaaatcaacacatttatgttatgcttttttatggacctaaacatgtctaaaattacctgaagtaattacacgaattcgtagaccttgttgataatggagtgacccctagagcggcaaaagagtatgcatgaaaagtgatttcttttggacaaatcgacgttcgctggcccagcttcaacttccgatgaaagagcggcccagagtccctccgtttctcacctgagaaatgccccacctgatgatcgcgaaatagcgattcgctattcgggcggtggggttacataaaatcattattagaggcagagattgctgaatggccgcgcatcgctgtttgcgttgtgtgtttcatcttttaattaatgcaacacacatgagctgcggcgacacataaacatgtttacatggatttgtctatgagtaacgtgttttggccagagtttcggccgagaaaagcccggcttattaactgggccacaaagaaagcaattgaggcgaccttcgtggggtcggcgaaggggcagcagcgaacgcgaaataattactttgacatctgggaaatgtgcacatacataaaattacacactattttgaccacaaataagttaatgaatcaaaagtgataacataaatgctgacgtaaattacgctcccacccatattgtttgagccaaccgagttaaactggtttttcgaccaactcctatcattttgcagagctctttaaccgcgtcatcggcatgcaaaagttgtggggcacgcgtatcggaatcaatcgcgtttggcagggaacagctccaagggtgctcctcttcgagcctgagaccgtggaggtgagtttggataaacaggcataactgtaaaacataactaatttaaaattaaatataacagcccatactgaacagccagaagtttgtgaacaagagccacgactacgactatctgcatccttggttgggagagggtctgcttaccagcacagatcgcaagtggcactcccgcaggaaggtgagtccttttgagctgctcttacaactgtattgtatgattatttaaatttaacctacaccacagatcctcacacctgccttccacttcaaaatcttggacgatttcatcgacgttttcaatgagcagagcgcagtcttggccagaaaattggcggtggaggtgggcagcgaggcgttcaacctgttcccctacgtcacgctctgcaccttggacattgtttgtggtgagtgtcaatgccgctggggatcggatatgttttccagatcgggtgacattattcgtggctaattgcaaacgtaactcaattcacagaaaccgccatgggtcgcagaatttacgcccagagcaatagtgaatcggagtatgtgaaggcggtctatgggtaagatattgtcaataactcgaaactaagatgggcagattgcatgtcgaagttttcttgctagctttgtaatcaatgttaaaattgataaaacatcctgtcttcgaatcgacattcaatcgaattcattgcgatcgaaattatgccaaattacctataatcatataaagcaatcgggttttcatcaaatccatgctgccgctaagtgtgaacgattttttgatctggtttcaattatggtcataaatggcattcataaaatcagatataagatatataatattaggccattgtgttttcgaccgatgttgattgaaactgtttttggctattacaagtcgtttcctctttgatttttataagaaacgctagtgtcataaatggcttaaatgtcttaaatgtgaattcgtctcacgcgaatgtatttaaacgtttataataatcttttgattgtattaaacgaaatttgtagtttcatgcaatcagctttttcatcaacacaaaaaacggtgaataaatgtacttaatttaataacaaatagaataacaatgagaaaattgaaaccgttcaagaaaatctgttgtcagcctgaaaatatgcaatttactacttcagagtcgtagtgatatattaaactatatctctgcatacttttggagcggaagttacaaaatgctgccacacaaatatgtatacatttgaaatccagttatgaccctcagaatataattaaaatatatcacaaaatccggcgaccactgggaataaaatcatcaataccaaatacaactcttcctcattcgccgaagagttatcagcgttgtggcagcagtttaatatcgagagctgtcagaacagctgtcaggaaagaagacaccctttagatacacatgtccttccacctcccgaaccatttccccaacctgcccccatccgcccattttcacccacaattctgccccgtgcgtgcgtcagtgggtggtggtgcatccaagcgcaaaatatgcgagattaagatgtcaatgggatgcttgaagtgcttccaagctgataacagagaacatcggacccatccttccactcctcccagccacgcctcatagaacacacacccatccagtgcacagatgactaactttcaatttaacgcaacactttctcactttccctcatttcctgtgagaaactctagaaatcgggaccaaaatggcactgtttatctatttaaaaaccagcgcaaagcttttcgtttgcaaatcaaagaaaactacctcagaacgttgagtttacaattgttatttttcttcccgcagcattggatcgattgtacagagtcggcaggcgaagatttggctgcagagcgacttcattttcagcctgaccgcggagtacaagctccaccagagctacataaacaccctgcatggattttccaacatggtgatccgcgagcgaaaggctgagttggccattctccaggagaacaataacaacaataataataacgcccccgatgcctatgatgacgtgggaaagaagaagcgcctggccttcctggaccttctcatcgatgcctctaaggaaggaactgttctttctaatgtaagaagatgggtgaccctgaaatgtctttttttttattaaatatgaaatcccgttgtaggaggacattcgcgaggaggtagacacctttatgttcgagggccacgacaccacctctgcggccatttcctggacactatttttgctgggctgccacccagagtaccaggagcgcgtggtggaggaactggactctatcttcggcgatgacaaggagacgccggccaccatgaagaaccttatggatatgcgatacctggagtgctgcatcaaggactcgctgcgcctgtttcccagtgtcccaatgatggctaggatggtgggcgaggatgtgaacattggtacgatctaaaggtttttgcctgcgagagctcttttaattggcttcccttccataggtggaaaaatcgtgcccgccggaactcaggccatcattatgacctacgccctgcaccgcaatccgcgcgtcttccccaagccggagcagttcaatccggacaatttcctgccggaaaactgcgccggacgccatcccttcgcctatataccctttagcgcaggaccgcgtaactgcattggccagaagttcgccattctggaggagaaggccgtgatttccacggttttgaggaagtacaaaatcgaggctgtggatcgccgggaggatctcacgctgctgggcgagctcattctgcggcccaaggacggcctacgggttaagattactccaagggattaaggagctgatttcctgcctcggaacttaccccgttcgaacttctatccaaagcccagttgtaaatagagttagagttagccggatatgttaggtctagagattagtttatgttaaactttgtaatcgatggaattctgtatagcttaggaataaacctcttcgcataatttgttaaaagtcccaggattggggattcatgaaagtgttaaaaaaaaatctacggttgcgcgattaattccgtatgcataccagtcggagtggaaaaggtaatccccatggggaaacttgatgtctccgttaactttttgattcataaagtttgtaggcaatttctcaactattagatcatgctgaaatttaaaaagaaaagtattcaactgctcaatcaatcgccggatcagcacacttacatcgaatgggcaggtgtggttcatgttggaatgatgtttaaacagcccataaaagaaactgaatatcggattgtacttcgagtgtctcagggctttgcaagcatcgacagtgatattgtatagaaatggtttgtagccattgaaacgtttgagcaaagagaagttcacctgaaatgaaacaatcaaatttgaattcagcactgaataatgtattcattttagttgtgacaaaccttcactttggttatgggtaccttgtgtaggtttactttaagcgacaagtacttaaagctccggttaaccgacttcagatggcaatactcaaaatcatcaaacgctttatcccaggaggtgcacttgatattcgtgaattccaccagcgaggctatcttaaagaaaaatgtgctttagtaagactttaaaaaatgcacagcatgcatacttctgtgatcagagaaaggagcataatgatgttgctcatcagcgctataagtttccacataatgatgagcacaatgatactgacttaaagagattcggtttaacactgcacaaaaaccaacaaagcttttcagaaacaaaaaacacaa

SEQ ID NO: 1109 - DNA, 1818 bp, DROSOPHILA
agacgagagctcgaaacccgaaacgcttggcccgaaatttttagcacttctttttaaatttttgtgcaatctcggttttttggttagttgtctattggagttcgcagcgcttgaatcgacgggtccgggttcgaatctccgtgcgataaggatatatagcaaatagaaagtgagactgaacgcctatagatctgtggatactccgcgaagatgtcctcgaaagtgataacctcgttaatggccgagagcatactgctctcaaaagtgggccaagtgatatccggctactcgccgatcacggtttttctccttggatccattctaattttcctcgtagtctacaacaagcgccgatcccgactggtgaagtacatcgaaaagatcccgggacctgcggccatgcccttcctgggcaacgccatcgaaatgaatgtggatcacgacgagctctttaaccgcgtcatcggcatgcaaaagttgtggggcacgcgtatcggaatcaatcgcgtttggcagggaacagctccaagggtgctcctcttcgagcctgagaccgtggagcccatactgaacagccagaagtttgtgaacaagagccacgactacgactatctgcatccttggttgggagagggtctgcttaccagcacagatcgcaagtggcactcccgcaggaagatcctcacacctgccttccacttcaaaatcttggacgatttcatcgacgttttcaatgagcagagcgcagtcttggccagaaaattggcggtggaggtgggcagcgaggcgttcaacctgttcccctacgtcacgctctgcaccttggacattgtttgtgaaaccgccatgggtcgcagaatttacgcccagagcaatagtgaatcggagtatgtgaaggcggtctatggcattggatcgattgtacagagtcggcaggcgaagatttggctgcagagcgacttcattttcagcctgaccgcggagtacaagctccaccagagctacataaacaccctgcatggattttccaacatggtgatccgcgagcgaaaggctgagttggccattctccaggagaacaataacaacaataataataacgcccccgatgcctatgatgacgtgggaaagaagaagcgcctggccttcctggaccttctcatcgatgcctctaaggaaggaactgttctttctaatgaggacattcgcgaggaggtagacacctttatgttcgagggccacgacaccacctctgcggccatttcctggacactatttttgctgggctgccacccagagtaccaggagcgcgtggtggaggaactggactctatcttcggcgatgacaaggagacgccggccaccatgaagaaccttatggatatgcgatacctggagtgctgcatcaaggactcgctgcgcctgtttcccagtgtcccaatgatggctaggatggtgggcgaggatgtgaacattggtggaaaaatcgtgcccgccggaactcaggccatcattatgacctacgccctgcaccgcaatccgcgcgtcttccccaagccggagcagttcaatccggacaatttcctgccggaaaactgcgccggacgccatcccttcgcctatataccctttagcgcaggaccgcgtaactgcattggccagaagttcgccattctggaggagaaggccgtgatttccacggttttgaggaagtacaaaatcgaggctgtggatcgccgggaggatctcacgctgctgggcgagctcattctgcggcccaaggacggcctacgggttaagattactccaagggattaa

SEQ ID NO: 1110 - protein, 535 aa, DROSOPHILA
MSSKVITSLMAESILLSKVGQVISGYSPITVFLLGSILIFLVVYNKRRSRLVKYIEKIPGPAAMPFLGNAIEMNVDHDELFNRVIGMQKLWGTRIGINRVWQGTAPRVLLFEPETVEPILNSQKFVNKSHDYDYLHPWLGEGLLTSTDRKWHSRRKILTPAFHFKILDDFIDVFNEQSAVLARKLAVEVGSEAFNLFPYVTLCTLDIVCETAMGRRIYAQSNSESEYVKAVYGIGSIVQSRQAKIWLQSDFIFSLTAEYKLHQSYINTLHGFSNMVIRERKAELAILQENNNNNNNNAPDAYDDVGKKKRLAFLDLLIDASKEGTVLSNEDIREEVDTFMFEGHDTTSAAISWTLFLLGCHPEYQERVVEELDSIFGDDKETPATMKNLMDMRYLECCIKDSLRLFPSVPMMARMVGEDVNIGGKIVPAGTQAIIMTYALHRNPRVFPKPEQFNPDNFLPENCAGRHPFAYIPFSAGPRNCIGQKFAILEEKAVISTVLRKYKIEAVDRREDLTLLGELILRPKDGLRVKITPRD

SEQ ID NO: 1111 - DNA, 4563 bp, DROSOPHILA
tgcaacggagaaacgggagctggaaccgtagcgggtgtaggagcgggaacgaggttagttagtacttttccgcgccgagtcgtccctaaataaatggcatatataccgctgtgcgtgtgtgcatatgtatatgtgcctcgtctgtatgcagcgtggtcttcgtgccgaagagacagcgagcgagagagagagagagaggagaggagagtcgaaggatgttgatgcctggcggaggctaaaagttgtccgttttttctgcgccgctcttgcgaccactgtagtttctatattcacgcttatgcaaatgtcgcgcacgttacactcggccgattggattggccagggctctcgctttttgttaatgtttccgttttgtattttatttgtaagtaaataatcgctcgctattgcgctgttgtctctgcttcttactacactgctgcacaagcactgtgtctgtgaccctgtgcgtgtgtttgtgtgtgtgtctgtctttgttttctcagttcattgaaatttcacccgaagcagcgaattgggcaaattccctgctagatttgcgcgtcttttacgccgccgacccgcaaatgcactcgaacttaatggagccgggtccttacgatccactatcgaggggcagtaaacaattctttagcgcccgaaatggctttaaattgtacacaaaaaatgttccgcaaaaaactttgtggctgtcacgaatacaaacacacaagaattagggatgtaaaaatctgctatcgagacagcgttggtatcgatagtagttagtttgcaacgagagggtttggtgcattgattactgtatatttcaaagaatattcgaattgttttctttaaagacaacaattttattcgcctttgcgattggtaaaatagttgtttacttttaatcgatagacaaaaacagttattgggctgccatctggggcgtctatgcgaagacctctttgcgtatttcagttatcgattactgtgacagtgcctagacctcctaaactcaactttattgcccggccgcgaattgtcttgattgcagattttccgattttaaacaaaatttacttggcattatgggcagccaaaactcggacgacgacagtggtgagtggctaatggctaagtccaggcctgagtaactaatatttacactgttcacatatgtatgtaggttcatccggttcgagtcgaagtggaagccgcagtgtcacgccgcaaggaggtagtgcgcccgggtaactatttgatattcaaacacggcggcgggagagtgctgattaccttcccctcgttttccagatcccaacgcagtcgcaggtcgggtagtggcagcgatcgttcccgatcgggctccaggtcttcccgatcccggtccggctctgggtctccgcgtagtgccaggtccgggtctgcagaaagccgccactcgcagctgtctggctccgctcgtagtaagagatcaagatctgctcacagtcgcaggtcgggatctgcgcgtagccgtaaatctggaactccggaatctccacaaagtcacagatcaggttcgttgcaaagtcgcaagtcaggatcgcctcagagtcgtagatctggttctccccaaagtcgcaaatcgggatctactcacagccgcagatccggttcggcccacagtcgcagatcgggatccgctcggagtcgcaaatctggttcggcacaaagtgaccgctctgagtctcgatcgaggtctcatagcggttcactcaagggcaacgaggaatcgcggtctaattcgcccaatctgcaaattgacgtagagcgtgccaattccaagagcggcagtcgcagcagaagtaggagcaggagtggcagtcgcacttccagatcgcgttccaagacgggcacgccgtcgcccaatagaagtcgtagtggcagcgcatccggctccggcagcgatgtgggtgtgcccaagaagaaggcacgcaaggcgagtggctccgatcaagagaagaaaaagagcggcagcgatagcgacattgaggaatcgcccaccaaagctaagaagtcacggctgatcgacactgatagcgattccaatcaggatgtggtaaggcacaccactctgaactactcaactatattgttatttatctagttctataattaaggaaaaattaccctgatatatgtacatttcaattatgcagggaaagaaagctccggctgcagctgacatatttggagatgccgatgatataagtgacgatgaggatgaggctggaccagctgccagaaaatccccagtgcgctccaagagccgcagtcaaagcaagtcccactcccacagtcgttctatgagccactcgcgttcccgctccagatcgcgatcccgggataaagtcgagagccaagtagaatcggcgcccaaggaggatgagcctgaaccgcttccggagacccgaatcgatgtggagattccgcgcatctctgcagacctgggaaaagagcagcactttatcaagcttcccaactttttgtcagtggtcacgcatccgtttgatccggaaacctacgaagacgagatcgacgaagaggagacaatggacgaggagggcagacagcgtatcaagctcaaagtgagcaacactatccgatggcgagagtacatgaacaataagggcgacatggtgcgcgagtctaatgcgcgattcgtgcgctggtccgacggcagcatgtcccttcacctgggcaacgagatcttcgacgcctacaggcagccgctgttaggtgaccacaatcatctgttcgtccgccaaggaacgggtctgcagggccagtcggtcttcaggaccaagctcactttccgtcctcattccacggagtcctttacgcacaagaagatgaccatgtcgctggccgatcgatccagcaagaccagtggcattaagattcttacgcaggtgggcaaggatcccaccacggataggccaacgcagctcagggaggaggaggccaagctgcgccaggcgatgcgcaatcagcacaagtcgctgcccaagaaaaagaaaccaggcgcgggcgaaccactgattggaggcggcacttcgtcttaccagcacgacgaaggcagcgacgatgagaacgccatcagcctgagtgccatcaagaaccggtataagaagggctctggtgccggccaggcggaggttaaggcatctacgatctactcgtcggacgaagacgagggctccgacttcgaggcgcgtcgcagcaagaaggtggacaaggccaaggccagcaaggcactgcgcgactccgacagcgaatcggacgccggcagcgccaagagcggccacagcaacaagagcggcggagaagggggcagcgctagtggtagcgaaaacgagggcagccagaagagcggcggcggcagcagcaagtctgccagtggaagcggcagtggcagtggttccggcagcggatcgggcagtgacaacgattaacaacgattaagctagttcaagtgcgttccttgattacaccaataaaagtaattttcaattttcacgcgctgaattcgactttgcttagttaagcatcttgcaaatttagaattactctattatttatttatacaaaaaggccaagtgacgacatatgaggtttgcgtacccaaacttcagtctttttattacgaattgttgtaggagtcgtttggtggattatttggaaggattagttgctaaatgggaaataagctgttgtgcagtttttttgtttttttttttgttgttttgggtctcttttgctattttgtcggcgcttcgatgtgactgtagaaccagatagtttcgatttctgggaagtgattagagacggtttctgtaacgctacttaaattagatttcattcaatgtggatggataaatccaaagagcagcaaatctaaaaacaaaaaagtacgtaaaatacgtactatttggaagttattttaaaattttcttttctctttatatagtttatagcattcgtttaaatttgatcaaaatatagaggtgtcttttagtaaatttttcgccatcaccaagtagcgaccttcaaatatccattatttattggccgaaagtcagcagcacccaaatggcccatatttgtttggtcgataggaggagcacttagcccgcgcaattagctgtccgctgaaccgcgatggcgggggatattttcaagtgggcattggccactcatgttagccatttttacacacgagatgtttgcgggttgttgattttaaatatatatatatttccataaattattgcttaaataaattagtctatatgcttaaaacccaacgcattctaaactcctcacctcggttatctacaacggcattcgatttcacaactatatatttttgtttcttaaatcagggttctacaaaggtactccatagtccatcttaggtgcattgtcgctggcccagaaacaacataatcctcgaatcctgacgtgcgtagaatctcctcagtactcgcatatgagatttatatcaaaaacgatcta

SEQ ID NO: 1112 - DNA, 2332 bp, DROSOPHILA
tgcctagacctcctaaactcaactttattgcccggccgcgaattgtcttgattgcagattttccgattttaaacaaaatttacttggcattatgggcagccaaaactcggacgacgacagtggttcatccggttcgagtcgaagtggaagccgcagtgtcacgccgcaaggaggtagtgcgcccggatcccaacgcagtcgcaggtcgggtagtggcagcgatcgttcccgatcgggctccaggtcttcccgatcccggtccggctctgggtctccgcgtagtgccaggtccgggtctgcagaaagccgccactcgcagctgtctggctccgctcgtagtaagagatcaagatctgctcacagtcgcaggtcgggatctgcgcgtagccgtaaatctggaactccggaatctccacaaagtcacagatcaggttcgttgcaaagtcgcaagtcaggatcgcctcagagtcgtagatctggttctccccaaagtcgcaaatcgggatctactcacagccgcagatccggttcggcccacagtcgcagatcgggatccgctcggagtcgcaaatctggttcggcacaaagtgaccgctctgagtctcgatcgaggtctcatagcggttcactcaagggcaacgaggaatcgcggtctaattcgcccaatctgcaaattgacgtagagcgtgccaattccaagagcggcagtcgcagcagaagtaggagcaggagtggcagtcgcacttccagatcgcgttccaagacgggcacgccgtcgcccaatagaagtcgtagtggcagcgcatccggctccggcagcgatgtgggtgtgcccaagaagaaggcacgcaaggcgagtggctccgatcaagagaagaaaaagagcggcagcgatagcgacattgaggaatcgcccaccaaagctaagaagtcacggctgatcgacactgatagcgattccaatcaggatgtgggaaagaaagctccggctgcagctgacatatttggagatgccgatgatataagtgacgatgaggatgaggctggaccagctgccagaaaatccccagtgcgctccaagagccgcagtcaaagcaagtcccactcccacagtcgttctatgagccactcgcgttcccgctccagatcgcgatcccgggataaagtcgagagccaagtagaatcggcgcccaaggaggatgagcctgaaccgcttccggagacccgaatcgatgtggagattccgcgcatctctgcagacctgggaaaagagcagcactttatcaagcttcccaactttttgtcagtggtcacgcatccgtttgatccggaaacctacgaagacgagatcgacgaagaggagacaatggacgaggagggcagacagcgtatcaagctcaaagtgagcaacactatccgatggcgagagtacatgaacaataagggcgacatggtgcgcgagtctaatgcgcgattcgtgcgctggtccgacggcagcatgtcccttcacctgggcaacgagatcttcgacgcctacaggcagccgctgttaggtgaccacaatcatctgttcgtccgccaaggaacgggtctgcagggccagtcggtcttcaggaccaagctcactttccgtcctcattccacggagtcctttacgcacaagaagatgaccatgtcgctggccgatcgatccagcaagaccagtggcattaagattcttacgcaggtgggcaaggatcccaccacggataggccaacgcagctcagggaggaggaggccaagctgcgccaggcgatgcgcaatcagcacaagtcgctgcccaagaaaaagaaaccaggcgcgggcgaaccactgattggaggcggcacttcgtcttaccagcacgacgaaggcagcgacgatgagaacgccatcagcctgagtgccatcaagaaccggtataagaagggctctggtgccggccaggcggaggttaaggcatctacgatctactcgtcggacgaagacgagggctccgacttcgaggcgcgtcgcagcaagaaggtggacaaggccaaggccagcaaggcactgcgcgactccgacagcgaatcggacgccggcagcgccaagagcggccacagcaacaagagcggcggagaagggggcagcgctagtggtagcgaaaacgagggcagccagaagagcggcggcggcagcagcaagtctgccagtggaagcggcagtggcagtggttccggcagcggatcgggcagtgacaacgattaacaacgattaagctagttcaagtgcgttccttgattacaccaataaaagtaattttcaattttc

SEQ ID NO: 1113 - protein, 725 aa, DROSOPHILA
MGSQNSDDDSGSSGSSRSGSRSVTPQGGSAPGSQRSRRSGSGSDRSRSGSRSSRSRSGSGSPRSARSGSAESRHSQLSGSARSKRSRSAHSRRSGSARSRKSGTPESPQSHRSGSLQSRKSGSPQSRRSGSPQSRKSGSTHSRRSGSAHSRRSGSARSRKSGSAQSDRSESRSRSHSGSLKGNEESRSNSPNLQIDVERANSKSGSRSRSRSRSGSRTSRSRSKTGTPSPNRSRSGSASGSGSDVGVPKKKARKASGSDQEKKKSGSDSDIEESPTKAKKSRLIDTDSDSNQDVGKKAPAAADIFGDADDISDDEDEAGPAARKSPVRSKSRSQSKSHSHSRSMSHSRSRSRSRSRDKVESQVESAPKEDEPEPLPETRIDVEIPRISADLGKEQHFIKLPNFLSVVTHPFDPETYEDEIDEEETMDEEGRQRIKLKVSNTIRWREYMNNKGDMVRESNARFVRWSDGSMSLHLGNEIFDAYRQPLLGDHNHLFVRQGTGLQGQSVFRTKLTFRPHSTESFTHKKMTMSLADRSSKTSGIKILTQVGKDPTTDRPTQLREEEAKLRQAMRNQHKSLPKKKKPGAGEPLIGGGTSSYQHDEGSDDENAISLSAIKNRYKKGSGAGQAEVKASTIYSSDEDEGSDFEARRSKKVDKAKASKALRDSDSESDAGSAKSGHSNKSGGEGGSASGSENEGSQKSGGGSSKSASGSGSGSGSGSGSGSDND

SEQ ID NO: 1114 - DNA, 4138 bp, DROSOPHILA
cattacgctagcctgcaataaaacatcgtcgttatccagttcgctgagagccgcatccagaataaatgtaacgtcactgagtaaggtggcacttttcttggccaggaccactgccaattcgtaggcgcgacagcgcacgatctcattttgctttaggagctgtactagctttgcctgcacatcggcattgctgattcgctgaggcagcacgatggataggatattgatggccagagaggtactctgcgtatccggttgtttcagctcgtccaagatgaggaaaataagctcattgttgggcagggtgagaacctgaccgacggtcaactggcgaagcagcttcttgaacaaactggccaacacctgggcacgcaaggctggattcgagtgggtcaagccacgtcttagcagactggacagctgctcgtcggcggtgtccatcgccagctgatcaaggcagtggcacagcaattccagggtcacgtccacggcctgatccttgggaacatgggaatccgcggcgggattggcgcagtcatacaattggtccgtggtcagcaggcgttcaattatttgacgcggaagagccgcctcctttgcgatggctgagttcatggcggtcagcgcatccagcctttgtggcttcgactccagagcctttaacttggtgacccaccaattgtcttccatttccatttgttttctgtgttaaaatgacagtcggtttcaaacctatcgttcttcgatttcagaagacgttacttgtccgaacttattggcgactatcgatattgcttatgtttatggcttgacactgcaactatcgagcgtttgggcaaaccaatgttttcgatcgatagtagcaagtgctagtatattccttatcgtattgtttgtttgttacaaatgtcttgaaagtttttaagtatattttcaaagccaactatatagctgtaactctattgaaatgaataacttcgattaaagtgcaaaatgatagccgcagccctgccaaacgttgtaatatctatcgcccagtcgaccaccaccagtaatagtgcatccctgttttgacgccattttacaggcgaaattgtgtgtgtgtttgacgcgttgttgtattgaaacaaaaaggcagaaattttccttcgtctgcaaagggcaattgtttacggctggaaaaaagggaggacttcgtagcaaagatgtcgcaacgctttgcacctggccaagcgccggtgcagtcgcgttatcagccaccaccaccggcgcccggcatgcgtccctatccgccgccaggcgcctcttttccagtgagttttccacgcattatccagcacctaccgtttcaattaagcatgtacaatcttatccgcaacagccgcgcgggtttcccctgcatccgaacactactcaacctgttcccggcacggcgaacgtggccggggtaccgggagttcctggagtacccggcgtaccgggaccatcgctactgcagcgcgccgcccaacagccgggctttcagagcagccttcgcggtactggagccggaggtggcggtgttggatccggcggaggcagcaagaggtcaaatgaatcccgcagtttgggtggcggtggtagcaaaagtgattttgcgacggccaaaaagaaaaagaagctggccgaaaagatactgccgcagaaggtgcgggatctggtgcccgaatcgcaagcgtacatggatctgctgacgtttgagcgaaaactggatgccaccataatgcgcaaacgtctggacatccaggaggccctcaagcgccccatgaagcagaagcgcaagctgcgcatcttcatctcgaacacattctatcccagcaaggagcccacaaatgatggcgaggagggcgccgttgcctcttgggaattgcgggtggagggtcgcctgttagaggatggcaagggcgatcccaatacaaagatcaaacgcaagttttcgtcgtttttcaagtcgctggttatcgagctggataaggaactgtacggtccggacaaccatctggtcgagtggcatcgcactcacaccacccaggagacggacgggttccaggtgaagcggccgggcgatcgcaatgtgcgctgcaccatcctcctgctgcttgactaccagccgctgcagttcaagctggacccgcgactcgccaggttgctgggcgtacacacacagaccaggccggtgatcatatccgccctgtggcagtacatcaagacgcacaagctacaggatgcccacgagcgggagtacatcaattgcgacaagtatctggagcagatattcagttgccagcggatgaagtttgccgagataccgcaacgcctcaatccgctgctgcatccgcccgatccgattgtgatcaatcatttcattgagagcggtgcagagaacaagcagactgcctgctacgacatcgatgtggaggtggatgatacgctcaaaaaccagatgaacagcttcctgatgagcactgcgagccaacaggagatccaggggctggacaccaagatccacgagacggtggacacgatcaaccagatgaagacgaacagggagttcttcctaagcttcgccaaggatccacaaatgtttattcatcgctggatcatcagtgagacgagggatttgaaggttagttctttttttttcttttttgcctcataccgttgtctaaacctttcgtcctttcagctgatgaccgatgtagctggcaatccggaggaggagcgtcgggcggagttctattaccagccatggacgcacgaggccgtttcgcgctacttcttcaccaaggtcaaccagaagcgggccgaattggagcaggcgctgggcatacgcaacggctaggtgaatgatgagctgatcatctccaccagccaattcgtggagtccaccgtcaagagacctccataaaccgtgcgcacggcaaactctttttccttcgccagtttagtttaagcttaaaatatttcctttttttccgacaagccgaactccatcccgttccaaaacgaaaatcccctttgcagttgtcccaaatacccacatccagcacaaatattggacttaactgtaagctaataaaatggcatacaaatataaaactgtctataaaatttgattcggttcacttttagaaacactaaagtttaatttttattacgagtgatttcagttgactttatatatatttagccttttgatacttttgggttccctttaaattttagaaaatgcatttgttggttaattgagattttagaatcacttgtagccttacgatcctatacgatttcatgttaactgattgtttctaaaatacgttttgatctacatttggatatattattgtagggttttagctgaccaatctaacaatgtgaaaggccagcgtttgagtcatctcacaatatttcataatttatactttaaaattatgtgttttagtaagttccatagttctgcaatcctttgatgctgttgatttaaaattgtataaaacgcattttcagttgatgcttcttaacttaacgatttacgcacaagctttaaacggtttagactacaacacaggattaatatcactagtaaactaaagacggactcggattactacgtctcgggctagacctcaagctataggcggaatgtgcaacctttactccttttgctgatataggatcaatttcgcttcttgcgattggcagcaatggaagcggatgagctgttgcccgtatccggggtctcgctaatggacagacccgtgtccagccgactcttgtcaaccggatacagccagcgctgatacagatagataataaacacaatatcatcgcgcaggcaggccacccgatgggccgtgggcatggtgatgatgaaggcgaagaagtcgtcgatgaaggtattaaatgctttatacataaatgcgcgccacggcaatgcggccacagacttcagcttgtagtttacaaacagttgcggcaacatgaacaggaaaccgaaggcgtaaactccgttcaccagtgagttaagtgtccatgagtaccaggagcggtgtggttggtagaggagcgaatagaccgctccgcatatacaaagcggata

SEQ ID NO: 1115 - DNA, 2010 bp, DROSOPHILA
ccgcagccctgccaaacgttgtaatatctatcgcccagtcgaccaccaccagtaatagtgcatccctgttttgacgccattttacaggcgaaattgtgtgtgtgtttgacgcgttgttgtattgaaacaaaaaggcagaaattttccttcgtctgcaaagggcaattgtttacggctggaaaaaagggaggacttcgtagcaaagatgtcgcaacgctttgcacctggccaagcgccggtgcagtcgcgttatcagccaccaccaccggcgcccggcatgcgtccctatccgccgccaggcgcctcttttccaccgcgcgggtttcccctgcatccgaacactactcaacctgttcccggcacggcgaacgtggccggggtaccgggagttcctggagtacccggcgtaccgggaccatcgctactgcagcgcgccgcccaacagccgggctttcagagcagccttcgcggtactggagccggaggtggcggtgttggatccggcggaggcagcaagaggtcaaatgaatcccgcagtttgggtggcggtggtagcaaaagtgattttgcgacggccaaaaagaaaaagaagctggccgaaaagatactgccgcagaaggtgcgggatctggtgcccgaatcgcaagcgtacatggatctgctgacgtttgagcgaaaactggatgccaccataatgcgcaaacgtctggacatccaggaggccctcaagcgccccatgaagcagaagcgcaagctgcgcatcttcatctcgaacacattctatcccagcaaggagcccacaaatgatggcgaggagggcgccgttgcctcttgggaattgcgggtggagggtcgcctgttagaggatggcaagggcgatcccaatacaaagatcaaacgcaagttttcgtcgtttttcaagtcgctggttatcgagctggataaggaactgtacggtccggacaaccatctggtcgagtggcatcgcactcacaccacccaggagacggacgggttccaggtgaagcggccgggcgatcgcaatgtgcgctgcaccatcctcctgctgcttgactaccagccgctgcagttcaagctggacccgcgactcgccaggttgctgggcgtacacacacagaccaggccggtgatcatatccgccctgtggcagtacatcaagacgcacaagctacaggatgcccacgagcgggagtacatcaattgcgacaagtatctggagcagatattcagttgccagcggatgaagtttgccgagataccgcaacgcctcaatccgctgctgcatccgcccgatccgattgtgatcaatcatttcattgagagcggtgcagagaacaagcagactgcctgctacgacatcgatgtggaggtggatgatacgctcaaaaaccagatgaacagcttcctgatgagcactgcgagccaacaggagatccaggggctggacaccaagatccacgagacggtggacacgatcaaccagatgaagacgaacagggagttcttcctaagcttcgccaaggatccacaaatgtttattcatcgctggatcatcagtgagacgagggatttgaagctgatgaccgatgtagctggcaatccggaggaggagcgtcgggcggagttctattaccagccatggacgcacgaggccgtttcgcgctacttcttcaccaaggtcaaccagaagcgggccgaattggagcaggcgctgggcatacgcaacggctaggtgaatgatgagctgatcatctccaccagccaattcgtggagtccaccgtcaagagacctccataaaccgtgcgcacggcaaactctttttccttcgccagtttagtttaagcttaaaatatttcctttttttccgacaagccgaactccatcccgttccaaaacgaaaatcccctttgcagttgtcccaaatacccacatccagcacaaatattggacttaactgtaagctaataaaatggcatacaaatataaaa

SEQ ID NO: 1116 - protein, 515 aa, DROSOPHILA
MSQRFAPGQAPVQSRYQPPPPAPGMRPYPPPGASFPPRGFPLHPNTTQPVPGTANVAGVPGVPGVPGVPGPSLLQRAAQQPGFQSSLRGTGAGGGGVGSGGGSKRSNESRSLGGGGSKSDFATAKKKKKLAEKILPQKVRDLVPESQAYMDLLTFERKLDATIMRKRLDIQEALKRPMKQKRKLRIFISNTFYPSKEPTNDGEEGAVASWELRVEGRLLEDGKGDPNTKIKRKFSSFFKSLVIELDKELYGPDNHLVEWHRTHTTQETDGFQVKRPGDRNVRCTILLLLDYQPLQFKLDPRLARLLGVHTQTRPVIISALWQYIKTHKLQDAHEREYINCDKYLEQIFSCQRMKFAEIPQRLNPLLHPPDPIVINHFIESGAENKQTACYDIDVEVDDTLKNQMNSFLMSTASQQEIQGLDTKIHETVDTINQMKTNREFFLSFAKDPQMFIHRWIISETRDLKLMTDVAGNPEEERRAEFYYQPWTHEAVSRYFFTKVNQKRAELEQALGIRNG

SEQ ID NO: 1117 - DNA, 3648 bp, DROSOPHILA
gcctccacaacctgtcccatacgcttctcgtagaagacgcgcagcttgtgctcgtcgaccacttcgaatagcttttggcatcccgtcgcgggataggaaacgttgagctggaacacacaatgcaaaaaaaaaagtcacacacaatgcataaacatacatataaatgtatattaagtcgaattgcagcggagataatatcatccacttattttaacgcaatcactggacattttcgcttgcaatttgtttgatcaccgcgccaatgcttgcgctttagcattttcgcaatatttcacaaattgatataatttatatcagtattatcacaaatttttagcacaccttcatattgtcggtctgtttgcacgcaacgcagaaaaaaaaagaaacggcggaggtctgttggctgcgagcgcagggttgaaaaagaccgataggaggaagtagagatgacagatcgaccagctgtaccgccgcatatcgatagttcgtgctcacggcgatatttaataatttctttcgatgtaaaaacgtaccaaaatatgaagtggatttatatatccaaccttcactataacattaaaactgagacataacaaatattaaaaagtaaatgagtttattaaaactatgaagatcactaaattgtttgtattaattaaaattataagaattatgccaaataagtacgaaaataacactcgttattaataatacacgagaatggagataattgcactgattcatcaaacatgctatattgtgcgttctaaatatttatttatgcgactttttaaatacatcttgaaacgaattatatcggtacaatcgatttcataataaacttcaaaaacaatatatatagattttattgaattactgcattcaatatcgtttgcgccaccatccctggtctcacaagcctatcgaaaagccagccctgcgacgttgccacacgtgcgaaaatgtgttttgtttttcgattctttcaaaatatccggtaacgccactgctttgttgcagcacgtgtagtgattacaatttttgttgcccttattattacacttgatttttgacaatatccgagcaaaatgggtaagccgaagaaggccaacgtggcaacgattaaaaatgtgaatctggagaagcagatcaccgagggcagggtggcgaaaaacaagaacaaggataaagtcaaactgcgggccgaggaatcggcggtaagaatccgggtttgaactgcgttttgtgtttttaaacaaattctttcctatttgaacacagaacatcgatgccagaagtagtcaaaagatcctggccgcggccaagctgcagcagttggagctggacgaagagaactttcccagtctggtgaccgtcaagaaagtcaacttcagtttgagtaagtgcgccctaagtttcactatcctaagctaagctaaccaacattacctgtccttacttagatgatggccatgtcaaggaggatgaagaggtcaacgagactgacctcatggccgacctggacatggacgaagacgatgtggccgcgttcgagcgcttccagcagccagcacaggagggcaagcgtacgttgcacctgtccaagatgatcatgcagaagatccaggagaaggaggccgacatacacactaagatctctgacgagggctcactaaagatcgaggaaatcgacccgaaagtgaaggagatgtacgagggcgtgcgcgatgtgttgaaacgctatcgcagtggcaagatccctaaggccttcaagatcatacccaagctgcgcaattgggagcagatcttgttcatcactgagccccataattggagcgctgccgccatgttccaaggcacccgcatcttctgctcggtgctgtcgcaggcaatggcccagaggttctataacctggtgctcctgccacgagttcgtgatgatctctgcgaatataagaagctcaatatgcatctgtacaatgcactgaagagggctctcttcaagccggctgccttcatgaagggaatcattctgccgctgctcgagggcggcgattgcacattgcgcgaggccatcattttcggcagtgtggtggcccgcagctctattcccgtcctgcactcctccgcctgcctgctgaagatctgtgagatggcctattcgggagctaactccatattcatccgttactttctggacaagcggtatgctctgccttatcgcgtcgtggatgccgcagtctttcattttctaaggttggtattctcactacaatgccttttagaaatcgaaataacatggtttcttgcagattcgagaacgacaagcgtgagttaccagtgctatggcaccagagcctgctcacctttgcccagcgatacaagaacgatatatcctccgaacagcgggatgcactgctgcagctgctcaagtaagtaaatcgaatgctattgaaaccctagaactgttagtaactgtaaatcacaattgcagaaagaagagccatttcaagattacacccgatgtgagaagggagctccaggcggccagttgtcgcgatgtggaaatgatggagacggataatggcctggctgggcagccagccaagatgtacacagatgccgatgtggagtacgagggctgaggcggtgtaaattaaggataactttaagatgatattgttttactatttaatatcggatagtcgttaaatatgtaaatatacctacatatgcagtgaaaatcaaatgcagatgtttattctgtgggaaaatgaaagccacttcagatgttttgaatgttttaatagaaaaaacaaatgtgtgtgtttgtgtgtggttttttttttatacaattttgcattaagttttagttgcttttggttttttgcttgacaatgacggtatcttttggcgccgtcgcagtcgcatcggccatattgaccagacgcccgcgttatacattatgtatgtatgtagttttataatctcaattttaaatgtagtaattattaaatataattctgtaaccaaaatctttctaaaagtttcgtttcgtcactttttattagtctctaagtattgtttcgttatctcactccaacatttgtcttgttttgttttgttttgttttattctgttctgtttttcatttgtgttatttaagggcatactccaaggaccgattcgggtcgggatcaatttgaataatttacaataactacactggaccatttgaaattagtttacccaagtacttaggcctcaagccttatcaataatttcgtttcttaaatttgcttacttctgtttttttccgtttttttttttgtgtgttttcaagctgagctttgatttcgaaatacaatttgtaaagagagcgtgggtatgtttgtatataataaccgatcttaaaagcaatatgaatttggaatgccgtcagtgagtaaggatatcgaaagtttttcggggctttaaatacataggcgatgatcgtttgaagcgaaagctaaagccttagacataaactgatatactcgcatgtgggggaagggtacagtgagcattggctatgtgcataccgaatgaagggtccgcaccttacgcccaattcgagaaatgaaagtggcaagtattcatttgctt

SEQ ID NO: 1118 - DNA, 1402 bp, DROSOPHILA
gtaacgccactgctttgttgcagcacgtgtagtgattacaatttttgttgcccttattattacacttgatttttgacaatatccgagcaaaatgggtaagccgaagaaggccaacgtggcaacgattaaaaatgtgaatctggagaagcagatcaccgagggcagggtggcgaaaaacaagaacaaggataaagtcaaactgcgggccgaggaatcggcgaacatcgatgccagaagtagtcaaaagatcctggccgcggccaagctgcagcagttggagctggacgaagagaactttcccagtctggtgaccgtcaagaaagtcaacttcagtttgaatgatggccatgtcaaggaggatgaagaggtcaacgagactgacctcatggccgacctggacatggacgaagacgatgtggccgcgttcgagcgcttccagcagccagcacaggagggcaagcgtacgttgcacctgtccaagatgatcatgcagaagatccaggagaaggaggccgacatacacactaagatctctgacgagggctcactaaagatcgaggaaatcgacccgaaagtgaaggagatgtacgagggcgtgcgcgatgtgttgaaacgctatcgcagtggcaagatccctaaggccttcaagatcatacccaagctgcgcaattgggagcagatcttgttcatcactgagccccataattggagcgctgccgccatgttccaaggcacccgcatcttctgctcggtgctgtcgcaggcaatggcccagaggttctataacctggtgctcctgccacgagttcgtgatgatctctgcgaatataagaagctcaatatgcatctgtacaatgcactgaagagggctctcttcaagccggctgccttcatgaagggaatcattctgccgctgctcgagggcggcgattgcacattgcgcgaggccatcattttcggcagtgtggtggcccgcagctctattcccgtcctgcactcctccgcctgcctgctgaagatctgtgagatggcctattcgggagctaactccatattcatccgttactttctggacaagcggtatgctctgccttatcgcgtcgtggatgccgcagtctttcattttctaagattcgagaacgacaagcgtgagttaccagtgctatggcaccagagcctgctcacctttgcccagcgatacaagaacgatatatcctccgaacagcgggatgcactgctgcagctgctcaaaaagaagagccatttcaagattacacccgatgtgagaagggagctccaggcggccagttgtcgcgatgtggaaatgatggagacggataatggcctggctgggcagccagccaagatgtacacagatgccgatgtggagtacgagggctga

SEQ ID NO: 1119 - protein, 436 aa, DROSOPHILA
MGKPKKANVATIKNVNLEKQITEGRVAKNKNKDKVKLRAEESANIDARSSQKILAAAKLQQLELDEENFPSLVTVKKVNFSLNDGHVKEDEEVNETDLMADLDMDEDDVAAFERFQQPAQEGKRTLHLSKMIMQKIQEKEADIHTKISDEGSLKIEEIDPKVKEMYEGVRDVLKRYRSGKIPKAFKIIPKLRNWEQILFITEPHNWSAAAMFQGTRIFCSVLSQAMAQRFYNLVLLPRVRDDLCEYKKLNMHLYNALKRALFKPAAFMKGIILPLLEGGDCTLREAIIFGSVVARSSIPVLHSSACLLKICEMAYSGANSIFIRYFLDKRYALPYRVVDAAVFHFLRFENDKRELPVLWHQSLLTFAQRYKNDISSEQRDALLQLLKKKSHFKITPDVRRELQAASCRDVEMMETDNGLAGQPAKMYTDADVEYEG

SEQ ID NO: 1120 - DNA, 16105 bp, DROSOPHILA
tgggacgacgccgttgcgtttgtgttaggtggtttattgctggtgcagattgtggtggatgcagatgcagcgagaactcgcgggcctgggaattctgtgtaggatttgtctagagatgtggaatatatatgtaaaaatatcgatatcttatttgtttccctttttataaaaataaatgatatatatatatataagatatcgcgttttttgctaaatatatttttcatatttcttattggtcacactaatatgcaagtgaattcaaataagaaagacgttaataataaaacggaaataaaatgagcacagccagaagttattattctggaataatcgacaacagcgcgacctgcaatgtttgtagcaaatctagttaaatctttatatcttttatcattttaatgattttattaaaaatgatatatcatcgaactgtccagccaaattatcgatgcgtccgttacatcgatagcatcgattgtttgaaaatattgttgggggaattcgtcaaaaagttgttctcacggggaaattacgagaaagtatttacaaaagtatttaataatatatataataaattttagtgtaattaaaattaattaaataaaaaaattaaaatttttttaaatatacagaacagaattaaaaaaacatgtttttcccctaccttctgccgctcatttgtatcgataatcgtttttcaaaatagctgcgaatcttttgcataaaaataaacaatttaattgctgcatatttcggtcgatgtgtgcatacacacatacgcacatacctatatatatatatatacgcatcagtttcgatatgaacttggggcacacacagccagccgtacaattatttactgcaatgtaaataaacaacaaataacaacaaatcgcccgcagaaatcgaacgaagtcgcgaaaaaaaagaggaacgaggaggtttgggctcgtaaccacacaatttcgcctctcactcgatttttgatcgccgcccggacgcgatcttcacttcatacaaattgtgaaatttttgcgaaaatttgaatacactccgttccgaaactcgattgtttttttgcggtccgttcaaaccgaactagtacgtaagccacttattccgtcgcagagccacgcccatgtccgcgaccgcctcaaatcgccagccggtgccaaaatttccggccgccatgccgcgtggaacgggcacagtgtgctccaatccggcggtgcccaagtcgccggatgccctcacctccctggtggcccggaagagcattacgtccatgtcggaggaggagatcattcaggagaatctcaacgagatcctcgacctcaagtcgcgcgtaagtttgaatttgaggcggtgcttttgaaaagtatcttaagaagcgaaatgaagatacaatatcttaaatatgccaaattcgcaagtttagaaacctgaacttaataattaacttttcagtactcaattaaaaatcgaatgactgtgatctttttcattcatctacatatattactgaatcgcttaaaactaaacaaaacttgaacaataaccatatggacattccatgagtgctctcgtttttttttttttttttcaccgtgttgtgattcattggaaacaccttgatttacgtgcacgtcatttacgaatggatcactgtgactttcagattttcctcagcttttccgagatttgcagacgtctctcaaagtttgtacgacgccatcgtttgtggcgccatcattatcgatgggaatcactggaatagaatgtgtgtccgatcataaaatccgaaatgttcgtttagttttcgccttagatctttttgcacatacagtggatgttaagaatgcatttgccatttaatagttaactggaaaatgtacagcaagtgcagaaaatgacactggaagaagcgtgtttccaaattaattgatttgagtttgacatgcatacgcattattttttgaaaatttccaaacctatttaatacaaattgtataaaatcaggcacgcattttgcgatcaacaaataacgaagcgaaatcaacaaaagtcccagatatacacaaaaaaaaaaaaaatgcccaagcgtttttgtgtaaatcacgccattttatgaagtgtaagataatcaaatcggtattgagtttccctttcggaaacttttgtgcaattaaaaacaaattaattggcatccaagttgatttaagcatttttgaaatcttattttcaaaatccaaggcacttaactttttgttatttgcaagaaactatcacttttttctttttgtccagcatagaaatgcacgtagatttctttgcttttacctatttgcacttttttttgccgtgtataagcctctatatgcacggaacgtgaaaattgtaaacaattgtttttatggcatcactcacaaaaacaaaaagagagccaaccctgaaaagccctgaaaaattctcaatccaattttgcaactttgcaaattgattggaattggtgaccccgtttctcatattcccatatatccatgttgtccttttgcaggaggagcgaaaagccaatggacgtctggtggctgtgatcgtctgttttctgggtaagtttttgggatttttgtaatactacagtcaggcctgcctaacacaaaccagccaagtgaaaaatattcacatacataggtataaattcataagtatctctttaataatgcttacatgaaaagatcttttagatttttgagaaaaccattattaaaatcattttcgaattcttaactggtaaacaaaactaaaaactaaactaaattagagcacgcaaatcgaattgccaccgactttcgcatgctcattttgaattggtcgttgttagcgaagcacgactgtagccacgaactcaactcaaatccatttccacagtgctcttcctggccgtctaccatgcctgcgtccggaagtcggagaactcgctggctggcgtcctggtaccggcgggcatcatgctctcttacggcgcctgggtggtcgtcctggccaagagggacaagcacaggcgtgccatgtttgtaggacacaccaaatacgaggaaagccaatgaatgatgctcagcgatgctctttcattttccaggagcggcacatcgaggaggtgacgctaaagaacaaaatcgagctggaggagaagcatgcgcgccacgcgaagaaggcgcaatcgcatcatggtcactccggcaccgattccacgggcagtgcctccagttcgctgcactacgtcaacgagctgctgcccaacggtggcggtgagcaccgcaagaagcagcgacgccatcgtcacaaggagcgctccgtggagcgagatgatcatcatcaacgtagccatcagcgctcgcatacgccggacattggcgtgcatcgtggagcgcccaagaggcccagtttccggcagaagctcttcggtcagaccatcgcccatgtcaaactggtggaggcgcagagcgatagcacggattcagctggcgcatctggtccgggtacgagatcaggtcgcagtacggtcgccagtccaggtggccaggccagtgctgcggccaagctcaatcccggcgagaaacgacagcgactacagcgcctggacacgttgccactggcgcaggtggtgcgtgtcagctcgattccgtgagatataaccatctggatggatgtacatatgcatgtggaagtggagtagttctttcttttttttttttttttgggggggggggggcggaggcccgacctcgccattgtgtcgactaaataaatgtattataaaaaatataaacaggaaattcgcctttataaatagacggcaatcaaaaggaaggaaatgttccgatcttcgtaacgaaatcaatgctaaatacgtgagaattgtattgtgcacatagttcagcccatctggcttttgaatattttcaaaatcgtgtgtttacaacttgatttaagtgagttgtaaaactaatagttatggaatagtttagttcgagattttttggcgaggtgttttcaagttgaaattcaagtattgtaattattgattttcgatcaagctgatggctttctttttgtaacgcttaatttagacaatagtttttgaaccgcttgtcgttttcgcaccaccatattgtttattctgcctacttccttacgttaaaatgtttggttttttctctgattttttttttttgctttacatgtacatcagcggtgcatttccattgtttgtccgaattaatggtggcgttatttttaacgatcagcactataactagattttcggctaccctgtgctcgtgtgcgtgcccagaaacgaggatgggtgggtggcaattccgggcacattgttttcggtcattgattattgttattacaatttaatagtttacatgtggtgggccacactcggtcgctattggccatcggattttggaattccccgccaaaatagaagccacttggttgcttgtttacttggcaggaaattcgcattgtagaccagtgccgccatctatgtgtgagattggggtaaacacaaaaggcggtttcaattatggaatttgcttagtttttcagcatagcgggattcaactagtttttccatacttggaaaattacattagataatatatattaattacatattaatatattaattgataatttcaattgaaaatatcactatatactttggatactttggtattaaagcaacaggttattgcagttggagccgttccactaaggcaggaaagcagttcgtaacaaagtagattgaattatttatcaaatttcatgtgaaacatttgtttcttgaattatgcaatatgccatggtggaaacacaagccacttctttcgcacagatatcgatagcagaaacgcatctagtggacgcggcctggcttgcagctggaaagtatcgatcgcccgataacaatacccgagcgcacctcgcatggcgtcgcgctgcggcatttgaattaaacgacgcgccgccgaaacgagaagttgttgcattttttcgtatctagttacctatgttttcgtttgtggaactgtcaaaattgtttgttgccctgcggacttcagtttagtcattaaattttcattgctcgttcggagcagttgtgcttctggttggaaaatacaaaaaaaaaaacaaatattcggttttcgtgagcatttgtgctaaatatattttttgtttaattgcgttttcgatcgaaacccgtttgtttcgcgtacattgttttgtgtgctgtgccgtgttctggaaaacatccgttactggatgccaacaatgatagtgtgattagtctacgcagacattgagcatacatatacgggcgcacacacacccataaaaacgcacaaaaattcgcaatggacacgcgcagctggcgcaaggtcctactccagtgggtatgtaaatctcgcattgcgcatcacgcactgggaatcatttagattaacccaattctgcggcagattggcgagtgccacttcatcgaatcgaactacattaccttggagcagtcggatctggactccttcttttcggtcttcattcaaaagatccaggagacggaaaatgttaaggggaagaatgagctgcaggatcagcccacagaacaaagcccccttgtgcaggaattcctagcacgtaagtttttttttacctattttcctagtttctcatagggtatagggaaacattaataaatagtgaagccttagtatgagaatttagcgcacttccaacttcatgaacccactaacttgtaaattttcccatgcagataactatcccgagttcattgcacaacaggatgacaaggaagtcgatctgcctttggattgcctttacgtttacacgctcctgttgcattactcgtgcgttaagaagcccagcttgttctttcacaacatctgcaataaactgccggagctgacacagacatgcatcgcatccttctttcgagagaccgtggacaggctgttgacgcgcgaatatcttagccaggcgatcgccaacgttgcagttgtttaccgacaaggggtttcgacctcagtcagcccatgtcttcccagcagcagcctgagtcccgatccgaggagcgatgatgcaccatgcccatccacgccctcatcgtcatcgtcacagccgtcgagcagcacgccacagttgcgcaatcatcgcgaacaacttcgcctgaatggctgcgaaatgccacctccttcgaccccgaaaacggagctactggagcaacgcaccaaggagctgcgcggtattcgtacccagctggaggtggtgcgctacgaaaaggccttgctggaggagcagcaaatggagaaggacgagctcattaaagttctcaacaaaggttagaatgcttcgaatgcattactttcataatttttttacaagtaatttcataatcgtttgcatttcagagaaaatgatggccaagatggaactagaaaaactaagaaacgtgaagctaaccgaagagcaccacgataacgagagccaccacattatgccatatgagtttgagcatgtaggtagactagcgcagatggtcacaggtagcgagcgggagctataaactaataaaacttttaatcctcatttcagatgaagggatgccttttaaaggaaatcggtctaaaggagagtctcatcgctgagattaccgataagctgcatgatttgcgtgtcgaaaattccgagctgtccgagaaggtaagctacctgttcaattttatagggactatactataaagaaaattccaccgggtcttgtgcgaatgttagcgaaaaactagcaactgtatagattatattcgtttacattcaattcataatgaaatctaatatatgttatatcttgcattcattaaatagctgaatctggcaggaaaacgattgctggagtatacggaccgcattcgattccttgaaagtcgtgtagacgacttgactcgtatcgtatcgtccagggacgttatgatctcctctctggagtccgataaacaggaattggataagtgccttaaagaagcccgcgacgacttgcacaaccgaatcgaggtcttaaacgcatcctcggatttactcgactgttcgctgtcgccgaacaccacgcccgagaatttggccagttccgtgattgacaaacagttgcgcgagaaggagcatgagaatgccgagctaaaggagaagctgctgaatctgaacaattcccagcgggagctatgtcaggccctttcaagtttccttcagaagcacaatatcgatcacgagtttccggtagaatggacatcgtcgtccctgttgtccaccatttctgcgatcgaaagtaaatttgttaacacgttggagaagagtacgcaaatgaagaaggaatgcgacgttcagtctgtgtgcgtcgaaaaactactggagaaatgcaagctgttatctgtatcgctgggatgccagccaaaagagctagatggattcgaggccacaataccggaggcaatggagtcgggtttcgaatcgagccgtgagtgtgaaaccattttgagttgttgtcatatgaaggtagtcgatatagcatcgaaaaacaacgacctggagttagacaacgaaaggcttaatgataaatgcgctgagcttaaatcaataattgatcgcggggatcaacatttggccgatatcaatctgcagctaatcgagaaggaaaagcagataaaagatgtgggcgctgaaattcaggagctgcgcaaaaggaatataaaccttgaaaatatgctcagccaaattgcagataaagaggccagtgcggcaagccatgcacagcatttgaagcagtgcggtgagcttttaagagccaagtatgaagtgtgtcgaaatgaactaattgctaagaacgcggcccaagatgagttggtccggatgatgatggtgccagatggggagaccttaaatgggcgcgtacgccaactgatcgatctggagatgatgcatgatgaacataacaagatgtatgcacagatgctgaagcaattaaatgaactcagcgctaaacatgacaacatgacgcattcccatctagactttgtaaagagaacggagatcgaattggaaacgaagaatgcacagatcatggcattcgatgagcataacaatcattttgatcgttttctgacccgcatctttacactcttaagaagtagaaattgtccgaaatccacgaccatgggctcagcgaccaactttctggaatcgatgcatattgaaaagcggtttgagaatattgaaatgttaattgaggggcaattgctttcggctgatgatctcaagcgggagttggatgatcttcggtcgaaaaatgaggagctcgctaagcagaacatcaatggaataataaaacgcaataaattcatcacttctctagaggtcaacaccgaaaaagtgaagcaatacataacagatctagaggaagaagctttcaagagaaagcaaaaggtagtccagctggaaaatactctaagcaaggagcaaagcaatgcgaaagaaatggcacagaggttagacatagcacagcaggaaataaaggactaccatgtggaagccattaggtttatcaataccattagggatcgccttcagcaagatttcaatggcgtaaacaccccacagcagctgggcacttgtatgaccgaatttttaaaaatgtatgaccagatggaggtgcgatacgaggagtcctcgtcgttggtagaaaagctcacggaatctcaagcaaaattggagatgcaagtggctgagctacaggtagagctagaaaataaggataccaaccagcattcgggtgccttgataaaacagctaaacgacaccatccaaaacctagagaaggtcaacgcaaagttaagcgaggacaacactgtatcgcataccgtgcattcaaagttgaatgagagtttgttaaaagcgcaaaaagagttagaccttcgtgcgaaaataatcgaaaatctggaggcttcggaaaggaacctctccatgaagttgtgcgagctgaaagatctgaaaaacaaactgaagtcatctgatgaaaaaattgcccagataaaggaaacgtatgaagaacagattaaagctcttcaagctaaatgtgacatggaggctaagaaaaacgagcacttggagagaaatcaaaatcaaagcttaacacagctcaaagaggacgcacttgaaaattgtgtacttatgtcgacaaaactagaggaactgcaggcaaagctgcaggaaggacagcagcttgtagatagccagaagctggagctggacatgaaccggaaagaactggctctggttaagtctgcctatgaggcacagaccaagctatcagatgatttgcagcgtcaaaaggaatccggccagcagcttgtagataacctgaaagtggagctggagaaggagcggaaagaactggctcatgttaactctgccattggggcacagaccaagctatcagatgatttggagtgtcaaaaggaatccggccagcagcttgtagataacctgaaagtggagctggagaaggaacggaaagaactggctcaggttaagtctgtcattgaggcacagaccaaactatcagatgatttgcagcgtgaaaaggaatctgcccagcagcttgtagataacctgaaagtggagttggacaaggagcggaaagaactggctcaggttaattcggcctttgaggcacagaccaaactatcagatgatttgcagcgtcaaaaggaatctgcccagcagcttgtagataacctgaaagtggagttggacaaggagcggaaagaactggctcaggttaattcggcctttgaggcacagaccaaactatcagatgatttgcagcgtgaaaaggaatctgcccagcagcttgtagataacctgaaagtggagttggacaaggagcggaaagaactggctcaggttaagtctgccattggggcacagaccaagctatcagatgatttggagtgtcaaaaggaatccgtccagcagcttgtagataacctgaaagtggagctggagaaggaacggaaagaactggctaaggttaattcggccttcgaggcacagaccaaactatcagatgacttgaagcttcaaaaggaagatgcacagcgagaggttttcctggtcaaggagcgattggtgaaggaaaagcgtgagttcgaggtgaaattggccacccttgaagacataatcgaaacattggagatgcgctgtactcagatggaagaggagcgtgcgactgcttacgaacagatcaataagttggagaaccgttgccaagaaaaagacaacgtcaagtcaagtcaattgcaagtggaaacttttaaggtcgagtgcttgcatcatcagctaaaatccgagatggctacccacaactcgttggtagaagatcttaaccgaaagctggcagagaaagtcagtaagttggatttcgttcagagtcgcctaatgactgaaatcgccgagcataaccaggtcaaggaccaactagcccagatcaccgatatacctaaggtagtcgaactgcagcatcgcttggaagcggagactgccgagcgtgaagaggcccagaataaactggctgtggtcaccggacgtttagacgaaattacccgggagttggacaacgctcggctcgagcatggcgcccagatactaaggatggaggagacggctcgtgaagttgggaataaaaatgccgagttgtgtgaactcatcgaattctataggaatcgcgtggaagctcttgaacggctgcttctcgcttccaaccaagagttggaagaactaaattccatccagtctaaccaggcggagggcgtaagagatcttggcgacacatatagcgcggctgaaggacgccaaacggagtcggatcaggataaggagagataccaaaagctagcgctagactgcaagatattgcaggccaagtatcgcgatgccaaggatgagattaagcgctgcgagaagaagataaaggaccagcgtcttgagatggagggaaagctggagaagatgaaaaacaagatggtaagtcgctgcgaactactagaacgagattccaaaaacggaaaactactggtttccattaaatggcatggtcgcgagttgtcactgttatccttaatcgcatgatttgtgccaccaagtacaaattggtgtctccattttttacttggctgtctgcggaggacaaaacctaaagatgtcatcctattttagcaccatgccattttttttttgcttttgcttttgcatgtttatgtcattgtttcgtttaactactaactagttttgaaatgggacgtagctgatgttatatgttcagtgtaaactattaaacttaagctcctcgaaatgactcacagtgcattatcaggtattcaaactatatgtatagtgaattttcaatcttatccgtttgaaaatgcgaaaatgcatacgtttcagaaggaggagatgttatacataagtttaattaaaatttcatttagcaattgcatcaatcacatcaatcacattagccataatcgtgctgcatcatcaattactgaacccaagcagattctagttagatttccaaatttgctttagcgattgcagctaactagatttatttaattcacttttccttatcaataaaactaaaaatgctttatctttcctttctatttccacccaatatctttccacgaaaatcacccatttaaaatcacaattgcggtcggtccgaaaactgtatatataacccaagaaggggtcacgccgtcggcgatggccgcaattaatgctgctttttattggcctaattattttaatcgttttttttttgtattacatcctgtacataagtggcatcaatgtaatctttaagtcgcgcagtcctatcgtgtattagggccacacatgacgtggtagactttgttataagttttttacattttgtgatatgtactaagtcatatttgataaatgagcgatttgtatttccaagaatgttttttttgttgtttttttattattattgtttgtattgtcgtcaatgtcctcactgctgtttctcgctcattttcgtcctttaaaaatgcgtgccgcccgaaatccacacgcgcaccttcacttgactatatacactgccctaactcgtccacgttcacccacacgcacacggacacttgacacaacatcatccatctgtagcgttccttgtatacggcggaggtgacgcgcatgaaggagaagcaggaacgggatgcggccaaaagcgcgtcggagctggaggcactcaccgcacaggtagatagatatgctcgctgcttgcgaagttacgttattaattccatttacttgcagaatgccaaatacgaagagcatacacgcaagctatccaatcagattgtacggttgaacgagaagattctggagcagcagaagcagcatgcgatcattagcaccaatctgcgtcacctgcagatgcagcccatcagcgaaacgaaaccatccagcacaacgctcaccgtttcgtccagttcgtcggcgccgaacgatgactggcagcccttcaagcggcccaatgtaccgtcctccaatctggctatggaagatgaagagggcgaggtatttaacaacacttacctgacggatctcaaattgggccgtgtgccggcagacatgacgtaagcgcactgggtcttcccgatttctatgctcaaaattaatgtaccctttttttctccatgcagagccgaggagctgatttatcggaattcgttgcaaccgccgcatttgaagagcacttatgctgcccaatatgatttgggcagccaggacgaagatctcaaagtaagcgttagcagttctccgacatccagtgccagatacgccggcagtagtggcagcagcagcagcagcagcaacagcaacagacacggcacaaataccacaccgttaaaggcacagcaggcagccatgaaggctaagtgggcacgcattttgcgtcgcccatagaaccattaatcttaatccctaactagacaccgagtgagcttttgtccacgttacgtttgtagttagaagtgtctgttgtgtctagaaattgctgtgtgctcgtcttatcagtgccttgttgtatatatatttttgtgtcacaataatccagttgccgtccaaaaatttcgttgtcttcagttctgcaattcttatttatactgtttgtattctttgcaggacggaccccacagtctggatgacagcatgagtgctttgctgagctcttcgagcaccggaacgcgcaagaaatccatgggcacccactacaaacgacctggaccgcccacgccgagcaagaacggcggccgtttgtcattcggtagctcggagccgccacgcgagattttgcgtgaattcggcgaccataacaatacctccaagacgccggcgcgcttcaagttcctgacgcagcgattcagcgttggcagcagcggtttaccccgggacgaggtaagtattgggaagattgttatgtttgatgtgcgtgccatagttcagtgtcattggtcaatagagtagtcaaaagctgtagtttattgggaacgtcaaatgtgccatagttgcttgctttcgtgcttcgtccatgtttgtgtcttcgtcctcgtggtgttctcgtgttgtcttcgcttgtggctcgagtgcagccggcaactgaccaaatacgcctagcctatcccacagctgccgcggcgcaagcggccgaatcttctgaccggaatacaccggcgtaggctgcgccatgcggtggacatattttgtacatcaacgccacgcaaaagccgctcctactacgatcagcagcgtatgatcggcgccagtgatgcggacaaatcagaggctgttgaaaccgaagacgaagtgatcgaagtggagcccgatgctgtgccagagttggagcctctagaagacgccgaccaacagggcactccgcatctgtccactgcagcattgctggccctgaccaaaggcaatacccggcgtctcactggcacaactaagtcgaaaaaaggacgcgtttcgctgtcccttcatggcaacatttttgccaagagccggccagcgtcgttcgtagccgggaaaagggtgcagctacgccggaagttgcgccgtgatcggataatgggacgcttcgatgaggcccgtcacctggatcagatgcgcctatcacactctgctcaggcggccaagtcgcccgaaaataacaattacagtctacacaatcgcaacgaggaggagcacctgcccagcgagaataacgtgatgggcaagacggtagtgctggtgggcaagaggcgattgagtccggtcgtgtccaccacattcaacgtggaggagcgcagcgagacttcgctgctgcagcaacaatttgagcacgaaaactgtgtcacctgggcaatgcatggtggcgaaagtgtgatgatggaggagacccagaacgactggtacttcgagcagctgtgcaaggagacggaatccacggcaccctttcagctgcagccgctggactacaagccgcttgatgaggagcaagttgagccgaaattcacacaactggtggccgcctcttgcagtaatatcactacgactagctgtgccaccaacatgaccggcgcctcatcttgtacagtctattcgatcggcagtgtgcacatgcagccgctgccgcagatcaatatcacctatgtccagcaaccatcggacttgcaacagcgcaggccaacgcgccaccgctcgttaatggctcagtgcaggcggttcctacgccatctgagtcttggccagcgattggtcatgggctttgcattgctggtcatggtggggctgtccttgcatctggcggacaagctagtgctggtgatcactggcatcttgtcgggaatggggctcgtctttctcacctattcgtgccccggacgcaattagaagcggcaacgaaagcaatgggaaacgcacaaatcttgctgatgatctatgatgatgatatatgtatgttcgttatgtgtaatcatgttcacttattcctttacagaactcgccgcccaagcgacgcctcagcaacatgttcaagcgcaagtaggcgtggtcgcagtcgcagtattatacatatattcccccattcgtgtacatcaatcggaacttgaattcttgacttattatttatgtaaccattttttttttttttgtacatcaggacttagagagtttagtttaagtatgcatatgttgcagtggtacaatatcgtgggcgaacataataatgcaaataaaattgtctgtacatattctagaaatgcttactttgttttttttctttctatcgtatactcttacgagaaatcactgagcgaaaaaaagtgtaatttgatcgcttactcgatcagccagcgaaacgttcgatttatcttggttttctgttctatattgttaggcagaaaaacctgaaaggttttggcttgaatttcatatatataatataaaaagagatatccaccaagatgcttaagaaattacacaatgatcggaattgtcacagccagcaacttggttatccacattggaagagggggcgtgaccagctgtgtgactgcgagtggccagaaaaaagaagttcaagaaaacctgctccaaacgaggtgagcaggaggctcgctccaccgactgaccagctgacttatccaccgactaaccgactaaacgaccgactagcctgcgagaaatcggtgactgtttatgatgcaatggcaaggttagagcgaaaaacatatttttgtttatcgcgtttagtaaaaggccacttattgtaaatgctgagtaaacaacaaatatctagaatagtgaaaatacgaagaatatttgcataatagccaggaatttgaaataacaattagttggcttcaaaagatttggttgtaagtttcaaaaa

SEQ ID NO: 1121 - DNA, 6492 bp, DROSOPHILA
gacgcgatcttcacttcatacaaattgtgaaatttttgcgaaaatttgaatacactccgttccgaaactcgattgtttttttgcggtccgttcaaaccgaactagtacgtaagccacttattccgtcgcagagccacgcccatgtccgcgaccgcctcaaatcgccagccggtgccaaaatttccggccgccatgccgcgtggaacgggcacagtgtgctccaatccggcggtgcccaagtcgccggatgccctcacctccctggtggcccggaagagcattacgtccatgtcggaggaggagatcattcaggagaatctcaacgagatcctcgacctcaagtcgcgcgaggagcgaaaagccaatggacgtctggtggctgtgatcgtctgttttctggtgctcttcctggccgtctaccatgcctgcgtccggaagtcggagaactcgctggctggcgtcctggtaccggcgggcatcatgctctcttacggcgcctgggtggtcgtcctggccaagagggacaagcacaggcgtgccatgtttgagcggcacatcgaggaggtgacgctaaagaacaaaatcgagctggaggagaagcatgcgcgccacgcgaagaaggcgcaatcgcatcatggtcactccggcaccgattccacgggcagtgcctccagttcgctgcactacgtcaacgagctgctgcccaacggtggcggtgagcaccgcaagaagcagcgacgccatcgtcacaaggagcgctccgtggagcgagatgatcatcatcaacgtagccatcagcgctcgcatacgccggacattggcgtgcatcgtggagcgcccaagaggcccagtttccggcagaagctcttcggtcagaccatcgcccatgtcaaactggtggaggcgcagagcgatagcacggattcagctggcgcatctggtccgggtacgagatcaggtcgcagtacggtcgccagtccaggtggccaggccagtgctgcggccaagctcaatcccggcgagaaacgacagcgactacagcgcctggacacgttgccactggcgcaggtgattggcgagtgccacttcatcgaatcgaactacattaccttggagcagtcggatctggactccttcttttcggtcttcattcaaaagatccaggagacggaaaatgttaaggggaagaatgagctgcaggatcagcccacagaacaaagcccccttgtgcaggaattcctagcacataactatcccgagttcattgcacaacaggatgacaaggaagtcgatctgcctttggattgcctttacgtttacacgctcctgttgcattactcgtgcgttaagaagcccagcttgttctttcacaacatctgcaataaactgccggagctgacacagacatgcatcgcatccttctttcgagagaccgtggacaggctgttgacgcgcgaatatcttagccaggcgatcgccaacgttgcagttgtttaccgacaaggggtttcgacctcagtcagcccatgtcttcccagcagcagcctgagtcccgatccgaggagcgatgatgcaccatgcccatccacgccctcatcgtcatcgtcacagccgtcgagcagcacgccacagttgcgcaatcatcgcgaacaacttcgcctgaatggctgcgaaatgccacctccttcgaccccgaaaacggagctactggagcaacgcaccaaggagctgcgcggtattcgtacccagctggaggtggtgcgctacgaaaaggccttgctggaggagcagcaaatggagaaggacgagctcattaaagttctcaacaaagagaaaatgatggccaagatggaactagaaaaactaagaaacgtgaagctaaccgaagagcaccacgataacgagagccaccacattatgccatatgagtttgagcatatgaagggatgccttttaaaggaaatcggtctaaaggagagtctcatcgctgagattaccgataagctgcatgatttgcgtgtcgaaaattccgagctgtccgagaagctgaatctggcaggaaaacgattgctggagtatacggaccgcattcgattccttgaaagtcgtgtagacgacttgactcgtatcgtatcgtccagggacgttatgatctcctctctggagtccgataaacaggaattggataagtgccttaaagaagcccgcgacgacttgcacaaccgaatcgaggtcttaaacgcatcctcggatttactcgactgttcgctgtcgccgaacaccacgcccgagaatttggccagttccgtgattgacaaacagttgcgcgagaaggagcatgagaatgccgagctaaaggagaagctgctgaatctgaacaattcccagcgggagctatgtcaggccctttcaagtttccttcagaagcacaatatcgatcacgagtttccggtagaatggacatcgtcgtccctgttgtccaccatttctgcgatcgaaagtaaatttgttaacacgttggagaagagtacgcaaatgaagaaggaatgcgacgttcagtctgtgtgcgtcgaaaaactactggagaaatgcaagctgttatctgtatcgctgggatgccagccaaaagagctagatggattcgaggccacaataccggaggcaatggagtcgggtttcgaatcgagccgtgagtgtgaaaccattttgagttgttgtcatatgaaggtagtcgatatagcatcgaaaaacaacgacctggagttagacaacgaaaggcttaatgataaatgcgctgagcttaaatcaataattgatcgcggggatcaacatttggccgatatcaatctgcagctaatcgagaaggaaaagcagataaaagatgtgggcgctgaaattcaggagctgcgcaaaaggaatataaaccttgaaaatatgctcagccaaattgcagataaagaggccagtgcggcaagccatgcacagcatttgaagcagtgcggtgagcttttaagagccaagtatgaagtgtgtcgaaatgaactaattgctaagaacgcggcccaagatgagttggtccggatgatgatggtgccagatggggagaccttaaatgggcgcgtacgccaactgatcgatctggagatgatgcatgatgaacataacaagatgtatgcacagatgctgaagcaattaaatgaactcagcgctaaacatgacaacatgacgcattcccatctagactttgtaaagagaacggagatcgaattggaaacgaagaatgcacagatcatggcattcgatgagcataacaatcattttgatcgttttctgacccgcatctttacactcttaagaagtagaaattgtccgaaatccacgaccatgggctcagcgaccaactttctggaatcgatgcatattgaaaagcggtttgagaatattgaaatgttaattgaggggcaattgctttcggctgatgatctcaagcgggagttggatgatcttcggtcgaaaaatgaggagctcgctaagcagaacatcaatggaataataaaacgcaataaattcatcacttctctagaggtcaacaccgaaaaagtgaagcaatacataacagatctagaggaagaagctttcaagagaaagcaaaaggtagtccagctggaaaatactctaagcaaggagcaaagcaatgcgaaagaaatggcacagaggttagacatagcacagcaggaaataaaggactaccatgtggaagccattaggtttatcaataccattagggatcgccttcagcaagatttcaatggcgtaaacaccccacagcagctgggcacttgtatgaccgaatttttaaaaatgtatgaccagatggaggtgcgatacgaggagtcctcgtcgttggtagaaaagctcacggaatctcaagcaaaattggagatgcaagtggctgagctacaggtagagctagaaaataaggataccaaccagcattcgggtgccttgataaaacagctaaacgacaccatccaaaacctagagaaggtcaacgcaaagttaagcgaggacaacactgtatcgcataccgtgcattcaaagttgaatgagagtttgttaaaagcgcaaaaagagttagaccttcgtgcgaaaataatcgaaaatctggaggcttcggaaaggaacctctccatgaagttgtgcgagctgaaagatctgaaaaacaaactgaagtcatctgatgaaaaaattgcccagataaaggaaacgtatgaagaacagattaaagctcttcaagctaaatgtgacatggaggctaagaaaaacgagcacttggagagaaatcaaaatcaaagcttaacacagctcaaagaggacgcacttgaaaattgtgtacttatgtcgacaaaactagaggaactgcaggcaaagctgcaggaaggacagcagcttgtagatagccagaagctggagctggacatgaaccggaaagaactggctctggttaagtctgcctatgaggcacagaccaagctatcagatgatttgcagcgtcaaaaggaatccggccagcagcttgtagataacctgaaagtggagctggagaaggagcggaaagaactggctcatgttaactctgccattggggcacagaccaagctatcagatgatttggagtgtcaaaaggaatccggccagcagcttgtagataacctgaaagtggagctggagaaggaacggaaagaactggctcaggttaagtctgtcattgaggcacagaccaaactatcagatgatttgcagcgtgaaaaggaatctgcccagcagcttgtagataacctgaaagtggagttggacaaggagcggaaagaactggctcagcgttccttgtatacggcggaggtgacgcgcatgaaggagaagcaggaacgggatgcggccaaaagcgcgtcggagctggaggcactcaccgcacaggacggaccccacagtctggatgacagcatgagtgctttgctgagctcttcgagcaccggaacgcgcaagaaatccatgggcacccactacaaacgacctggaccgcccacgccgagcaagaacggcggccgtttgtcattcggtagctcggagccgccacgcgagattttgcgtgaattcggcgaccataacaatacctccaagacgccggcgcgcttcaagttcctgacgcagcgattcagcgttggcagcagcggtttaccccgggacgagctgccgcggcgcaagcggccgaatcttctgaccggaatacaccggcgtaggctgcgccatgcggtggacatattttgtacatcaacgccacgcaaaagccgctcctactacgatcagcagcgtatgatcggcgccagtgatgcggacaaatcagaggctgttgaaaccgaagacgaagtgatcgaagtggagcccgatgctgtgccagagttggagcctctagaagacgccgaccaacagggcactccgcatctgtccactgcagcattgctggccctgaccaaaggcaatacccggcgtctcactggcacaactaagtcgaaaaaaggacgcgtttcgctgtcccttcatggcaacatttttgccaagagccggccagcgtcgttcgtagccgggaaaagggtgcagctacgccggaagttgcgccgtgatcggataatgggacgcttcgatgaggcccgtcacctggatcagatgcgcctatcacactctgctcaggcggccaagtcgcccgaaaataacaattacagtctacacaatcgcaacgaggaggagcacctgcccagcgagaataacgtgatgggcaagacggtagtgctggtgggcaagaggcgattgagtccggtcgtgtccaccacattcaacgtggaggagcgcagcgagacttcgctgctgcagcaacaatttgagcacgaaaactgtgtcacctgggcaatgcatggtggcgaaagtgtgatgatggaggagacccagaacgactggtacttcgagcagctgtgcaaggagacggaatccacggcaccctttcagctgcagccgctggactacaagccgcttgatgaggagcaagttgagccgaaattcacacaactggtggccgcctcttgcagtaatatcactacgactagctgtgccaccaacatgaccggcgcctcatcttgtacagtctattcgatcggcagtgtgcacatgcagccgctgccgcagatcaatatcacctatgtccagcaaccatcggacttgcaacagcgcaggccaacgcgccaccgctcgttaatggctcagtgcaggcggttcctacgccatctgagtcttggccagcgattggtcatgggctttgcattgctggtcatggtggggctgtccttgcatctggcggacaagctagtgctggtgatcactggcatcttgtcgggaatggggctcgtctttctcacctattcgtgccccggacgcaattag

SEQ ID NO: 1122 - protein, 2116 aa, DROSOPHILA
MSATASNRQPVPKFPAAMPRGTGTVCSNPAVPKSPDALTSLVARKSITSMSEEEIIQENLNEILDLKSREERKANGRLVAVIVCFLVLFLAVYHACVRKSENSLAGVLVPAGIMLSYGAWVVVLAKRDKHRRAMFERHIEEVTLKNKIELEEKHARHAKKAQSHHGHSGTDSTGSASSSLHYVNELLPNGGGEHRKKQRRHRHKERSVERDDHHQRSHQRSHTPDIGVHRGAPKRPSFRQKLFGQTIAHVKLVEAQSDSTDSAGASGPGTRSGRSTVASPGGQASAAAKLNPGEKRQRLQRLDTLPLAQVIGECHFIESNYITLEQSDLDSFFSVFIQKIQETENVKGKNELQDQPTEQSPLVQEFLAHNYPEFIAQQDDKEVDLPLDCLYVYTLLLHYSCVKKPSLFFHNICNKLPELTQTCIASFFRETVDRLLTREYLSQAIANVAVVYRQGVSTSVSPCLPSSSLSPDPRSDDAPCPSTPSSSSSQPSSSTPQLRNHREQLRLNGCEMPPPSTPKTELLEQRTKELRGIRTQLEVVRYEKALLEEQQMEKDELIKVLNKEKMMAKMELEKLRNVKLTEEHHDNESHHIMPYEFEHMKGCLLKEIGLKESLIAEITDKLHDLRVENSELSEKLNLAGKRLLEYTDRIRFLESRVDDLTRIVSSRDVMISSLESDKQELDKCLKEARDDLHNRIEVLNASSDLLDCSLSPNTTPENLASSVIDKQLREKEHENAELKEKLLNLNNSQRELCQALSSFLQKHNIDHEFPVEWTSSSLLSTISAIESKFVNTLEKSTQMKKECDVQSVCVEKLLEKCKLLSVSLGCQPKELDGFEATIPEAMESGFESSRECETILSCCHMKVVDIASKNNDLELDNERLNDKCAELKSIIDRGDQHLADINLQLIEKEKQIKDVGAEIQELRKRNINLENMLSQIADKEASAASHAQHLKQCGELLRAKYEVCRNELIAKNAAQDELVRMMMVPDGETLNGRVRQLIDLEMMHDEHNKMYAQMLKQLNELSAKHDNMTHSHLDFVKRTEIELETKNAQIMAFDEHNNHFDRFLTRIFTLLRSRNCPKSTTMGSATNFLESMHIEKRFENIEMLIEGQLLSADDLKRELDDLRSKNEELAKQNINGIIKRNKFITSLEVNTEKVKQYITDLEEEAFKRKQKVVQLENTLSKEQSNAKEMAQRLDIAQQEIKDYHVEAIRFINTIRDRLQQDFNGVNTPQQLGTCMTEFLKMYDQMEVRYEESSSLVEKLTESQAKLEMQVAELQVELENKDTNQHSGALIKQLNDTIQNLEKVNAKLSEDNTVSHTVHSKLNESLLKAQKELDLRAKIIENLEASERNLSMKLCELKDLKNKLKSSDEKIAQIKETYEEQIKALQAKCDMEAKKNEHLERNQNQSLTQLKEDALENCVLMSTKLEELQAKLQEGQQLVDSQKLELDMNRKELALVKSAYEAQTKLSDDLQRQKESGQQLVDNLKVELEKERKELAHVNSAIGAQTKLSDDLECQKESGQQLVDNLKVELEKERKELAQVKSVIEAQTKLSDDLQREKESAQQLVDNLKVELDKERKELAQRSLYTAEVTRMKEKQERDAAKSASELEALTAQDGPHSLDDSMSALLSSSSTGTRKKSMGTHYKRPGPPTPSKNGGRLSFGSSEPPREILREFGDHNNTSKTPARFKFLTQRFSVGSSGLPRDELPRRKRPNLLTGIHRRRLRHAVDIFCTSTPRKSRSYYDQQRMIGASDADKSEAVETEDEVIEVEPDAVPELEPLEDADQQGTPHLSTAALLALTKGNTRRLTGTTKSKKGRVSLSLHGNIFAKSRPASFVAGKRVQLRRKLRRDRIMGRFDEARHLDQMRLSHSAQAAKSPENNNYSLHNRNEEEHLPSENNVMGKTVVLVGKRRLSPVVSTTFNVEERSETSLLQQQFEHENCVTWAMHGGESVMMEETQNDWYFEQLCKETESTAPFQLQPLDYKPLDEEQVEPKFTQLVAASCSNITTTSCATNMTGASSCTVYSIGSVHMQPLPQINITYVQQPSDLQQRRPTRHRSLMAQCRRFLRHLSLGQRLVMGFALLVMVGLSLHLADKLVLVITGILSGMGLVFLTYSCPGRN

SEQ ID NO: 1123 - DNA, 3161 bp, DROSOPHILA
tcttccccgatttctgtttatatacatgtttcttttgtatgttgcatagtttttatgattattttttgtttagctgtatgaatttgtattcgaagggaggtccagacactaattcggaattcactttgaatatgcattgctgtattttccacatctaaatactatataactgatctatctgtctatataactacgaaagctgatattcgattgatttaagcgtttaagaagcaaatgaattgttctccctggtttctcttatcaatgtattctcctctgtgtttcttttttacaattggtgtgaaatatgcaaatgattccaattatatatatatataaatgtatctttagaacaattaaaatggtttattctgtttttttttttactattcgtttgaattgaaaatgcattttgaaaatgtttatttgttagaacttgtttgtttatgctttaattttaaatttaaatagtaaacaaaaaaaaaaaataactggtgcaggcaaaaaaaaaatataaagcaaagaataggaagaatgaaagtaatataataaatttatataggtatatactggcacacatatgtattctgtacaaatcgaaatgctaattggtatatcaaaattaaactacagatccttcaaatagggacaaactgctgtgcattgaccacaaaactctgtactcaaaatgtgtacacaaattacgattaatcccaaggctctgtaacttgatttttccaacttctttatatatacttatattatgatgatcatgattgattggtaatatgatgatgttgataataatggaactagatcgaaacgaagtgtggtatgaattattaatgtttaataagcctaaaataaaaatcaaatcaaatgcgtatgagaaaatacagaacttatgtaaaaatataaaagctaattgttttaattacacgggaccgtgttttgctggtgaccaattctgggcaggcaatagtactatagttcttggtttctacagtacaacactttgtctgtagagtgcctcgaattcttcgtcgtcttcagtctcactaacatcttcaccagcaaatgctgcagccagtttatagtacacatcatgtgaatcatctaagtcctccgcaactgcgttggaggatgttcctggtttggttacaggcacctgctcttcgtgctcttcctcgaattcctcaccttgatagatgaaaatgaatatatgaaattgtcgatttacacatgaaaacatactgctgtcgatggcttcatatcctcctggtggcttcggatcgtaggtgaccaaaatggtgggaaactccacgatggttttgccgactagattctcggccagcgttttggtcgagtccaggagataacacctcgtagagctgcgtcgcacgccctcggctctaagccaaaaactcagctgaccaataccggcagtctgatggttggccagcagtttgcgttgttcccgtgccgtctcgtgccgcagatccacatacttggctaccagatcgggcagcgtgagctcctcattgcattccttgtccacaaatcgagttacattccggggaaggcttgcctcgtatggaatatttgcaaacagccactctatacgccaatggaatcgtcccagtttccagtttagatacgtggtgttctccttgtgccgactgaaattctccagttgcaagcgcagattaatgttacgcttcttggctgccatccgcatgcgatgttgagtcactgggagattcctttggtcgtgggtaaatcgcttgcacggatcggattttcgattctctgcatagcgtgtgcactcctccaagaagcagtagtcactcatgaattcccgcgaggtcatctcgctcagcggtacgaacttggtgcgatcccgctggccatcgcagttgagctccttcttatggatctggacgcagggcaggctgcatgttttcacctcgcatttgggacatgcgtagcaggcctcctttgcggcgcacacctcgcacattcccaggcgcatagttctgtggattctcgttagttattagattacaaataaaaacaattgggcagtacctggtcttagtgctggtctcatcggccatcgtcgtctgtattcatttcaatttcagctgaacccacgtgttggcattgtttacattcaatagtgctgaccatctgatgctggcctagctaaaagtagctaaatgaaaaggctaaaaatatagctaacgtaaaggttatttatttttaacaatgtttagtttgtttagtatagttgtttagttacattttttttgttcaaaagtgttcatatttgaatactacgatttaaatgtatagagtgtaacgccatacgtttgagatttttcattagctagattcgcctcgaaaattgccaccttggcatgcatgtcgctgaaacagctgttcgctgtactcatgttattttgtgttgttgtgctcgcatgttttatggttttgctgttacgttgatttcattgcaacacaaatagtgcgttaattaaacagattgctaatcgagtgagtgcgaaatcacctggaagtcaaaacaagttttatttgctcattctaatgaacataataagcaatgtttatttgcacagcgtgtgggtcgaaggctgcgtaggtgtgtgcgcgatgtttttgttatcgagcttgtatatctatttatcgcaaacgatagcaactccccgttatacattttgtggcgcaatatttgaatacgcacattttgtaactagatgttatcagttattataattagatgtgttgtgcgtataaaaagtcttatcggtcaattgctctagcctacaatttacaagccacgcacacgcgcgcctgtcgcatatgatctaccccaattttaacgctgtttccgtgccgattagattttgtttatttaccagttttttttttgtcattagataccaccgctcaatcacctgtgagtgaaaactacgagtgagccgaagagccgttcgtcggaggtctacgattccggctctattgatatggctgcttgtctgttgcgctacttagttcgacagagtcgcaagcccagatcactggtcgtcagtagagagagctcccactgtagtagaatgagcacctacagtacggtgacc

SEQ ID NO: 1124 - DNA, 1105 bp, DROSOPHILA
ccaacacgtgggttcagctgaaattgaaatgaatacagacgacgatggccgatgagaccagcactaagaccagatgcgcctgggaatgtgcgaggtgtgcgccgcaaaggaggcctgctacgcatgtcccaaatgcgaggtgaaaacatgcagcctgccctgcgtccagatccataagaaggagctcaactgcgatggccagcgggatcgcaccaagttcgtaccgctgagcgagatgacctcgcgggaattcatgagtgactactgcttcttggaggagtgcacacgctatgcagagaatcgaaaatccgatccgtgcaagcgatttacccacgaccaaaggaatctcccagtgactcaacatcgcatgcggatggcagccaagaagcgtaacattaatctgcgcttgcaactggagaatttcagtcggcacaaggagaacaccacgtatctaaactggaaactgggacgattccattggcgtatagagtggctgtttgcaaatattccatacgaggcaagccttccccggaatgtaactcgatttgtggacaaggaatgcaatgaggagctcacgctgcccgatctggtagccaagtatgtggatctgcggcacgagacggcacgggaacaacgcaaactgctggccaaccatcagactgccggtattggtcagctgagtttttggcttagagccgagggcgtgcgacgcagctctacgaggtgttatctcctggactcgaccaaaacgctggccgagaatctagtcggcaaaaccatcgtggagtttcccaccattttggtcacctacgatccgaagccaccaggaggatatgaagccatcgacagcagtatgttttcatgtgtaaatcgacaatttcatatattcattttcatctatcaaggtgaggaattcgaggaagagcacgaagagcaggtgcctgtaaccaaaccaggaacatcctccaacgcagttgcggaggacttagatgattcacatgatgtgtactataaactggctgcagcatttgctggtgaagatgttagtgagactgaagacgacgaagaattcgaggcactctacagacaaagtgttgtactgtag

SEQ ID NO: 1125 - protein, 339 aa, DROSOPHILA
MCEVCAAKEACYACPKCEVKTCSLPCVQIHKKELNCDGQRDRTKFVPLSEMTSREFMSDYCFLEECTRYAENRKSDPCKRFTHDQRNLPVTQHRMRMAAKKRNINLRLQLENFSRHKENTTYLNWKLGRFHWRIEWLFANIPYEASLPRNVTRFVDKECNEELTLPDLVAKYVDLRHETAREQRKLLANHQTAGIGQLSFWLRAEGVRRSSTRCYLLDSTKTLAENLVGKTIVEFPTILVTYDPKPPGGYEAIDSSMFSCVNRQFHIFIFIYQGEEFEEEHEEQVPVTKPGTSSNAVAEDLDDSHDVYYKLAAAFAGEDVSETEDDEEFEALYRQSVVL

SEQ ID NO: 1126 - DNA, 6260 bp, DROSOPHILA
cattcgtctaattaatggccagcgcaaagggaacttttgtgggccataaagcaaactcaggcagccgcttttcgccgatccacccaccgatgcggttcgttggcattgatgcttgcggccaagctgatttccctaaagcggggcggtccacactgcgtatgcgcaacgcacgcgctactggcccgaaaattgaattgttttgcttcggttttgggggggccaaaaagcaattgcatcacgttctagctgctggcggatgcactgcctcccatattgaatggtgagcgggtaaagcgggtgaacacgttcgtttactttgagcgcagcgatgtgagaaaacggctcacagtagttcgacccctgaccgtcaggggggggtaaaaggggttaagcgggctaagagggttagacccctcaagggggttcagagggggcctagtgggaagcccctcgcctggcataacgtgtcactctgctcgagtctctctcggattcggagaatctatgcgtgcaccgaaaaaaattcatataaaatggaaatctgtttagcataatattattactctatatcctacaaattaaaaattatttacaataataagcaacgaatttttttttatgatttgttcattaaaaaaataagcataaacaaatacttccaaagataataaatcaatagtaggcatatttgaaaaatttacatatttttgcattacatattttccgatctttatccgtagaatcttcatcgcacgtacaaaactcgccacaaaaatgtgcacatcgttttgacccgagatggagcggcttttttgtcggtgtgttagcttggaaactagctaccagatctcggagtatctgcatctgtgtgtgcgccaaactggccgatgcgatacatagtttggcccaaagttgttttcgttttattttctattaggttggctgggagtgcgagactcttttcgtgatcagtttgtgtttagcattcggtgagcgcgggtcaacagtatctgaatctgaaactgaaactgaatccgcaaagtatccaagtatctgcgttaaagggtctgccattgttgccaagtgaaggtgcgatcgaattgacacgattaatttaaacaaaagtcgaatccgaagacgatttcagtggcattattgcaattagtatgcgaatgaaatgggttaacaaagtccaaggctctttgaattattaatgtcatattgttataagaatctcgagtcgtagaggtggatgggtccttgaagccgattcatccaggcttcactatgtttcacttcacttcgactatgtttctcaaccaccgtacacccagctctgttcgtgactttatccccacatccacatccacttcttgattttattatcgcattgttgacatctccgactgctccaaactggttgttcccagaagagatgccaaacatgcaaacggaccaaggagcaccgggcacttttcgggtatttccaaattgggaaaccgggaaacgccagccacctggacattcttctcgagcaagtgccgctgtcgtcggacatgcaatcaccgtatcaagtgctataaattgcagtctgtagtgcccgtgactggcggaaagtagtggctcctatccgggaatcgttaaatggcttttgcctatggagcgtttaagatgccaactcgattgccccggaggagatctgaaattgcaataattgccgctcagcaagtgttgcacagattagagggtcagcgggttgtgtgattgtgtgtggcaatccaatctcttggccgggttagcacatgtctgcccttttcactttcaaaaaaccacgttcgctgccacagtctttgatatcagcaatgaactacgctgtgtggcggcgatcttggccgcaggctagccattctgggcccaatgctagacacatttagagcttttaatttgggaccccgacattcggaatgaccataaaacggatgctatagtaatcgcggcacattgttgtttgcttttttatagcttaacatcgggtactaccattttcatcggcactttgcaattgaatcataaaatttatgactcattatacatatgtcggattttgtaggccatatatcctgtatatgcgatacaacaatgaccaatcatttatagaaagttttttataagaaactaaacattcgtattataattctaagaaaagggtatatacggccagacttcgtcaagctacattcccttctcgtcatgacttcagtttcacttgtcactccagccccatttcattgctggcctgctccgccaaccagaagattataggtagtccagcttgttaagcgggtccaagtccgcgccgtctaataaccaagtgtgcgtcgaatgcgggtcaatgtgtcagcggaccaacggctttcgatcaagtttacgtcatcggagtggagttgatgaaggacacgaggtgctcccggcatgctccaccgcccatggcaagctcatggtgcgaatcgtggggcatgcgacatggacataggctcggatgtggacgtggggatgtggcaatagcttaattagtgccgtaacgccaatccggtgtcgctccgcttgcccactcgatggtcactgcgttgacactcagaaacccagccagccagttatgtggccactgtccagccagtcagccaaacgtggcctaatctgcaattgtcgctccgccggctaactggttggttgcctcatactcgtactcacatgtggctacgaccactttacagccaagatcaaatgaaattaaaagtgcacttggcggcgacggccattacgtggtcgcagccccatacatacataagtgtccaaaaagacccaacaatgtcaactccattttagagatcatattttctgataggcatacgtattaaagccagtggtagttacaagatattaaattcaatctgaaaggaaggggaattctatctttgcatctatatcgaaaatctatagtttaaaatgatagttcccaagaaaattaaatgtgtgtacccaaaatactcaaccataacaaaatgacttaatgcaatgatttgattctatgtgtgacagaagctatttgagatgaccgccaagccgaagtttgtgtatgagaaggatgaccggggcaccattggggagatagacgacaacgaggtggaccgcattgcggagtgcttcaagggtcgcagtctgttcatcacaggaggcactgggttcctgggcaaggtcctggtcgagaagttgctgcggtaagtgggtggagtgggtggcaggtggacgggccagctggtccgtacgtggccccattaatccccatttccgcgatggcttatgcaatattattaattcgtgcagttcgtgcggtggcctaaagcgcatttatctgctcatccgccctaagaagggcaaggatcctcaggagcgcatcaaggatatattccagaatgtggtaagcagggtgggaattatggaaactataagaattcattgcctggcttacgaaattaatcaaattacttgtggcgtgtggtgtgtggtgtatgtgtagcttttcgaccaagtgaagcagatgcgtggcgaggagcacatcctgcagcaagtggtggccattgccggcgacgtcctttcgccaggcctgggaatctccgagaaagatctggaaactctgcgccaggaggtgtccattgtgtaccattgtgcagctacagtgcggtaagtatctatgcatactcatccgttccctatcttatggccttaaaaccatctacttaatgttaagtctataggtacatccctctaattatgcacttttataccatttgcttggccagctttgatgaacccctacgaaatgccgtgttcatgaacacccgcggcaccaagtacatgctggagctggctctgacgttgaagcacctggacttcttcgcctactgctcgacggcgtactgccacctgcacgttaagacgctgtacgagaagccctacgatccaccagcagatccgcacaaggtgatgcaggcatgcgagtggctgacggacgacgaggtggccaccatcgagcgcaaggtgctcggggctatcccaaacacgtatgcctacaccaagtcactggctgaggcgctggtggtggagaagttcgaagagcttcccgccgtaatcctgcgcccctcgatcgtcatacccatctggaaggagcccattcccggctggacggacaacatcaacggacccaccggcctgcttatcggagccggaaagggtgtcatccgcaccatgtactgcaattcctccggctacggcgatttcctgccagtggatgtggctgttaacggtatactagtggccagctggaggaacatcacagcgggcacagataagaccaatcgggttgcacacatgacctcgtccaacgacatcaaagtgtcctgggcggagatcatcgagctgggtcgctgggtgattgagaacaaggtgccacttaacggcgtagcttggtatccaggtggttcgatgaagtccaactattgggtgcacttcatctgcatggtcctcttccagtggatgcctgctctctttgtggacgctctgctctggatacttcgctatccgccggtattgtgccgcgttcaaaaccgcatctacaagggattcgaagtattcgagtactatgccaacaacgtttggaactttgacaactcggaggcggtgaagctgcgcaagctgatgaacaacaaggaacggcgcacctacgtgatcgagaagatcgagctggaccttatcgactacttcaccaactgtgtgctctgcgcccgacgactgatcctcaaggagtcagacgaatcgattccggccgcaaggaggcacatgaaggtgtaagtataggcggatcaatacagaatcccaattcgccactgaccaattttcaatcaatttctttttcaggatgtgggtggtggacaaggtctacaagggcatctggatcttcggcatcctctacatgctctataggtgtttcttcgcgggctaaaacccgtccggatggaacgcctatttaagtgctggaaaccaaaagatgtgccctgccccaagccgtagctgttatgtttgctctaggatctaagttttctagttttaggaggtgctgttggatgataagtactttacttgttatgaaaagcagctaataaaaaaaattggtttatgtatggcgacgaattttaaagggtatttgtgggtcgtcttactatattatatttatttatttcatgcattgagggcacttactttatgtcgagaaaagaaaagagagttaaaactaacgaatcgactatcagatacccgttacttagcgcaagtgcgctggataaatttcctattttttggcatatcgatagaaatcgccatgaaaaacattaaaatattataatgaacaaactggttagcgtgaagaatctacaattttatcgtaaccttctacgttttaagttaaataataatttgtatgcaaattatactctacatagttggaaacacttcagttaacctgatattgacgaatctagtataccctctttttacttaaatgagtcatcgacatttaagagttctagaagcttttcaatttttttcaaaaatatatgtttgcttttcgaagtctgtatttttcatttcactttgtacacacaaataaacaacaaaagctttttttaacggaattttacttctattaatataattaaaacattaaaaaactacttaattggctacaattaagaatatttaacgaaaaatctagaaacaaattgtcaagaataaatacacatttacttccgtgaacgtcgccgagtctggaaaatacagaaaatgtaaataattttaggcaacgttaaaatatatttattcaagtaaaaaatttgtataataaataataccatataataattcggtgaatattaagtaaccaatttacattttaactgttcgatactgttcagaatgtttggcttgataagctcttctgcgttgaaggtagtgtctcgttggtccaatgacttatcacccacattggcttcgatgcaggtaccccattccctggattcattatcgaacttaatggaaaagggcgcgaatctcgggcttaagttcataaatacgaataaaacccgtttgcgaaagtccactgtggcatccgtatgtgccggccagctgcgtttgtagaagaattctcc

SEQ ID NO: 1127 - DNA, 1856 bp, DROSOPHILA
tcaacagtatctgaatctgaaactgaaactgaatccgcaaagtatccaagtatctgcgttaaagggtctgccattgttgccaagtgaagaagctatttgagatgaccgccaagccgaagtttgtgtatgagaaggatgaccggggcaccattggggagatagacgacaacgaggtggaccgcattgcggagtgcttcaagggtcgcagtctgttcatcacaggaggcactgggttcctgggcaaggtcctggtcgagaagttgctgcgttcgtgcggtggcctaaagcgcatttatctgctcatccgccctaagaagggcaaggatcctcaggagcgcatcaaggatatattccagaatgtgcttttcgaccaagtgaagcagatgcgtggcgaggagcacatcctgcagcaagtggtggccattgccggcgacgtcctttcgccaggcctgggaatctccgagaaagatctggaaactctgcgccaggaggtgtccattgtgtaccattgtgcagctacagtgcgctttgatgaacccctacgaaatgccgtgttcatgaacacccgcggcaccaagtacatgctggagctggctctgacgttgaagcacctggacttcttcgcctactgctcgacggcgtactgccacctgcacgttaagacgctgtacgagaagccctacgatccaccagcagatccgcacaaggtgatgcaggcatgcgagtggctgacggacgacgaggtggccaccatcgagcgcaaggtgctcggggctatcccaaacacgtatgcctacaccaagtcactggctgaggcgctggtggtggagaagttcgaagagcttcccgccgtaatcctgcgcccctcgatcgtcatacccatctggaaggagcccattcccggctggacggacaacatcaacggacccaccggcctgcttatcggagccggaaagggtgtcatccgcaccatgtactgcaattcctccggctacggcgatttcctgccagtggatgtggctgttaacggtatactagtggccagctggaggaacatcacagcgggcacagataagaccaatcgggttgcacacatgacctcgtccaacgacatcaaagtgtcctgggcggagatcatcgagctgggtcgctgggtgattgagaacaaggtgccacttaacggcgtagcttggtatccaggtggttcgatgaagtccaactattgggtgcacttcatctgcatggtcctcttccagtggatgcctgctctctttgtggacgctctgctctggatacttcgctatccgccggtattgtgccgcgttcaaaaccgcatctacaagggattcgaagtattcgagtactatgccaacaacgtttggaactttgacaactcggaggcggtgaagctgcgcaagctgatgaacaacaaggaacggcgcacctacgtgatcgagaagatcgagctggaccttatcgactacttcaccaactgtgtgctctgcgcccgacgactgatcctcaaggagtcagacgaatcgattccggccgcaaggaggcacatgaaggtgatgtgggtggtggacaaggtctacaagggcatctggatcttcggcatcctctacatgctctataggtgtttcttcgcgggctaaaacccgtccggatggaacgcctatttaagtgctggaaaccaaaagatgtgccctgccccaagccgtagctgttatgtttgctctaggatctaagttttctagttttaggaggtgctgttggatgataagtactttacttgttatgaaaagcagctaataaaaaaaattggtttatgtatggcgacgaattttaaagggtat

SEQ ID NO: 1128 - protein, 517 aa, DROSOPHILA
MTAKPKFVYEKDDRGTIGEIDDNEVDRIAECFKGRSLFITGGTGFLGKVLVEKLLRSCGGLKRIYLLIRPKKGKDPQERIKDIFQNVLFDQVKQMRGEEHILQQVVAIAGDVLSPGLGISEKDLETLRQEVSIVYHCAATVRFDEPLRNAVFMNTRGTKYMLELALTLKHLDFFAYCSTAYCHLHVKTLYEKPYDPPADPHKVMQACEWLTDDEVATIERKVLGAIPNTYAYTKSLAEALVVEKFEELPAVILRPSIVIPIWKEPIPGWTDNINGPTGLLIGAGKGVIRTMYCNSSGYGDFLPVDVAVNGILVASWRNITAGTDKTNRVAHMTSSNDIKVSWAEIIELGRWVIENKVPLNGVAWYPGGSMKSNYWVHFICMVLFQWMPALFVDALLWILRYPPVLCRVQNRIYKGFEVFEYYANNVWNFDNSEAVKLRKLMNNKERRTYVIEKIELDLIDYFTNCVLCARRLILKESDESIPAARRHMKVMWVVDKVYKGIWIFGILYMLYRCFFAG

SEQ ID NO: 1129 - DNA, 6188 bp, DROSOPHILA
tagtgcaataaagacagttcatatacagaaacgtagtcgagagcagctggtgacctccaccggtgacatagtagcctgtgcaatttaactaataagattaggatttacttagtatcttttttttttaaatttaacgcttccgatgtcggattcgctgatcatttgcgtttccgactactggcggcgatgtcattaccacaatcgtcaaaatcgtgaagccggcgacgcctggccagaagccaaaccgctgcggaggctgtgcatcgatgtggacgccatcaatggtaattactatcttcgcgagttcctgcaccagcacgtgcttgcccagagccttatgcacaatcatggtgtccagctggtctggctgcaattcgaggaaccggagaagcacaccattgactacaaattcgccgacatgctggcacacacgctgtgggagcgcatcgaggtggagcacctcatgtcctggctgtccacactgggcggcggattctccgcccttggcgagcagttcgagcgatgtgtaagtaatccatccatccttcctacatggtttatcccacccattaacccactttcaggcgaaaacggctggcaagatttcgctgcagcagttaaagattggcatgcgactcggtgatcccttcctgcagacgcgctgcaagctctactacagcatttcgctaatccagcgtggtcaactacggatggcgaagcatttgatccgacagcagtataagtttgcgagtagaaacatcgagaaggatgtgcgcctgatgcggatgtgtctgggcatttggcggcgacttagctacgagtacgagcagcgaagactgcggaaaggtggcaactaagttggacttggaaccgcagattatttcgatcaaaaaactaaaaattgtaaattgcattaggtggtcacgattcgagcgtcgatcgtgttttttttcctcttttgttaagcaaaagtcaaatatagttttcaatttatttatttaatatgtaattgtatatacgtaaaaaatgcatttacattattcatttatttctcgttcgtatttgtatatatatatatattttcaactgcccgctactaaaaatcaaacgtaatccatggaagggagaactgagatatttcttttacctaagcgctaaacaaaaaattattgttgtacagaaattgacaaagacttgtgggacgacttggacgcggatatattgcttgtgcatgtgcacatcctccttgaggatcgggggggatggatctcgaaaacgaacaaaataatgtacaaaaaaactgaaagccggtaactcgaactcatttggatgctgctcgaagattgctgctcgtaaagctttatatatattgtattttaatatatgtttttttatatgtgtgtgtgtgtgttgggtgtgtgttgggtgtgtgtgtgtgtgttgggtgtgtgtgtgtgtgttgggtgtgtgttaggtgtgttgggtgtgtcttgatggcaacctggacctactgtgctagcgtacccatgggatcccaggcaggcagtacgatcggatccatgtcgaacacgcgcaacacatcctcgggcacgtacttcttgtcgacgaccacctcgaatccaaactccctaaaccaatcggcgttcatcaccagatagcccttctcgccgcgatcctcaccccacgagttctccacacgcaatttctgggccacgccgctcttctgcaattcaaattgtttcaaatggttaacaaacgtatagcaggctgaattagtgctactcacatccacggatacggcggtgaaaaccatggcatgggtcatggccgattcaccgtagatcaggcggtctgccttggagaatgtcgtttgtatgtcaatgtcgaagaccagcttaaaatcgtggctacatggataatcatcagttgaataaagctagcataagcaaataacacgagtctaagacactcacacatccacatcctcgatgccctgcttggaggcgaatcgcttgctaacctcgcagccaaaccaaacggcctcgccggcctttagcgacttggtgacaaccgcaaggagcagttcgacggactgattgttatacagaacgggtcgaccgccaaccacgttgcccaggcagtcaacagtgtatgcctggtcatagctactcgtcggccgaggatcggtgaccaggcacactttgtcctccacgttgaaatgcggcttaacataacgctcatagaactccagcgaactaacgggtccgattgactgatagttcttgctcttgtcatagtactcccaggtgaaggtctccgagggtatgcccaggcaaatgccaaccaccttgtagatctcggccatttgctcctggatcttgcaggcgatctcctcatccgtgggattcttctccatcagcacgcgcaaattgcgggcatactcccgtagctaaaatagatagttagactttctatataccatacccatcacaaaaatcgatttgctcaccttgctcttcagtatggcgttcattcgtaagctggactcgcagctgaagctctcgggaaagcatttctttggcataaggccgtgtttggttatcagattgaccagcatgtcccactggccgccatcggaggtgggatcgagtagcaggaacgacaccagacgaccatcaaccttctcgccgcgctgtgccgtcttcacaacattgttgagaaagtagttgcaacgctcgatcttgtcccagtagaagaggaaggcctgcgagaattcgaactcgtccagattgtagttcttcatgaatggcaggcggatgcagttgagggccgcaaacagccagcagcggccggagctcctttgattggtcaccggcttgccctccgtttccaccttgtagttgaacacatgattggtggtctccagtgccttcctggacaggcacacatcgaacggatcaacgcgtgagcagacgttctgcgccagcagattcttcggttcgctgtagaagtttttccgccatttttccaacaattgattggtgatcacactggtctcagcgaacctgtgcgtcgagttcttaccactattggcactgttattgttaccggcgccaccgccaccgcttccacctcctccggatccgctgttgttgtcagctgcaagtaaatgggattggcaacgttcgccggatattgtgtgagtttgaacggattcttttgaatagtacatcgccggctcctgctgctgctgcggatacgggattcgattgcgatacgtatttggattttgactcagtttcggggaattgatcttgatctgcgtcactgaccgccttaccgcccaaactggaggatcggattacccagaaaagaaaccgaaagcgataattttgtgttgatcgtccaggtaaaagaaataaaaacgacggcgattttggccaatttcaaagcgaaacattaaacaacaaataacaaagcaattttgtcagcagaaactgacttacgctattcgtccggatctgtaaatctgtagattcataatgaaatctgggcaaaactgtgacaaaaaagttaaataaatgacaggaaaagaagggctgtctaattttgtttttgaaaatctctacatttcctttctaataatgaaaattaaatatcagaatttgcaatttaaaaacatttatcccagcaatttgaacgacaaacacagctgagttgttcatcatttaaattggcaattaaattgaacaggaatggcatattttttgcatcgcacagatgttttttttttttgttagaacaaaagcaattctaatattttacgaggtctgtagcacgattgtcgacaaggagattggatgtgataacacaatcctaagataatggctccaaactttccagaactttatgctattataactctgataatcccgataagacggtatgcatatgtatatagaatttgcagatacaaaagggcatcctaaagatgcaaggcaatccaacagatccaaaatagaacgcttgtgacgcaatctgatgaaaatctggcaaagattgggcattacttgcattattttcaacttagccaacttccgggtctgcgcccccctcaaagaagacgtgggcgtggcacgaattcacaaagaattcacaatgagtaggagaaccaaaaagaacagctgcattgcagcaggggccattaacatgggcataaccattatgcactttggattccgcatctctttcactcgcttctttagccatttactctgtgtgcgctttgtgtttattatttatctgcatatgtgcacacttccaggtatttaaaaaaaatgtctgtccatgtgtgtgcaagtgcatgcgtgtgtgtgggtgatgctgataagcgaagctgacgggatacgggttaaaagccgtcaagaaatgcctatttaaaccgttacgtgcgaaagagagggcgatgcaattaagcaaaaccagtttaacgggactcgcacacacataagtacgcacatatgcatgtagcgggtgaggagcgagcgatgaaacggaggaaaacgaagaaggaagaggaggcgaaggagagagaggacaggcaaagtgccgttttaacagctttcgcggaaagccggcacaaaaacaatctaaacaaactaaaaagaaggaaaaacaaaaacctgtttgtccagtttgacaaacaaaaaacgtgaggaaaaaaaaaacaaacaaaaatttgggtgaaattttactttcgtctggttttaatttgtttttgttgctggggcgtcagcaaaaactaccatccctttccctctttcgctcctacactcacacacacacacagccgcacaccacagcaacaacaaataaagaatgtcgccggaaattagtttcacttaaaagttgttaattttcactctaagtacgtgcattttatgcaagactcttcctttcgtttattaacttacacatatttaatggttttttctcctttcttttgtgattttacacttgttttgattttataaggtcacttcgaattttgctcgacccagatttggatgtccttcagttttccgaactcctgaccacttctggctactgcagtcgtactatgcgcaatttggataatttttttaatttgattttattttggtttgctgtggagtgttttttttgtttcctaatagtatgaccatacaatgaaccctcttttataccatccggctttcaaaaaaatatacttttaataccacattggattgccatacgatataccggtaatataccaacttctttaaattattaagcactgttttaatacaccgaatttcataaatgttccatacatataagcgtattaatttataaatcaaactgtaactgttatatcgatctgttgatctggcagcgtcgttggacctaggcctaggcctatcaaaaacccatatggcaacaccccaatcagctggatcttttgccgccgtgctcttctcttcgtaaaacgttgtgatgcaattttgttgttttcatgtctaaaagtgaaagttgccactgataagaggcagtagactgagactccgacgtaaaatttatccgtggtgaccccgtttcgtgtcagccaggcgacgaggccagcgtttggaccagcccccaactgaaaccagccgttctgcatctgcattccaaagggcggccgcacatggagcgcagggtcaaagccgcgccagaaaaccaaaaccaagatagcacccgccgatgagcgggcatcgaggagtgggcgcggaggtctaacctcaaagcacaagcacaatccgcagcatcagcacacaacgaatccttgctattcacaccattccctatctcgattccgaagtattcacaggatccaaggcgtagtcatcatagccgcaggatgcagcgcgtcatgccggcgtcctggagcagcgggggcagcctgctgccctttcgcgtttccaccaccacaaaggtgagcctagctaacttaagtacccagaactttcacgaaacaccctccaaatccccaccaggttgtgctcttctcactgaccgccggcgtggccctaatgagcgtactctcccgatttctgcgacgtcgcaagccaccgcgtccgcctcgtcgagccaggaagtacacgggtcggcgcaaccgcaacagcatg

SEQ ID NO: 1130 - DNA, 2248 bp, DROSOPHILA
gaaacaaaaaaaacactccacagcaaaccaaaataaaatcaaattaaaaaaattatccaaattgcgcatagtacgactgcagtagccagaagtggtcaggagttcggaaaactgaaggacatccaaatctgggtcgagcaaaattcgaagtgaccttataaaatcaaaacaagtgtaaaatcacaaaagaaaggagaaaaaaccattaaatatgtctgacaacaacagcggatccggaggaggtggaagcggtggcggtggcgccggtaacaataacagtgccaatagtggtaagaactcgacgcacaggttcgctgagaccagtgtgatcaccaatcaattgttggaaaaatggcggaaaaacttctacagcgaaccgaagaatctgctggcgcagaacgtctgctcacgcgttgatccgttcgatgtgtgcctgtccaggaaggcactggagaccaccaatcatgtgttcaactacaaggtggaaacggagggcaagccggtgaccaatcaaaggagctccggccgctgctggctgtttgcggccctcaactgcatccgcctgccattcatgaagaactacaatctggacgagttcgaattctcgcaggccttcctcttctactgggacaagatcgagcgttgcaactactttctcaacaatgttgtgaagacggcacagcgcggcgagaaggttgatggtcgtctggtgtcgttcctgctactcgatcccacctccgatggcggccagtgggacatgctggtcaatctgataaccaaacacggccttatgccaaagaaatgctttcccgagagcttcagctgcgagtccagcttacgaatgaacgccatactgaagagcaagctacgggagtatgcccgcaatttgcgcgtgctgatggagaagaatcccacggatgaggagatcgcctgcaagatccaggagcaaatggccgagatctacaaggtggttggcatttgcctgggcataccctcggagaccttcacctgggagtactatgacaagagcaagaactatcagtcaatcggacccgttagttcgctggagttctatgagcgttatgttaagccgcatttcaacgtggaggacaaagtgtgcctggtcaccgatcctcggccgacgagtagctatgaccaggcatacactgttgactgcctgggcaacgtggttggcggtcgacccgttctgtataacaatcagtccgtcgaactgctccttgcggttgtcaccaagtcgctaaaggccggcgaggccgtttggtttggctgcgaggttagcaagcgattcgcctccaagcagggcatcgaggatgtggatgtccacgattttaagctggtcttcgacattgacatacaaacgacattctccaaggcagaccgcctgatctacggtgaatcggccatgacccatgccatggttttcaccgccgtatccgtggatgtgagtagcactaattcagcctgctatacgtttgttaaccatttgaaacaatttgaattgcagaagagcggcgtggcccagaaattgcgtgtggagaactcgtggggtgaggatcgcggcgagaagggctatctggtgatgaacgccgattggtttagggagtttggattcgaggtggtcgtcgacaagaagtacgtgcccgaggatgtgttgcgcgtgttcgacatggatccgatcgtactgcctgcctgggatcccatgggtacgctagcacagtaggtccaggttgccatcaagacacacccaacacacctaacacacacccaacacacacacacacacccaacacacacacacacacccaacacacacccaacacacacacacacatataaaaaaacatatattaaaatacaatatatataaagctttacgagcagcaatcttcgagcagcatccaaatgagttcgagttaccggctttcagtttttttgtacattattttgttcgttttcgagatccatcccccccgatcctcaaggaggatgtgcacatgcacaagcaatatatccgcgtccaagtcgtcccacaagtctttgtcaatttctgtacaacaataattttttgtttagcgcttaggtaaaagaaatatctcagttctcccttccatggattacgtttgatttttagtagcgggcagttgaaaatatatatatatatacaaatacgaacgagaaataaatgaataatgtaaatgcattttttacgtatatacaattacatatt

SEQ ID NO: 1131 - protein, 509 aa, DROSOPHILA
MSDNNSGSGGGGSGGGGAGNNNSANSGKNSTHRFAETSVITNQLLEKWRKNFYSEPKNLLAQNVCSRVDPFDVCLSRKALETTNHVFNYKVETEGKPVTNQRSSGRCWLFAALNCIRLPFMKNYNLDEFEFSQAFLFYWDKIERCNYFLNNVVKTAQRGEKVDGRLVSFLLLDPTSDGGQWDMLVNLITKHGLMPKKCFPESFSCESSLRMNAILKSKLREYARNLRVLMEKNPTDEEIACKIQEQMAEIYKVVGICLGIPSETFTWEYYDKSKNYQSIGPVSSLEFYERYVKPHFNVEDKVCLVTDPRPTSSYDQAYTVDCLGNVVGGRPVLYNNQSVELLLAVVTKSLKAGEAVWFGCEVSKRFASKQGIEDVDVHDFKLVFDIDIQTTFSKADRLIYGESAMTHAMVFTAVSVDVSSTNSACYTFVNHLKQFELQKSGVAQKLRVENSWGEDRGEKGYLVMNADWFREFGFEVVVDKKYVPEDVLRVFDMDPIVLPAWDPMGTLAQ

SEQ ID NO: 1132 - DNA, 6328 bp, DROSOPHILA
aggggtcactcaggaaaaacaaatttgattgcttaaatggctcctaaaattgaaagcaaaagtggaagtcaactcgataagagagggtatacggggaccactcttctggtccatatcctattagaaggttgaaatgcacttaacgtttgtttatgcacacacacacaattaagaaactactcttgtccaaatactctgcctggactacttccatttcttcatagctttccaactgattgctaacttgtgtgtgctcgcgaaaaacagaaaccctaggaacagctgagtgtgcacacaaatccacacgtgctgcgcctttagacaaaacaaaaatgaatcttaaggacaaaacacttaccgcccagaaagccccacgattgctcagtggcgacttgaactttgttttcacttttcgtttcgttgttgccgttaaattcgccacactcttgataaaaaaaaaaaaaaaccgtaaaatatgattccgttcgcggagctctaataagtgcgtcagtctcctgcaagaaaacacttacaactaacatatttttatatatattctcggttaacagagcccaccagtgttgccaattttaaaaatgaaaaaattagtaatcgaaaaacaatgaagtttataatagtatgtacatatgcatatgcataactgttgtaagaaaacaacataaaatgaagacatcttgctaatatgagggataatgtgataatgttctatttggcgagcagaggtttcatatttttaagaaagagctaccacactgggtcttatcgattcaattaacaatatgaacagcttctgatggattgcacacgcttgtggaaaaaaaaagatggaacagctgaccgagagttagcatgttagcagctaacaggggacggaccacagatgtcttaacagcactggtacacaaatcgctttacagcacgctgttagcgggactaccgataatagttgctgtcgataacagatgctgccatatgtgagaaagaagaagagcgaagaaaacagataactccaatgtttgcaaaacaatttgattagtcttgaaggaatccgctttaggctcttaggaacccgctttatagcgagcacaggcacgcactggcacacacagcaagcaaagagtgacaacattatccgtgaagtggacatatggccaacaagaacatgcgtaacaccacaaccaaagtggaggccctgattgagagctgtcgcagcgagggcaagtggcaccgggtcatcgagctaacggatgaactgaagaccgggtccccgcacaatggtaagaagatttccgctgatgacggtactcctggaatgactgccttctttcgtggaacagagtgcctggccaactttctggtgggggaagctcgtctggagagttacctggaggaaaacgctctcgcgtcagactcaaattttggtcgcgccaagtctggattggcggaggcccggcgtttccttcacttggctttgggtgagagtggccagaaggcgggcatcgccctggacgcctatttgctgctggccaagctgtgctttgcctgcggcgagtatgagcagagtctagacaatttcgtcaaggcagaactcaacacgcttgccgagaaggagctgaccctgtaagttgggaaaaggttttctaatcaaaatgttctcatctactacgtggggacttgcaaattaagatgaatgtacacatcaactcttaattaatagcaaatttgcaaaacttatcacttctgcttacatatatataaaagtcgcagcctgaagatccttgcggaatcgtatgccatcaagggattgtgtctggagcagcagactacgaagccgtcatctaagtttaagaaggccgaaaaggacacggaaatggtaaagtcctcgatttcagttttaaaacgtaactgatttaataatttcttactccagattagctgttttgagcgcgcatctgatctggggctgctctatctgcaggaatacgatctcgttagtggaagcagtggctcgtccaacaactcgacagctggttctacgttgaatgtaaacgcctctactgtgcagccgtcgagcagcagttttgcaatcagcagtacaataccggcgagtggtccaagtggactggaaatgaaccgcaggatgggcgccatcctagagaccgccctgcaacgggcacccatagtgcttattaagacggaaaagcttcaagaggccgttgaacggtatcgaatcatgctaaacgccatcgaaacgagggctactcaatcgttgcgcctcacgctggcccgccagctagctgaggttcttttgagaggggtctcgggcacgatttactcgcctccttttaccggaaaatctggaggtgggacgctgcgaggaggatcctccaagaaactttggaaaccgcgtaaatacgcagcccgccagcagtttaaccctcggaaccagcaggaagaggtaattctgttgctactcatagccgaggcactggctgtgagggatacagttttgtcgcagagtccagagtttagacaggcccgtcagcatgctatgggcaacgttacggccgtctatgacctcctgacgttggctactgtgcgctgggggctcgtccagctattaaatgagtcctttgagaaggcgctaaagtttagctttggtgaacagcatgtgtggcggcagtacggcttaagtttgatggcagccgaaaagcactcgcacgctttaagggtcttgcaagaatcaatgaagttgactcctagtgatcctttgccatgtctgttggcttctcgcctttgctacgagagtctggagacggtaaagcaaggtctggactatgctcagcaagcgctgaagcgcgaagtaaagggtaagataacattgagtttatagatttaaacagatttcattacgattatccgaacttccttcttccatgtacaggcttgcgaccatcgcgaagccaactctttgtgggcatcggtcaccaacagctagccatccagtcaaatcttaaaagcgagcgagatgcttgtcacaagctggctttggacgccctggagcgcgctgtgcagtttgatgggaacgaccacctggcggaatactacttgtcgttgcagtacgcacttctgggacagctggcggaggcattggttcatatccgtttcgcgctggcgttgcgtatggaacatgcgccatgtctacacctgttcgcactgttgctgacatcgtcgcgccgacctcgtgaagctttgggagttgttgaggatgctttacacgagtttcccgataacctgcagctactgcacgttaaggcacatcttcagctgcatctagaggacgcggagacggcgttgggcactgtgcagcacatgctggccgtgtggcgggacgtttacgaggcccagctagcgggagaggaggaaaagcactcagacaccaagagtggtgttcacttggcacattcctcacagatgtccgacaaggattcaagtaagaactcgatagctgccgcttgcatctgacttattcatatctcactatctaataatgtgaatgttctgtgtatatacactcgtatatatatatctgtatcccaaactctgcggaatctatgtaatatacataacaaacaaatcaaactcgcataaataattgtaagtttgctaagaatattccggtttaatcaagcttcgattgcgcctgtagatcgaatttggtcaacatcggtacacgcattcattccaatttttctggttctgtagttccctatatttaagtctccgatctttgattttcgcccatgctttaatttttcctcttcttattaacacttttattacattttgtaaataccattaggtactcatttaagcgctactccatttctacattcttcttatacttaaagatggtacttaaaatggtatgaaacaagatttgtatgcaataatcttcgaattatgtcttcgaaagtcacaaaaataccattgagcggtatttgcgacaaccgaaataagtctaaaacatattattaattaagtagtagtgtattttttcggctcgttacctgttcggcgagataacatacatttctggccttcttctaaaacatatttgcatgatctgaaaatgtttgcctatccttatctttgtttcggtttcacccttttttcttgtcgttatgtataagcttttgtcgaaagaactaatatataattcgctttttaaagattctgtgtacgcggcttcattggctgcagtctcccgcgttgaacaggctctgagtgaagcagcaagctcattgagctcatttacgcagcgtcctggaccccgacgaccctggatgctacagattgaagtgcgttcttagtttcgtttagtatccacgataatgtatttaatgctgctaaatggatttgttttagatatggcttctgctggctgatgtctatctgcggattgatcagccgaacgaggcactcaactgcatacacgaagcctcacagatttatccgctttcgcatcagattatgtttatggtaagtccttcaatcttgatttatttttttctaactccaactaatataattaccgtttttaagcgtggccaggtgcatgtctatttggagcaatggtttgacgccaagcaatgtttcctgaacgccgtggccgccaacccaaatcacacagaggctttgcgtgcgcttggagaggcgcatttggtactgggcgagccgaggttggctgaaaaaatgctaaaagatgcggccaaactggatccgagctgtccaaaaatttggtaagcttaaagacgtatgctcagtacttaaaaccaaactcatattgacaaatttaccaggttcgcactgggaaaggtgatggagatcctgggcgatttccatgcctcagccgattgcttcgccacgtcgctgcagttagagccatcatgtccggtgctaccttttacttctatacctttggtgtttgaataggaacactttcgtgtctaattcgaagcttgacaaacctcaaagtcaacagcaatactagaattatacttcctaattccttcagtgtaaaaattgttgtatcgcagttttggagcaacaaatgtttaaatattgtttgtgtgtaaattattaccaagaattgttcgagcttggctgtattatgtgaatgaaccattctgctatcttccttaatcacccacttttaaggagatggttcggttaaatttattactctattaggtgttgttaattacatacaaaattggttattatataaatatacagtatttcgtgaaattatttcatcatatcattgtgtatcagtaaatgtcagtattcgattttttaagttccttgcattttctacttggaaaatgattctaattgttttgaaagcttgtttctcttttaccctgtggccttttactttccttacaagctaatttacgccgtaatatccgcattctctgctaaaggccaaatttagaccttaaaattaccaaggagcttacttgcagttgggccccatttcctttagtttcggtgcgcttgtgtcgttgccctgggcaactactatagcgtacgggcaatcaataaaaatataaacaagccagtcgaaagtgtcgctgcggaacaggcacaggaatttgggtttattacgccactcttaaaaaatcgcgggcgattcattttgtgtgccactttagactttggccctgttagatcagcaacttgaattttgatggccgattagttgcacaagcattatgacgcccaaacgaaagcgtcgcgtacgcagcgagtcgcgggccaaaagcaaagaccagggaaggtccaaggcagagcacttgcatctgcttgagcaactggagttgaccgacagctgctgcgacatctgccactgcgactgttacagttcccacagcagcggttctgcgagtggacgcggcaatcagcggcaggcgagcgtcaaggagttgttgcaactggaaaacgacattcagaccctggagaaattgcagcgacgggaaagtacaagctgccaccgaagtgcttccaggtcgccaacagagcgaaagtttccccacagcaggcggggatccttcgacggtgagaaaagaagtgcaagctcaggcaggactcggcggtcgaagagcgcaggaagtcgcagttgcgagtcccgggagaagcagcctgcacagaaagcgcaacaaattcctcaggatcgtcgaaagcgccgggctcaaaaggattgcaaaatgcttcaagtaagctcagatgccaggaaaaaggt

SEQ ID NO: 1133 - DNA, 3066 bp, DROSOPHILA
aaagaagaagagcgaagaaaacagataactccaatgtttgcaaaacaatttgattagtcttgaaggaatccgctttaggctcttaggaacccgctttatagcgagcacaggcacgcactggcacacacagcaagcaaagagtgacaacattatccgtgaagtggacatatggccaacaagaacatgcgtaacaccacaaccaaagtggaggccctgattgagagctgtcgcagcgagggcaagtggcaccgggtcatcgagctaacggatgaactgaagaccgggtccccgcacaatgagtgcctggccaactttctggtgggggaagctcgtctggagagttacctggaggaaaacgctctcgcgtcagactcaaattttggtcgcgccaagtctggattggcggaggcccggcgtttccttcacttggctttgggtgagagtggccagaaggcgggcatcgccctggacgcctatttgctgctggccaagctgtgctttgcctgcggcgagtatgagcagagtctagacaatttcgtcaaggcagaactcaacacgcttgccgagaaggagctgacccttcgcagcctgaagatccttgcggaatcgtatgccatcaagggattgtgtctggagcagcagactacgaagccgtcatctaagtttaagaaggccgaaaaggacacggaaatgattagctgttttgagcgcgcatctgatctggggctgctctatctgcaggaatacgatctcgttagtggaagcagtggctcgtccaacaactcgacagctggttctacgttgaatgtaaacgcctctactgtgcagccgtcgagcagcagttttgcaatcagcagtacaataccggcgagtggtccaagtggactggaaatgaaccgcaggatgggcgccatcctagagaccgccctgcaacgggcacccatagtgcttattaagacggaaaagcttcaagaggccgttgaacggtatcgaatcatgctaaacgccatcgaaacgagggctactcaatcgttgcgcctcacgctggcccgccagctagctgaggttcttttgagaggggtctcgggcacgatttactcgcctccttttaccggaaaatctggaggtgggacgctgcgaggaggatcctccaagaaactttggaaaccgcgtaaatacgcagcccgccagcagtttaaccctcggaaccagcaggaagaggtaattctgttgctactcatagccgaggcactggctgtgagggatacagttttgtcgcagagtccagagtttagacaggcccgtcagcatgctatgggcaacgttacggccgtctatgacctcctgacgttggctactgtgcgctgggggctcgtccagctattaaatgagtcctttgagaaggcgctaaagtttagctttggtgaacagcatgtgtggcggcagtacggcttaagtttgatggcagccgaaaagcactcgcacgctttaagggtcttgcaagaatcaatgaagttgactcctagtgatcctttgccatgtctgttggcttctcgcctttgctacgagagtctggagacggtaaagcaaggtctggactatgctcagcaagcgctgaagcgcgaagtaaagggcttgcgaccatcgcgaagccaactctttgtgggcatcggtcaccaacagctagccatccagtcaaatcttaaaagcgagcgagatgcttgtcacaagctggctttggacgccctggagcgcgctgtgcagtttgatgggaacgaccacctggcggaatactacttgtcgttgcagtacgcacttctgggacagctggcggaggcattggttcatatccgtttcgcgctggcgttgcgtatggaacatgcgccatgtctacacctgttcgcactgttgctgacatcgtcgcgccgacctcgtgaagctttgggagttgttgaggatgctttacacgagtttcccgataacctgcagctactgcacgttaaggcacatcttcagctgcatctagaggacgcggagacggcgttgggcactgtgcagcacatgctggccgtgtggcgggacgtttacgaggcccagctagcgggagaggaggaaaagcactcagacaccaagagtggtgttcacttggcacattcctcacagatgtccgacaaggattcaaattctgtgtacgcggcttcattggctgcagtctcccgcgttgaacaggctctgagtgaagcagcaagctcattgagctcatttacgcagcgtcctggaccccgacgaccctggatgctacagattgaaatatggcttctgctggctgatgtctatctgcggattgatcagccgaacgaggcactcaactgcatacacgaagcctcacagatttatccgctttcgcatcagattatgtttatgcgtggccaggtgcatgtctatttggagcaatggtttgacgccaagcaatgtttcctgaacgccgtggccgccaacccaaatcacacagaggctttgcgtgcgcttggagaggcgcatttggtactgggcgagccgaggttggctgaaaaaatgctaaaagatgcggccaaactggatccgagctgtccaaaaatttggttcgcactgggaaaggtgatggagatcctgggcgatttccatgcctcagccgattgcttcgccacgtcgctgcagttagagccatcatgtccggtgctaccttttacttctatacctttggtgtttgaataggaacactttcgtgtctaattcgaagcttgacaaacctcaaagtcaacagcaatactagaattatacttcctaattccttcagtgtaaaaattgttgtatcgcagttttggagcaacaaatgtttaaatattgtttgtgtgtaaattattaccaagaattgttcgagcttggctgtattatgtgaatgaaccattctgctatcttccttaatcacccacttttaaggagatggttcggttaaatttattactctattaggtgttgttaattacatacaaaattggttattatataaatatacagtatttcgtg

SEQ ID NO: 1134 - protein, 861 aa, DROSOPHILA
MANKNMRNTTTKVEALIESCRSEGKWHRVIELTDELKTGSPHNECLANFLVGEARLESYLEENALASDSNFGRAKSGLAEARRFLHLALGESGQKAGIALDAYLLLAKLCFACGEYEQSLDNFVKAELNTLAEKELTLRSLKILAESYAIKGLCLEQQTTKPSSKFKKAEKDTEMISCFERASDLGLLYLQEYDLVSGSSGSSNNSTAGSTLNVNASTVQPSSSSFAISSTIPASGPSGLEMNRRMGAILETALQRAPIVLIKTEKLQEAVERYRIMLNAIETRATQSLRLTLARQLAEVLLRGVSGTIYSPPFTGKSGGGTLRGGSSKKLWKPRKYAARQQFNPRNQQEEVILLLLIAEALAVRDTVLSQSPEFRQARQHAMGNVTAVYDLLTLATVRWGLVQLLNESFEKALKFSFGEQHVWRQYGLSLMAAEKHSHALRVLQESMKLTPSDPLPCLLASRLCYESLETVKQGLDYAQQALKREVKGLRPSRSQLFVGIGHQQLAIQSNLKSERDACHKLALDALERAVQFDGNDHLAEYYLSLQYALLGQLAEALVHIRFALALRMEHAPCLHLFALLLTSSRRPREALGVVEDALHEFPDNLQLLHVKAHLQLHLEDAETALGTVQHMLAVWRDVYEAQLAGEEEKHSDTKSGVHLAHSSQMSDKDSNSVYAASLAAVSRVEQALSEAASSLSSFTQRPGPRRPWMLQIEIWLLLADVYLRIDQPNEALNCIHEASQIYPLSHQIMFMRGQVHVYLEQWFDAKQCFLNAVAANPNHTEALRALGEAHLVLGEPRLAEKMLKDAAKLDPSCPKIWFALGKVMEILGDFHASADCFATSLQLEPSCPVLPFTSIPLVFE

SEQ ID NO: 1135 - DNA, 4005 bp, DROSOPHILA
aagtagctccagaaaagttcattttcatctgctgattacatgtatttccactaactaactaacttggccagtgactgctggtatctttggagccaagccaacgcaaatgcaagacaacattatccgctttgccccaaaagtcgactttaatccgtggcgctaagcacgcaactgcagaaaatcaaattggagcaacttggggcatagtttgttggccaaataaatcacgcagccaaagccaccgaaatcctggcaatcgaagaggacaacaaagtagacaaggaatgggaatgcacgcaatgataaatcgaaaatattttcacttgtttacacaaaacaattcggagcgacagacaatcggagaaaagcttgacaaaaatgtccaacatctttcccaagttttccatttgaccagcactcaataaaaagtaacacagactcctccaaccaccagtcgtggtcacttacactacgagaaaactacagtaatggggtcgaataaatatcgaacaaaataaaacaaattctataactgataatgtgctaaggtattaaaacttataatcaaaaatatgtacaacagcgtttggaaaatgatttccatttttcactggttttttcgactgcagcagctccttttaatgaacgaacaaacagtcggaccaacagaggattacgctgccaatggacagtgacttgcaccccgccatcccgagtcgagttaagtaaacaactggcgcgtccttgtccacttttagtcctgcgcccccccgcacttgccccttcgagtgttaattgtgtgcgtgatttaagcgtcgacggggcaggggagacagtcgagatccggagccacccgccgaccatttcgaataattgctttttgattgagttcaatgctgcggagcatttcctccgcgctaacttaaatttgaatgtccaatttaattgcacccgtcgagtgaagcgcatccgagcatttttgttcctctaaagtgaagctatgctatatccactggaactgccaagagcccgtcgtccactttacagggattacggcggcaaatcggggctcatccagacgcagcgggacgcgaggaagaacagtcgattgggaaaactatggcacttcatgctgccatatctcaaggattacgcagcggagtcctccgtgcacggcatacgatatctggccgatccgaagatgagaaagttcgagaggtgagctgcaccaaaagatctaacctttttcgaatcaatctctagctatttgaacatcagggtgatttggctgctgattctgctgaccaccagcataggtgccatcgtggtttatgtggacctcaacgaactttatcaaacggtgcgcatacagaccaccattaagaacacgatgctcccgatattccgcataccattcccctcgattggtctctgtccgaggaaccgcctgaactggaaaatactggagaccgaggcagttgatcacttcctgggagccaacgtttctgctgcccaaaaggacctcttcgtaaagttcttcactgcggcaggcgatccacacttgtcgcgcctcaatgaaatgtccaacttctttgggaacaaaactctgactgatgagcttcacatgctagatcatctcgaccttcgcgaggtctacaaattcattcagtttaggtgccaggacctctttcacacctgccgctggcggggaaacccagtgaactgctgcgaagttattgaatatcagttcacagaagccggattgtgttttgtcttcaacacggaaatcagtccggcatcgcgacaaaaagctgtgagtaaacgcatccatccacacaccatgggaataataaaggacaaattaataattaaccactccagagggaagacaaatattacccgctccgcaccccgcattatggcgagggctccggcctggatctctttctgcggctcaacagatccttcattcgacctggaaagcggggcatcaatgtgatgatcaagcagccgcagcagtggagcgacgtggtgcgccacgtgccacatgaggcgcacaccaggattagcataacaccccgtttcacagtcacggatgaacgaacccggacggtgactccggagatcagaagatgtatctttggcgatgaggtcgacaatccgcactacaagaattttccagactttgagtactgggtgggaaactgccggagcaggtgccatcaggagcatgtcctcaatctgtgcaagtgctctccctcgatcttttttcccatctcagataaaggtaacttaagatctactgcagatacataattctatatatatttctcttcacagataactttactgcatgcaaagcctcagacttcaagtgtctatacgacaacagatgtaagatatcccttcaaggacatttcatgtcaaataatttaaaccttttccaaatagttacctttagcattgaacggcatcccgaggaggacgattttgttaaaaatccttttaaggaaagcatgatctgcgactgcttcaccagctgcagtcagctggttttcgaccgggttttcactactaccacgcttgagtaagtgaatcctatgtgtgtaatccactgcaatttctttaacaatttaaaaaatcctgtgcagtaataatgaaacggacacagaggcgggcacaatgcgcttagatattttctaccaatccggttggtttatccaataccaaaccaacatgagatttacctttgtggaactactaggttggctatacttatctaataaagtatcatcttaaatttttattttatcatttcagctagctttggtggcataatcggactgtttttgggagcctccttactgagtgcctttgagttggcctactacttctccatcggcctctatttgtacattcatggcaagagaaagttaagaaaaccagaacccggcgtattaactattcaatttggccagagaaaaataacaccaattaaattttgacattaaacatttaataaatacagcatatcattaccacacattctttctgtagttaaaaggatgcctcaatttcctgtcattggtatccttgtgggcagcgggattctcagccagatggccaacttcgttccttaggtagccctttaaattgacccacttagccttcaggtgcttaaataagaccccatagtactggtggtcatatagatgcatagcaagtcccacagtaaggtagtagatcaactcgaaggcactgaccatagaagcacccaagcaaagtccaaagattccacccagattggctgcgaatatacgagatatatgagtggttcgccatgctgaatctcttaccaattagatcgataatggtaaactccaggcttgtgcgatacaaaggtgtggtctccacttggtagtgcacatccaccctgaagagtttctgatgcggatccttgggtctgcaaagaatggtttcagatatctcaagaaatcaaagaagggttccattcaagtttcatacagtttatgggctgacaaaggcagtgtggtggtggaagtataatagtcgagcaggtagcagtccaccaagcaggaacaggtcattcccagcttggtggcactgaaaagggcatcctcgtcccttcgcttgtcgtagctgaagatgtctgcaacagatgggttttatttccagaattaatttattcccttatatgtatctcctaccattgtgacgcgcaaggcagcgcaggctgactgcgttgcaatccggaactgaaagaaaatattgggactatattatataataatcacatcataatcatattatattttttaagaaaagagtaattagacttacctctgtggttgtacaggaagaaaatgggcaaggagcagttgcagagctgaattaggtaggactcatggcagcggttgagacagttggagagctggaagggctttccaaagttcttggccgaatcgttggcgtccagttcgccct

SEQ ID NO: 1136 - DNA, 1647 bp, DROSOPHILA
atgctatatccactggaactgccaagagcccgtcgtccactttacagggattacggcggcaaatcggggctcatccagacgcagcgggacgcgaggaagaacagtcgattgggaaaactatggcacttcatgctgccatatctcaaggattacgcagcggagtcctccgtgcacggcatacgatatctggccgatccgaagatgagaaagttcgagagggtgatttggctgctgattctgctgaccaccagcataggtgccatcgtggtttatgtggacctcaacgaactttatcaaacggtgcgcatacagaccaccattaagaacacgatgctcccgatattccgcataccattcccctcgattggtctctgtccgaggaaccgcctgaactggaaaatactggagaccgaggcagttgatcacttcctgggagccaacgtttctgctgcccaaaaggacctcttcgtaaagttcttcactgcggcaggcgatccacacttgtcgcgcctcaatgaaatgtccaacttctttgggaacaaaactctgactgatgagcttcacatgctagatcatctcgaccttcgcgaggtctacaaattcattcagtttaggtgccaggacctctttcacacctgccgctggcggggaaacccagtgaactgctgcgaagttattgaatatcagttcacagaagccggattgtgttttgtcttcaacacggaaatcagtccggcatcgcgacaaaaagctagggaagacaaatattacccgctccgcaccccgcattatggcgagggctccggcctggatctctttctgcggctcaacagatccttcattcgacctggaaagcggggcatcaatgtgatgatcaagcagccgcagcagtggagcgacgtggtgcgccacgtgccacatgaggcgcacaccaggattagcataacaccccgtttcacagtcacggatgaacgaacccggacggtgactccggagatcagaagatgtatctttggcgatgaggtcgacaatccgcactacaagaattttccagactttgagtactgggtgggaaactgccggagcaggtgccatcaggagcatgtcctcaatctgtgcaagtgctctccctcgatcttttttcccatctcagataaagataactttactgcatgcaaagcctcagacttcaagtgtctatacgacaacagatttacctttagcattgaacggcatcccgaggaggacgattttgttaaaaatccttttaaggaaagcatgatctgcgactgcttcaccagctgcagtcagctggttttcgaccgggttttcactactaccacgcttgataataatgaaacggacacagaggcgggcacaatgcgcttagatattttctaccaatccggttggtttatccaataccaaaccaacatgagatttacctttgtggaactactagctagctttggtggcataatcggactgtttttgggagcctccttactgagtgcctttgagttggcctactacttctccatcggcctctatttgtacattcatggcaagagaaagttaagaaaaccagaacccggcgtattaactattcaatttggccagagaaaaataacaccaattaaattttga

SEQ ID NO: 1137 - protein, 548 aa, DROSOPHILA
MLYPLELPRARRPLYRDYGGKSGLIQTQRDARKNSRLGKLWHFMLPYLKDYAAESSVHGIRYLADPKMRKFERVIWLLILLTTSIGAIVVYVDLNELYQTVRIQTTIKNTMLPIFRIPFPSIGLCPRNRLNWKILETEAVDHFLGANVSAAQKDLFVKFFTAAGDPHLSRLNEMSNFFGNKTLTDELHMLDHLDLREVYKFIQFRCQDLFHTCRWRGNPVNCCEVIEYQFTEAGLCFVFNTEISPASRQKAREDKYYPLRTPHYGEGSGLDLFLRLNRSFIRPGKRGINVMIKQPQQWSDVVRHVPHEAHTRISITPRFTVTDERTRTVTPEIRRCIFGDEVDNPHYKNFPDFEYWVGNCRSRCHQEHVLNLCKCSPSIFFPISDKDNFTACKASDFKCLYDNRFTFSIERHPEEDDFVKNPFKESMICDCFTSCSQLVFDRVFTTTTLDNNETDTEAGTMRLDIFYQSGWFIQYQTNMRFTFVELLASFGGIIGLFLGASLLSAFELAYYFSIGLYLYIHGKRKLRKPEPGVLTIQFGQRKITPIKF

SEQ ID NO: 1138 - DNA, 4787 bp, DROSOPHILA
gttttaaaaagaaaaagacttttcttttcttcttttgtttgcatttgtccaggaaaaaagctcttttcggcggatggttctgataaatatttaacaatataaaagttgcttttgccggtccttcggcgttgttgttccctcacccacacttgcttcggcactgaatccgctccgaaaggccagcatctctctcggcattcttgcaatccagggatttctacccaccaaacaaggtcctttgaatccgtatagctcggcatgcaaataaatcgggcgattgagctcagaaatacctgtattttactaattgttaagagcctagagtaaaaatacagataaactaccattcttttactgtcaaattaagcttcaaattcgaaattcgataagtaaccgatatttatcgataggcaaaggattaccctcgcacatacgcgatccgctatagccatctcgctccatcaataatttaccgttaatatagcgggctttactcagaaacatcaaaaatatttaacgactttaattgtagcattcgctgcgttaaattgtttatcgcactttctgcttcctgcgcatgtgcaggaaattagtcagactatttcggtgattgccccattctggcgtgtattggtgagagcatagaacttacactgccctcctatgatatacatatgcatgcttttttcgcttttaaataaactaattaatagactagtaaaagaaggatatacggtaatgaacctgtgaacccttaggcggaaaactattgctgaatttacatttcatccctcttttaaaatcagctagtgcaacataacggttcttggtgtgataaatttttgcgctcactgtttgcagccgcccttatctttcgctttttggtggtgtgcgtgagcgctatgaaatgacataagtgggcacacaacacagacacacacccctctgaggggggcacatggatacgaaaaagaaccgttcatttgcttttgtgccgttgacaattgacattcaatcgctttttccatttgtttttattttcccccttctaccctaagtttctcctttcaaagaaaacgcatttggaatacaaatcaggcaaaaaacacgcgtacataaatcgagtaatcgaaaatcagtggcgatttcgaagggtgtgtgtgtgtgtagaattactacaacacaccacaaatacagttcgaaaaggcagcgcagtcggcagaggcgaaaaaaaagcagcggcgtcagcatttccatttcggcattgcagctcgaaaatcgtagaatcagaaactaatcagccggcagaggctatagcagtcgaccgatcgcaatcgcaccatatagtacatacaataggtaccattgcctaggagtaccaggaaccaggaaccactaatctccatcatcaacatcatggaggagaacaactcgcaagtgctgagcctgctgggcggtctggccatcggaatcgtgggcttccaggtcttccggaaggtcctgccctggatttacgccaatgttgttggccccaaggtctttggctcctcggtggatctctccaaaatgggcgagtgggcaggtgagtcggttgccatggaaaaacatgccggaaaggagcggaaacggggtcgattccgagtgcacagtgaaaaaatgaatagcaagtttgctaaagaagtgtagttaaaaagattaaagacccttttacaattaaattgtgaagaaagggaatttccaaattgcaaacactctactttcaagttttccaattttgcattaactgcctaaaggaatacactatatatctttccaaaatggagttcagtacttttttcactgtgaccgataagatcgttccccacgccccataaatccactgataacccacagaactattggctaactttttcgactttcagttgtcaccgggtcgaccgatggaattggcaaggcctacgccaaggaggtatgtacacaaagatgacatggaagggctgccccaatcttgaccagcgcaagcaaagtccgtccaagctcgaccgatgattatagtaaaatgggaaacgggtcaagcaaacaaacaaacaaaaaacgatagtaataatgagcaattagtaattactaattaccgaattgagtgtcgcccacgatgacttggacattggtttagcggtcgccaatgcattagccaagtgaatctgcactttgaaatcgatcttcagtcaacagtccagtcgcaaacagtccctaatagtgtttgcttgactgcaaatcgctacatttgtacttttcgttatttatttttacaaagtgcaatcgcagttgatttttctaccttttgtggtaatttttttttttttttgccagttttattttgtaatacacagacttggagcaaacgaagctagaagctatagggaacacgtgtcccctgaatggcaattactttatagagtggagcacagggccccgatcgaagcttgtgccaaattagcattcggcgtgcgtcgaacgcacagaaaatggttcaatgttcacacccaatttctattcatatacacgcttagtacacttaaatgacttcctgttcttaaaatctacgggttactcgtctttgaaactcctgctttaggtagaaacgttcagtgttcccattccaaagcaccattgctttttatctctgacctaagaatttactatccaaaagtacgtaaatatgagcaggctaataaatatttaatcactttcagttggctcgcaggggcttgaaactggtgctgattagtagatccctggagaaactgaatgtggtggccaaggagataggtaagtctgctcactaaaatacagttaacaacttcaactaacaactgctctttgcggtctactttcaggcgataaatacggtgtggaggtgcgtgtgatcgatgtggacttcaccggcggtgacgagatctacgataagatccgcgaaaagaccactggcctcaatgtcggagtgctggtcaacaacgtgggcatcagctacggccatcccgagtactttctggactgctacaaagccgatcccccattcctgcgcaacattgtggctgccaatatccactcggtgacgcacatgaccgcactttttctacccggcatgattagccagcgacgtggtgtgatcataaatgtatcgtccaccgccggagtcattcctaatccgctgctgagcgtgtacagttccaccaaggtgagtggatatcatcagaagtgatagaaggctaattactaatacctataatttgcaggcctttgtgaacaaattcagtgatgacctgcagacggagtacaaggagcacggcatcctcatccagagcgtccagccgggctttgtggccacaaatatgtctaagatccgaaaggctagcgtgtttgctccctcgccggaaacgtatgtccgctcggcgctgtccaccctgggcattgccacccagacggcgggctatctgccgcatgctctactccagctggtcatccacttcacggaggcggtgttcggcgaacagttcgcacgcaacatcgttatgaagaacatcctgggcacccggaaacgtgccctgcgccgcctggccaaggaacagtagattattgaggatgaatacggcggaggaggcatttaatgggaatcggttgggatgatgagtgggtcagttgggttgtggggaaaatccggctagtcaaatagcttacgtaattaccgcgtgtcatacgaatccacaaacagatagcttgaaataccaaaaaaaaaaacatttttccgaaataaactaagtttagttagtttttgtcattaattagcattgaagattcgcaaacagccatgtcatgtaaacaataaaaaatgtgttactagatatatgtatatatctagtttccaatgataaataacgccttttatttgcagtcctttattttgtatttaacttcttatttgttcttgctagcgatttttctttttccctatgatttttcatgtttttcggatccaatttgaatttgaattggatgtgtcgataacggcaatagctatcgattggtcatcgataggcgcgcccttcggctaatcggcgagatgggaatgacagaaagagatacaacacttcgcgcagggcgaagaagcaaagcaaagggcaaaattcataaacataacagtaaagatagtgtatagccgggcgtgaaatgtaatgaatcggattcatgacgtgacgtgttatcagggccagcccaatcccaactgcgcagcagcagcgacagcaacaacaataacaacaacacatcaagctgaatcgaaggagcgtgtaatcagtaatcagagtcgcttgttttgatttcctttcctcggaaacgaatcaacacgaaacgagacgagacgattcgaaacgaaatgaaatcaaaactccgctccggataaagctggtcaaaccaatcaacttgttgcggatccgcagcgtcgcccagtattgatttggcgcatattgccgacagttgtggttccgatttcgattcccagccagctgtctctctgcccatatatttcaatatacgacggacgcttctccaaaagccgatacaatactgtgcgataccatatttgtattcgtttctcattcgttgacgggcgaggcggtggaggcggcggtggaggttaagaagaagaaggagaggtcgtcgacaacggagcagtagaagaaggaggaggtggtggacaccagaccaaagcggaattgacgcaattgttg

SEQ ID NO: 1139 - DNA, 1537 bp, DROSOPHILA
acaattgacattcaatcgctttttccatttgtttttattttcccccttctaccctaagtttctcctttcaaagaaaacgcatttggaatacaaatcaggcaaaaaacacgcgtacataaatcgagtaatcgaaaatcagtggcgatttcgaagggtgtgtgtgtgtgtagaattactacaacacaccacaaatacagttcgaaaaggcagcgcagtcggcagaggcgaaaaaaaagcagcggcgtcagcatttccatttcggcattgcagctcgaaaatcgtagaatcagaaactaatcagccggcagaggctatagcagtcgaccgatcgcaatcgcaccatatagtacatacaataggtaccattgcctaggagtaccaggaaccaggaaccactaatctccatcatcaacatcatggaggagaacaactcgcaagtgctgagcctgctgggcggtctggccatcggaatcgtgggcttccaggtcttccggaaggtcctgccctggatttacgccaatgttgttggccccaaggtctttggctcctcggtggatctctccaaaatgggcgagtgggcagttgtcaccgggtcgaccgatggaattggcaaggcctacgccaaggagttggctcgcaggggcttgaaactggtgctgattagtagatccctggagaaactgaatgtggtggccaaggagataggcgataaatacggtgtggaggtgcgtgtgatcgatgtggacttcaccggcggtgacgagatctacgataagatccgcgaaaagaccactggcctcaatgtcggagtgctggtcaacaacgtgggcatcagctacggccatcccgagtactttctggactgctacaaagccgatcccccattcctgcgcaacattgtggctgccaatatccactcggtgacgcacatgaccgcactttttctacccggcatgattagccagcgacgtggtgtgatcataaatgtatcgtccaccgccggagtcattcctaatccgctgctgagcgtgtacagttccaccaaggcctttgtgaacaaattcagtgatgacctgcagacggagtacaaggagcacggcatcctcatccagagcgtccagccgggctttgtggccacaaatatgtctaagatccgaaaggctagcgtgtttgctccctcgccggaaacgtatgtccgctcggcgctgtccaccctgggcattgccacccagacggcgggctatctgccgcatgctctactccagctggtcatccacttcacggaggcggtgttcggcgaacagttcgcacgcaacatcgttatgaagaacatcctgggcacccggaaacgtgccctgcgccgcctggccaaggaacagtagattattgaggatgaatacggcggaggaggcatttaatgggaatcggttgggatgatgagtgggtcagttgggttgtggggaaaatccggctagtcaaatagcttacgtaattaccgcgtgtcatacgaatccacaaacagatagcttgaaatacc

SEQ ID NO: 1140 - protein, 321 aa, DROSOPHILA
MEENNSQVLSLLGGLAIGIVGFQVFRKVLPWIYANVVGPKVFGSSVDLSKMGEWAVVTGSTDGIGKAYAKELARRGLKLVLISRSLEKLNVVAKEIGDKYGVEVRVIDVDFTGGDEIYDKIREKTTGLNVGVLVNNVGISYGHPEYFLDCYKADPPFLRNIVAANIHSVTHMTALFLPGMISQRRGVIINVSSTAGVIPNPLLSVYSSTKAFVNKFSDDLQTEYKEHGILIQSVQPGFVATNMSKIRKASVFAPSPETYVRSALSTLGIATQTAGYLPHALLQLVIHFTEAVFGEQFARNIVMKNILGTRKRALRRLAKEQ

SEQ ID NO: 1141 - DNA, 4214 bp, DROSOPHILA
taacgcaacctgatgaaggatgcatttattgtaattgacagacaggcggacggacaatcttaagtggactttacaagttactgtactgtacaagttactgcgagtaaaatatgacatttttatagagttagataaacgcaggaaatattttcctcgaaaacgcttatcatatgaatgtcgacctacgctgatactgacaacagtttaggccgtattgcaacgatgattatgtattgtcacgcgattaaaatgcccccaaaacttccacaaggttatcttttaaacatttccacagcattgttaagtgttaattaatcatggttttccagcttgttgcttgtttgcttgtagttgaaggagtaggatttgtctgcgctattatcaggtgactaatgtccacttgaaaggcctaccataacaaaaacaaggaggaacagaaaagacaggtgctgcgctatatgttacccattactcaaattgcaaacagaaaaccttcggtctcagagtggaacccagcagcagaatgtaaaatttaattcacttcatatttagtttaaatgtatagcgtgtggcaatcttttggaactatctctagatgtgtttgcttttctagaagcaaaagccgtattctcaactgtttggctctcttatttcccataattccgatattataccttattttcgccgaacctgtatacctgcttacacttaccggtaacgggtatacaaataattccggatgatatttgtcgcaaaaatcggtatttttccagcaatcagaagacattcgggagtgggctaatcgctttacgtaaagcttcgctgggagtacgaaaacaatgacagtttcggttcgactcgagcaccctgagaactcatgggagctgtttgcacagcaattcaaatggccactcaaaatggccagatctcgattggagccaccttatcgactagtataaaaggcactgtcagctctccagcccgaacaaaatcgatcaaaatgcgcccgcaatcagctgcgtgtctattactggccatcgttggcttcgtgggagccaccgagtggtgggagagtggaaactactaccagatctacccgcgctccttccgggattccgacggagacggcattggcgacctgaacggggtcactgaaaagctgcagtacctgaaagacatcggcttcacgggcacatggctgtcgcccatattcaagtcgcccatggtcgactttggttacgacatatcggacttctaccagatccatcccgaatatggaaccatggaggactttgagcgaatgatcgccaaggccaaggaggtgggcattaaaatcatcctggacttcgtaccaaaccactcaagtaccgaaaacgaatggttcaccaagtctgtggacagtgaccccgtctacaaagacttctacatctggcacgatggcaagatcaacaacgagaccggtgagcgggagccgccgagcaactggaactctgagtttcgctacagcgcctgggagtggaacgaggtgcgtcagcagtactacctccaccagttcgccatccagcaggccgacctcaactatcgcaatccggccgtggttaacgagatgaagaacgttattcgcttctggctgggaaagggagtatccggattccgtatagatgcagttccctacttgtttgaggtggatctcgatcgctacaaccagtatccggacgagcctctgaccaacgactccgtgaactgtcccgaccccgatgaccactgctacacgcagcacatctatacacaggacatgccggaaacaattgacatggtgtaccagtggcgtgagttggtggatgagtttcatgtggagaacggcggagataagaggctgctgatgacggaggcgtacaccagctttgaaaacatcatgacttactatggaaatggagtcaggaatggctcccacattcccttcaactttgacttccttacgagcatcaacaacgcctctaaggccggagagtacgtagaacatattaagaagtggatggacgccatgcccgagggcgtttatgccaattgggtgctgggcaaccacgacaacaagcgagtagcctcccgatttggtgtccagcgcaccgaccttatcaacatcctgctgcagactctgcccggccacgcggtcacctacaatggagaggagctgggcatgaccgacgtctggatcagctgggaggacaccgttgatccgaatgcgtgcaactccgatcccgacaactactacgcccgatccagggatcctgcccgatctccctaccagtgggatgcctcctccaaagcaggtatgaacttatctatatttactctgcttagtatgaacaatctacactgaactaaaacatttggttaagtgcgttacaaagactccgaaatctcacctcactgaagggccatctgacattctattggaatacaaatgctaacatttttaaaagacatgacgaatgatagccgtttgaatataatagctaatcaaatacattttatatattgacgttgcagtgtgataagaagctttatatgttctgataagaaaaacatttgtgatacttctattgtactaatctaagttttacttatgtagcactgacattgcggttcttattgatattccatttatatataccactttcaggcttcaccagtgccgatcacacctggttaccagtggctgatgactacaaaaccaacaacgccctgcagcagctgcgagctccacgttcccacctgcagatcttcaagaaactggtgcgcgtgcgcaaggagccatcttttcgccagggagaactcaacattcaggcaatcgacgacgatgtgatcatctattcacggcaagtctatcaatctttaagatctttaagcttcgattactaaacgtttgtctctcgaatagacaaaagaccggaagcgatctctatgtaatcgttctcaacctgggtagcacctccaagaccttggacctgaccaagtattacgaactgggcacccaggcggaggtcattaccacgtccttgagctcccagtacatcgatggcgatgttatcaaatctacggagttcgttgccaatccctatgtgggcaccgtcctagtggctgtctaagctaattttattcaaataagtgacaataaagtagcgctgataaataaaatgtgaattatacatgtacttatcaaagtttgcaaagtcgtagcccataagcatgcaagtgtttattcatgtactatcgcatacaagcctctgcttcatgcgtagatgtagaccattttcggacttcagagtcatggatgccgacaaaattggatcatacttatggttgtgagcatcacggctcttcttctctgccggctgaagacctagagttgtgcttatatagccatccttggaaacgagctcatccagagctggcagcacctcgaaatttcgaatgattttggacaccacagtcttgatctccagcagtgcaaacttctgaccaatgcaatttcggggaccagcactaaagggcacgtactcaaacggccctggtttctcacggtcgaagcgttcgggctggaatttgtgaggatccttaaaaacacggtcattgtatcccaacataagaaggcccaagttcaaggtagtccccttcggcacaatgtcaccatctaaaaacataatcctgattactgataacgcctaaatttgtttcgaagattcaccaattacgtagtccttctcagtaaagcgaccaatgaaagggacactcggataaagacgttgcgcctcctttataaacaaatccaaatgtttcattgtggatatctcctgaaacgtggcatctcgaccaagtccagaagcgcccatcacatcgcactgctcgttaaataatttttcctgcaaacagaaagtaatatattattaaattcgcttcgtcaaaactagttcttcaaatcggttacctgttcatctggatgtcgagaaagtaagtagactgcaaaacctacaccagatgtagtagtgtcatgcccttcaaacataaaggtggaaacttcctcgtaaagctcttgggaagtcagaggacgtccatccactttggatgacagcagagtgtccaaaaatgccattttcttgcgggagaactcgtcagccttaatgccgacttcaagccctgattttcggacttcg

SEQ ID NO: 1142 - DNA, 1799 bp, DROSOPHILA
atgcgcccgcaatcagctgcgtgtctattactggccatcgttggcttcgtgggagccaccgagtggtgggagagtggaaactactaccagatctacccgcgctccttccgggattccgacggagacggcattggcgacctgaacggggtcactgaaaagctgcagtacctgaaagacatcggcttcacgggcacatggctgtcgcccatattcaagtcgcccatggtcgactttggttacgacatatcggacttctaccagatccatcccgaatatggaaccatggaggactttgagcgaatgatcgccaaggccaaggaggtgggcattaaaatcatcctggacttcgtaccaaaccactcaagtaccgaaaacgaatggttcaccaagtctgtggacagtgaccccgtctacaaagacttctacatctggcacgatggcaagatcaacaacgagaccggtgagcgggagccgccgagcaactggaactctgagtttcgctacagcgcctgggagtggaacgaggtgcgtcagcagtactacctccaccagttcgccatccagcaggccgacctcaactatcgcaatccggccgtggttaacgagatgaagaacgttattcgcttctggctgggaaagggagtatccggattccgtatagatgcagttccctacttgtttgaggtggatctcgatcgctacaaccagtatccggacgagcctctgaccaacgactccgtgaactgtcccgaccccgatgaccactgctacacgcagcacatctatacacaggacatgccggaaacaattgacatggtgtaccagtggcgtgagttggtggatgagtttcatgtggagaacggcggagataagaggctgctgatgacggaggcgtacaccagctttgaaaacatcatgacttactatggaaatggagtcaggaatggctcccacattcccttcaactttgacttccttacgagcatcaacaacgcctctaaggccggagagtacgtagaacatattaagaagtggatggacgccatgcccgagggcgtttatgccaattgggtgctgggcaaccacgacaacaagcgagtagcctcccgatttggtgtccagcgcaccgaccttatcaacatcctgctgcagactctgcccggccacgcggtcacctacaatggagaggagctgggcatgaccgacgtctggatcagctgggaggacaccgttgatccgaatgcgtgcaactccgatcccgacaactactacgcccgatccagggatcctgcccgatctccctaccagtgggatgcctcctccaaagcaggcttcaccagtgccgatcacacctggttaccagtggctgatgactacaaaaccaacaacgccctgcagcagctgcgagctccacgttcccacctgcagatcttcaagaaactggtgcgcgtgcgcaaggagccatcttttcgccagggagaactcaacattcaggcaatcgacgacgatgtgatcatctattcacgacaaaagaccggaagcgatctctatgtaatcgttctcaacctgggtagcacctccaagaccttggacctgaccaagtattacgaactgggcacccaggcggaggtcattaccacgtccttgagctcccagtacatcgatggcgatgttatcaaatctacggagttcgttgccaatccctatgtgggcaccgtcctagtggctgtctaagctaattttattcaaataagtgacaataaagtagcgctgataaataaaatgtgaattatacatgt

SEQ ID NO: 1143 - protein, 577 aa, DROSOPHILA
MRPQSAACLLLAIVGFVGATEWWESGNYYQIYPRSFRDSDGDGIGDLNGVTEKLQYLKDIGFTGTWLSPIFKSPMVDFGYDISDFYQIHPEYGTMEDFERMIAKAKEVGIKIILDFVPNHSSTENEWFTKSVDSDPVYKDFYIWHDGKINNETGEREPPSNWNSEFRYSAWEWNEVRQQYYLHQFAIQQADLNYRNPAVVNEMKNVIRFWLGKGVSGFRIDAVPYLFEVDLDRYNQYPDEPLTNDSVNCPDPDDHCYTQHIYTQDMPETIDMVYQWRELVDEFHVENGGDKRLLMTEAYTSFENIMTYYGNGVRNGSHIPFNFDFLTSINNASKAGEYVEHIKKWMDAMPEGVYANWVLGNHDNKRVASRFGVQRTDLINILLQTLPGHAVTYNGEELGMTDVWISWEDTVDPNACNSDPDNYYARSRDPARSPYQWDASSKAGFTSADHTWLPVADDYKTNNALQQLRAPRSHLQIFKKLVRVRKEPSFRQGELNIQAIDDDVIIYSRQKTGSDLYVIVLNLGSTSKTLDLTKYYELGTQAEVITTSLSSQYIDGDVIKSTEFVANPYVGTVLVAV

SEQ ID NO: 1144 - DNA, 25929 bp, DROSOPHILA
tatcctcacgcgtaacgggtacaaaaatatcaagacatttcttaaaattgtaggagtggccggtttgtaaaatttgcagcgttctttctagagtgtgcatgtcttatctaaactaaacgttaacagggacggaaagacagtcatggccatatcgactcgaccattgatcttgattaagaatatatgtatttttatagggtcggaaatgttatatatgttaaaacgttaatcaaccaagttaatagctataatacgttgagtaaaagaaaatgagagaagatggcgtaaatacaaaaacagagagcactatttttataattgatttaaaatcaattactgcttagaactttagacacatttcccttcatgtcatcgggttagtcaaggaggctgccagttggttgatgtgcccacatgtgaagctttcgttgtataggctcgagtggttgatctgatctgacagaggcaatgtgtagggaggtaattgcatatgacaagggcgtggtttctgatgtaccaattcgcatttgctatcatgcgcagcgaccgggcttggtataaaataggtgatttgtcagcaaggcaatcaaacattcacagcctaagcttccctaaaatctgctttcttaattcttttagctcttgtacttaattccagatatctagacgtttctacttttcgataataagcaagcaaagctttggagatcaaacgagctccctgatctgcaggggatgttcattcgtattggccaaatcaaggctctaaacagattaaaaggtccagaagaaagttcactaaggtgagtttctcgaacatcgaacagaggaaaaaaattcaatctctaagttgtggacgtggcagctatatgtgtttccttcccgtcataaaaaaagttttacaactttcaggaaggaggcatgaatactatggaataggaaaatattttcaaatttcattcaagaagaaatgaaaaaatactaaacaccatcgtaaaatcttgtaaaatcgttagtttattatacgcttaagtcaagaatctaggcactaattgctgctttgcgtatttattggttgccggttgcccatttcttgtataaaaatatgctcatcaggcattttgtacaattagtgctgagcagttagcaaaaattatttgttaaaataaagattgaattaaataaattcatatcaaggacatcagcatcaacggttagggtccatgcagatttggatgctggccacttgaattctggagggctttggccacctcctcttgcaatgtacttggtggctccgaaacaatatccgtatgcatagatagatactttaatttatttgtaacagctaaaagtatgatacaaattattattaatataccaaagtttgaattaaaccataattttttacctggacgaagatcaataagggaacagtgctgatcaacccaaagaaaagcggtccgacgtagctcatcaagactagcactcgagactgttgacgtgtaagaggcaagcaaaggttccagaatgagacccaactaaaaaacagcaatgaattattgataaaacgtaattttaaacgtaacgtttaaacgtaacgtaactttaaaaatgatgttatataagtttatggcattttcttcaaagcttaagactccaaaaaaatcaagaataggtctctaaacattactggatcccccaaactattaaacacatattattaatcgtcacaaaattttttattacaatttgttatttgaaagttgttattttcctcgtcactttaacggcaaaacaacgcctaaatctgtcactccaacaatgttttgaattaatttttgtcttgttcattattatcgatatgccaaaaatttggcgcgctcactagcgtatacaaaaggaatcacttttattcgcccaaatcactttttctacagacaacatttaccaaaaccttgaaaatagtcaaaggcactccattacattaaaatgtaataaaataagattttaagtattaaccacggtaaataatgttaaaatgtcgttaggaataaacgtaaccgccgctatgttgcgactatggtctataaggggactataacgttttatcttgttctacttacaatccaaaatttccagtcgttcattgtattgtatcgtacataaatgtcgtaaagctgccgaacatgttctgtaccctgcctcgttacaggcgctccattagctggcaaaattgagtgaaggtgcctaattaagaaaaaagtatatctttatttgttaaagggtatggttgtgttgggacaagctcacgtcagcgaattgtttagctcgtctcgctccatgcgcaaagcttcaattttatcctttaaaacattgcgctcctgtcgcagttgctttatgtggtccgctcccttttgtagcatggctgccttacttaacttggcgttgggatttagctgaagctgtggtatgagcgcgtgcagagtgtcaaatccgttctttatgttgtaacgccgcttctgctcggcgtggatatggccagcacgacgctgcgtgtctcgcggctggaattttaggctggttgtaggagacagtggggaatcctgtgactcgtggaacgtcgattccggtgacaaactcaagctattactgcccacgttagctgtggccagcccaataccgtgtattttacttcctagagggggactgtgcaatgcagagttgacagccataggcaaggaggcggacttttttggtgagtgttgatgtgttggcaccggaaccgacaacggcgatgtgacgttagcgtaatgaaccggaggcgcattgctgttgctgttagtggtggctatggcactgacggaaggtgaatttgatgacgaactgttcgccactgctgtttgtaggcgtgaatctaaaattgtgaatatcttagcacaatttgttcggagaatacaaaaaaaagacttactcgaagtgagcagttgagccagggtgctgtttagcatgggatcgctggttgcctgctgcatttgctgagtgaccagcaggttgctgcaactatgtgcgcctaatgaagaacttcccgctccagcagcagacaccactgaagtgtgttgctggtgcatcgaattactccgcaccctcgacttgcttttggagtgatacttgggcactgcgaagggctgctcatgatgcagctggcgaccatcgggtagtttattaagggaaacattcagtggtaagctgttggagcggtagatttctttaggcaaaatggtgtttggcgaaacccatgtggctgagctgacagcagtctgtagttgctgttgctgatggttttgctgctggtgctgctgctgcaacaagctagccactgtggattggtgctgctgttgctgtgtattgttaacctgctgctgacgcgtaagctgcaaaatttgttgatttcccatgcctacgggaagggactgttgcatttgcgggggctcttgctgcagataactttgctgctgctgcgtctgcctggggacattaagaaaagttcccgtcgaggcggacttcttaaattgcggatagggcttgtagccaatagagttgtatgcattgtcgtttagtaatgacagcacatcggcatgtagaggttctaccttgacgttgagttgctgctgatgctgatagttatctgcgtaactgctaataaaactctgattattgaaggcgtttgttgcctgggccgaaaagggttgctgttgagcgagctgctgttgttgggaagcctgaaatgaagacactaccacgtgttgctgctgctggttcttctgttgttcggccaacatttgctgatacaggttcgtctggtgcattgtgggctgggccttgtcataattgtggggctcgcgtcggaatggccgctgagtgctcttggccacgcgaccgtttataacacacctattggtgttgttgtcgtttgcgctagcaggtccaaaatgcttgcctccgtgtattcgtccggacattgaacccgagtctccgagaagctgagaatcattgttggattgctgcacctgccgtgcaacagaaaatcgttgctctacctcaccgtacgatacgttatttatgggcgtgttaagctcaagcatgctagcatctacatttacagcgccattgttactgctgtttaccacatccattatgctatcgttgcaatacagcgtatgaggagcaccgacaatcgctgacaggcaatattcgtcgtttttgagcatttcagcgtcggttccctcttctggaactggaggcaagcgtgtggttggaatcaagtctgtaaaacaatgttggagtctttcttcaatttagtaaaattaacgacttttcatacctgaaaagctaatgtcgatgtcatctaaattcggttgcaagggaccaagactgggctgtataaagtccgcgatgcccgcgccgcgtgctaagaaataataagcattaaactttggcgatgtaacagtaattttttttttttgataatacgcaccgatttccctagaatctggaaatgggaatggaacgtttatagccgagaataaggtgtctgtggtccaatcgtctggcattaagttcctatcgttcagaggcgaccattccaaaaagtctaattcgcttttctgtaagtaggataatttttgtaaatttcgtaacttaacttttttcagataggcagccgtcgatgtgagaattagattacattttgttaagttatacattacactgttatatattacactgtctttggaatataataaaataaaacaagagagaatgctatagtcgagttccccgactttttcatcatttttctgggatatcgataaatattggaaaataaaatgagaacaaattttaaaaattttcaaaagtgagggcgtgtcaattttgcgcggcttgtgggcgttggactgggcgtggcaaaaagtttttgacaagtcgatagaaatttacaaggctaataaaaatatgaaaaaatataaacaaattttgcaaaagtgtgggcggtttgtaggcgttaaagtgggcgtggaaacattgccgacaaacttgcgctgcgtctatgtctctagaatttgtttgcttaatctccttctagcttttatagttcctcagatctctacgttcatatagacggacagacggatatggccagttcgactcgactattgatcctgattacgaataaatatacttcatatggtcggaaacgcttcgttctgcccgttaaccctttttaacgaatccttttgctcaacgagtaacgggtataataactattggttggacatttatgtatatagcttaagaacaagaaatttttattggaaaatgtatgatactccttacttaactaaagttcgaggaagatattaagaaatagaaagaagaaatgaattttgattgtaattgtaatctttgagggaaaataataaaaaacccaaaccatccaacataagggacccatgataaatactgtagtaaaaaagcaatcatcattatctacgaacagattcaaacaacctggcaattaacgtaattgaaatacactccttcgatgatttggtgattcgttggttagttcagtgaaatatgacaaagagcacgaatgggcacaagaaatcgaaagcttctgtttttcctgcactatcagcgctacttgggccttacaaacttggacttctcaaaatcgctgcatatttactggctccatggtacttggtcttcaactgcgattcaaattgtggtcgttggggtttttatggccgctctgttgggagcactggccgaatctctttactacatggagactaaatcccagactggcaacacctttgacaatgcagtgatactaaccacctcggtcactcaattgctagccaatctttggctccgttcgcagcagaaatcacaagtaaacctacttcaacgactttcgcaggtggtagaacttttgcaatttgagccttatgcagttccacagttccgttggttataccgtatctggctattagtgtgccttatctatggggccatggtgacgcattttggcataaattggttgacaactatgcagatcagccgtgtcctgactttgataggatttgtatataggtgcgttttggccaactttcaattcacctgttataccgggatggtggtgatcttgaaaaagctgcttcaagttcaggttaagcaactggagcacttggtgtccaccaccaccatctcaatggctggagtagccggttgtttgagaacccacgatgaaatcctactgttgggtcaaagagaactgattgccgtttatggtggagttatactatttctctttatttaccaagtcatgcagtgtatattaatattttacatcagcaacctagaggggtttcattcaagcaatgacctggttctcattttctgttggctggcaccgatgctcttctatctcatcctacctttagtcgttaatgacatacataatcaggtaagtttatgttaacgcttcaccgcccatttaataaaaacatgtgaatgtgttataatcagatgtaacgactaagtgatacttatatatttttcctttttcgaaattggttttacactttcgtcagccataaattatgttcatgtgatcctttttggtattaaaaagttgacgagttctatcgcccttaaagtatttatgttacgcagtttaaagaaattaatcattatcatcaggccatagcacaattcgtgtgtacttagttgcccaaatactttaggtacgaggtgtttgaccaagaattggcttttggaagtcaaccacataaatagcggttcagctcagtttatcaagattcaaaatggacttccaaccaggtgaactctgtgcttactaccgcctttgccgatatctagggatattctgtattgattataatcccactaaaaagaaattccgactgcggcgcagtgttctctgttacatagttcattttgccttgcaagcctacttagttggttgcatctccgtcatggtcacatattggcgtaggtgcttcaaaagcgagcttaccacgactggaaaccacttcgaccgtcttgtaatggtaattgcccttggtattctggttgtccagaatgcgtggctcatctggctgcaagccccacacctacgaattgtcaggcaaatagagttttatcgaaggaatcacttggctaatgttcgactgctcctccccaaacgtctgctttggctaattattgcaaccaatgttgtctacatggctaacttcattaagacgtgcatattcgaatggctgacggatgcttctcgactttttgtcattacctccttgggatttcctttacgatatctggttactagctttacaatgggcacatatttttgcatggtgcatattgtacgcctggtgctcgactggaatcagtcgcagattaacgcgataatagatgaatcggcagacctcaaaatgactagccccaatcgtctgcgtttacgtgtatgcctggagatgcacgatcgcctgatgctgctctgcaatgatgagatcagtcttgtctacgggtttatagcctggctgtcttggatgtttgcctcgcttgatgtaactggcgtaatttatctgactatggttattcaaactaaaaaatcaatcgttctaaaattgataacaaacgtagtgtggctttcgccaacttttatgacgtgcgccgctagcttcatgagtaaccgtgttactattcaggtatgtttaaaataattcgatccgattatagctggtgtaaatatttgggcaatgatttaatatctaagaattttaaagaccatctatgttctgattttacatgcacataatataaattatatcgactcagaactacacgtgcttaaatgctatcttagtatacctctattaatattaattagttaacaaggccgaaatagatgcgtatcgtgctatcagtcgcgctgtaacttttcaacatgccactcgccgccgagtcgggagaatttattttaacgtttaagtgccttggtttatcctgcattcgacatgagcttggaagcggtgatgtttggcatacaactaaaacagtagcactcgcccaagtgatcattaagcctggagcatacaagctcgccatttacggccaagcgggaaatacgtattttgtggccaattatggcacagcctgcctgacggtgggtctaatccatatgtacttctttttgcgccgtgccagactatcatctctaatatctcttcttctgaatcgccacgtcaccgataatgcccgaatttatgcagtgtacgcgagccgggtgtttctcaccggttttctccagatcaaggcgtttggccactctgtccgggttgcggccaacctgctacttacatatgtacatacaaccatgatattgagagctgtgcactcgaaaagaaatacctatgggatgccctgataacaacgctgctatggaatctgcctataatggtggccatcttaaagactttgcgcactgatttgatggggagagaggtatgctaggaatgttatgcactttttacccgatttcttttgttgtattttaaatatttaatatatagttatcgtaaaaaatatttgttcgaaaattcttttgtatgtatttggaaaatatcttttattgattaatccatataccaatttagtaactggataatttaataactggcccactcatcactgactctgaccatgtccgactttccgtctgtatgaacatagagaactacaacataggaactataaaacacataaacttgagtttaccatgcccacccctaatacatgccatatatgtaaaactgttacgcccaacaattgtaatattctatcgatatgcgaaaataattttaaaatttgtggctatccgatcgttaccgttatgggaaacacccacttttctagttgtatgcctttcttttacttttttaacttagtaacggttatatgataggaaagcaattcgacctatcaatctatctatcaaagtgatagatgtttgacttaaacttaatacttaatgagctaatagcttatatatacaatgttcttaaattgacacaaattgtttcaaaattaaatgctaattttgctttaagtgtttttgtaaaagattatcatatcaatttaacaattcttttgagtacatgaaagagaaaaactaatattgatacgcttactgcatatttaagtacccaaacttaatccattagggggttttatcctaagcaagataggcaaataaaactcgactgtgggtaaacaacggtctactagaccatgtccctgaagtgcttccattgacatatttttgtcgaaacaaaataatctgctttacaatattagtgattagttgattgacgcagaccaaatgaaacgcaacgcatttgaagagttgagggttcagttgcgaaccttaaaatggcttggagtcctgcggttcactatcgactttaataagtgcttagtacgggaaaatgcgtctgaggagcgcagtgcctggctgtatttgataggtgtagtgggaattacgtgcagcttgatcgtctacagcacttactttcccagtcactttattatgggaaaacacaacaccacgggcaattgctatgccctaatcaacatcaggtcctgttccattgtaacaatgctgatttacacacagctctacatacaacgttttcgattcgtcgccctcttacagtccattctacgttttaaccagatctctgggagtcacagagaagaaggaagatttgctttttattattatacacatttatccctactaatcatttgtatgctgaactatgcttatggttactggacagcaggtgttcgcttgaccacaattcctatttatctgcttcaatacggattttcatacctcttcctcggacaggtggtggtcctgtttgcctgcattcaacaaatattactttcgattttaaagtactataaccaagtagttcttaaaaatattaaatcaagcaaggagagtcgcgaattctattacaacttttgcaaatacaaccaagtaatatggctaagctataccgagatcaaccattgtttcggtttgctactattactcgtaaccggattaattctgctaatcaccccttctgggccgttctatttggtatctaccatatttgaaggacgatttcgtcagaattggcagttcagcttaatgtcgttcactgccatactttggagcttaccatggatagttttgctggttttggcaatgggcaggaatgatgtacagaaggaggttggtaaatttgtgtactccctttaaagtagcatagtggtttatttctaaaaaaaactttagcttttatagttactcgtagagtaaaagggtatgctagattttttgaaaagtatgaaaccgttagaacgaagcgttaccaaccatttaaagaatgtacaaattcttgatcaggatcagtagccgctcttctctttcgagttacctcaagtcgtgctggccatgtattatcgttgaaatctcataaaacctaaaaagttgaggctaagcatacagatcccagagacccagcgcaagtttgtttccttatgttgacacgcccagcaccacttgaggtgactcgaaagagaaatttcaacaaatttttgtcatatcgatggaaaacaaatcacaaaagtgttccaaagtctgtgactgactggtttgggcggtaagacatatgaattaaaaaaaaaaacgaaataaaatctaaaaacatttgaagtatgtttttggatggcttgtgagatctctacgtttatacagacggacatgtccagatcgactcggcaagtgatcgtgattaagaatatacttacatacggtaggaaacgcttgatatatgttttttaacgaaatatttatcactcaacaagtattaagagatttaagaaaaagggcaccagcacttttgtccgtgtattaaaagcagggactccataaggtgggggagcaattaaataaattcctaggctacaccacaaaactaatcaattaccgtgaacatactggcagtgtcatatcgtgtaaatcaacaatgaaattgtatacatattcagtaaaattgttagttcgcagtgacctatcaactgcataatgtcaaaagtctgccgggacctacgtatctatctccgtcttcttcacatcatgggcatgatgtgctggcatttcgattccgaccactgtcaactagtggccacatctggaagcgagcgctatgccgtcgtttatgctggctgtattttagtttctactacggctggctttatctttgcgcttttacatccgagtcgattccacatagccatttataaccagacgggaaatttttacgaggccgtcatatttcgcagcacgtgtgtggtgcttttcttggtttatgtgatattgtatgcatggcggcatcggtacagggatttggttcaacatatattgcgtcttaacagacgctgtgctagcagttgcacaaaccaacagtttctgcacaacataatactttacggtatgcttacgatcctctgcttcggcaactatctccacggctatactcgcgctggactggccacacttccgctggccctttgtatgttggtctatatcttcgcctttttggttttatgccttcttctgatgttctttgttagtctaaagcaagtcatgaccgcgggattgattcactacaaccaacagctttgtcagggcgatctgatctctggtcttcgaggcaggcagcagattctgaaattatgcggcggcgaactaaacgagtgcttcggcttacttatgctccccattgtagccctggtgctcctgatggcaccttcggggccgttcttcttaatcagtaccgttttagagggaaaatttcgacccgacgaatgcttgatcatgcttttgacctcctctacttgggatactccgtggatgattatgttggttctcatgttacgcactaatggcatttcagaggaagtgagttatttgggggggacaaagtcaaaaattaaatttagaaaaccaattatttaatgaaaacatttacacatgccttacaccattttttgtaggcaaataaaacagcaaagatgctgacaaaagtaccccgaaccgggactgggttggatagaatggtaagaatacacttttttacatttccttttgtacaactggtacaacgttaacgaatataatagaaaaaaaatcacttttaggtaaaaactaaattattatttttccagattgaaaaattcttactcaagaaccttcgacagaagcccattttaaccgcttatggatttttcgctctggataaaagtactttgtttaaggtaatacattttgtatctcaaaggcaaacgttgatagcttccatattaatatagctatttactgcaatcttcacgtatatggttattctggtccaattcaaggagatggaaaattccacaaagtctattaataaattttgatcacttaccgaatcatatgttaagcagcccgtagccttcgacctatagttcctgcgccatttcctgtattcggcttttataacagctgagtgccgtttccagtatttgccttcaagaacaacagtctgcgtggtttacaacagaaagaaaaagcgtgatgagaaaagaaacacggcaaattcgaattaattttccatccacaaatatattttcaaaagtatcctaacttaattagcgaattgcataatatatgactcactttgcaaaacccatttaaattgctaagcccacgctcagatctgtaatgtaatgtaaccgtgaacattcaaaaaccttattgtacatccttaaataatatacccacgcacatcttgtaaaaaaaagtttttcgcaaagcccaagaactaaaaacaatacaaagagcagatagcaatgcacgcaatgacgatgagcgtgtatgcgactataaagaatagaaaatctgttacgatcaatcgttctcgtttttattttataagctcgtccttttttttattgatttatatctttataaagggacagaaaagattgatattccgcgtttaatttctatatatgtatgtatgccgtgcaaaagaatttttcaaaaaattataactaagcaaattaagttattttgtacatcccttgaagcccttaaaattaacgaatcatgggtattaattttttcagctagaataaaactaatcaaaacaaaactaatcagtctattgctttagaacattagttttaattttaaaaatttgtttcgtaacaatctactgtctactaccatataaaaaattcaattcgtataaaatttttttttaataaaaaacaatctctaagaaaaacttcctgttgtcaaggtatttataaaatcaaacaaggaaacacaaataagactttgggacctttaagtccataatttgcgattaaaaatgttttgcattagtattcaattttaaagtaatatgtttacgttatgtaaaaactgaaaataatattcttagtctcgatttggtgcctaaactgtagaaaatctaccaaaaacgtacaattcatttttaatataatttaattttttgtattgtctttttattaatgttaatgtttaaaagttacatctttactttaatatcggtcacctcattaagaagttttcatacccggtacttgcaggtataagaaagaaagagtttcaaccccataagcatatttatatttttgatcaagttcactagcagagtcgatctggacatgtgtctctatccgtccgtctgtccgtcaaaatctctggaattatagaaggttgaggttaaaaaaaatgctgattctacaatattttctcatgccataacaagattccttgaaattatgcaaaaggtggagcgaagcgtttccggacctatgaagtatatttattattaatcaggatcaatatcagggtcgatctggctatgtttgcatttgcacacaaaaaagctacttttgagaaaaaagagcgaacacaaaccttgcacatttctcaatatttttcatattatcataatttgtcttgctaatttgtttcttgtttctgaataccccataacccctaaccgaccaacactgcctattctttaaaaagatgttttgaatattatttgattatatatctcattatttgcctggccaaattctccctcgcactcccactttcttaggaacgggtatctgatagtcgtcgaactcgattctagtggtttctcttgttatggttgataatacaaacatttattgaaatacaaaaaataagatcattattaaaatttcagggaaaatagtcgaacgataacaacaaaaatgtttatacattctggtacttatgctcaatctcagtttataaataaaaatgcccccctccaaaaggttcatgacggctaaaaataacactgcaaaaagtcccactgctcttatcacttgtcgcaagagagaatacgccggaaagtagacggtagactcacggcaatccatggggtccaagctgtatctaaccctggtatttaatggcgtcgacgatcacgccgcaatcgagtgatgccttttttccagcagcgtaagccacctaccggtcagtgatttttagagagggtgtgctttataccctcggaaagtagtgttttgtcgatatcaatccaggcgtgcgccacatttcacaaggaattttacgtttatgatgcgcatcgatggtacgaaatgaactgatccatggcatttaaagtagtaaaattacggaagcaatgactgttgctgacaatattacatgtacatacatatataaatatatacaagtctacacatttgaacaattttcaaattttttctcatattatttcccaatatctatcgatatcccagaaaaattataaaatttcgcgttcgcattcacactagccgagtaacggtcagatgagatgatcgggaaactcgactatagcattttctcctgattttattttactcatttaaaattggaagggtacattgtgttcattgaagaatgtgttacaaatgtctggcttttatctgttaaagattaagttccatcatacacatttgaatcctctaatgacttttgcttctacgagtatttaaaatgaagtttatttttattatactataaaatgcctactagattaactagaccaccgatagatttgttgcaaagtacgtaacagttataaagatgtacgtgctttgtcttgatcaggatcactagccgtgtcgatatggccatatccgtttgtccgtatgaacgtcgaggttttggggataatataagaactaacagatatttgttcaatataattttagaacttatggacagtgatagcgttactactgcttacttgttagcttttatttttctgttcatactgttacagatcatgagcaaattgacttgggtagttatcctgaatacacataggaccggaaacgcattcatctacctcatttatatttatcagcccatctagtataactttttattgttcaaatgaagggtttaaatacagcattacctaacatgtatcatcaacaaaagtatcatcaagaagaaatcttcacaaccaacaagaaagaacacgacacacagatattattcaggtaaaggaagtccgaacaatttgttccaacggtagaaattggcaagaatgcaaaaataaacagtgttaagtttgggagtttacgttttaggcgcaacagaataaaccttctagttaatacgtataaagtgtgtgtattcttgcttaagatcaccagccaggtcgatatggtaatttccgtccggctgtacatacatataaacgctttgattcgggaactatgttaaataatagaacgttgaaattatgcagtttctaattacgccaaggttttgcaattaatgtaaagaattttgctacgctcgtgttaatcccatttatcaattagttttgaggttctacaaatacgatgtacaactgtgatcccattttatattattcttaaagaaaatatttcgtcttttcccactataataaaacataaatgtagtaataagatcaattcattaaattaatctaacataaacaattttaattggaatcgcaggaaatactgtttacgtcaaataatttttctcagaacttcttacgacactttgttcgtggccaaattatttaaaaggatgccagttggctatacccaaatctacaggtacttacttgaggattactatgtatatcaacgtccagcggcgacgcaaattgacacaccggggttctgcgcttttgtatgactgcaaaaatggaaaacacacaaacaccgtttagtatggaaaacataaaaaacgacgtgataagattctggggatagatagagatagtgagttccccagagatgacaaaatgtgtcagaaacacgtgtcgttttaccagtggttcttcctaacaactatctggaaagctgtgccgtagccaacaattgcctaaaagagcaagctgctcttaattcttactttaggccttaggcatatggatacaaagaataccctagtgtatttgaatcagcaaaggaaacattgagaacacttcgttaacactaacatgttgaataaagtggaataaaaaaatggtttttaaaaaattggttctaaatggtaataaggctgagaaaaatctttttgaaataaataaagaataaaaaagtatgtgactgttctgctattttcagatataacaacagatttctttaattttaaaaaagtatctttttctctttgttagcgaattttgaatttaaacataacaagagagaatactatagtcgaattccccgactgtcagatacccgttactcggctagtgtgaatgcgaacacgaaatttcataatttttctggaatatcgatagatattggcgaataaaatgaaaaaatttaaaaattgttcagaagtgtggcgtgaccgctttggcggctttagggcgttaaagtgggcatggcaaaaagttgtttggcaaatcaatagaaatttaagagactaatgaaattatgttatattaaaataatgaaattatgaaaaagtatccaacaatttttcaaaaaagtgggcgtggcagttttggtcggttttatgtcgtaagagtgggcgtggcagcatgggtcaacaaacttgcgctgcgtctatgtctctagaatctgtatgatgaatcttttacagttcctgagatctgtgagttcatacggacagtcgaacagttcgacagacggacatcgccaaatcgattcggctattaatcctgatcaaaaatatatatactatggtcggaaacgcttccttctgcctgttacatacttttcaacgaattcatacaaaatatacaacatttttggtgttaaaggtcccaaggtcccttgaatcttaccttgttaagagataattatacccgttccgcgtagactaagaggtatactagattcgttgaaaactatacttgaacactatataaagtatatatattcttgatcaggatccatagccgaatcgatctagccatgtccgtctgttcgactatccgtatgaacttcaagatctcaggaactataaaagctagaacgttaagattcagcatacagattctagagacatagacgcagcgcaagtttgttgacccatgttacccactctaacgcgcacaaaaccgccacgcccacatttttgaaccatttttcaatattttttcataatttaattagtcttgtaaacttctatcgatttgccaaacaactttttaccacgcccactcactttggaataatttttttctcattttattacccaacatcccagaaaaattatgtgttttcgcctttgcattcacactagcgttaacgggtatctcatagtcggagaactcaactatagcattctttcttatttatctttattttttttgagggtttacgaatttgaaccttttgggtaacattttatatagtactttagaagggtgaaaacaaactaaaaccatgctattttttaaacgaattcgaactattctttctcattaaaagaccccaaaaaaaaccttgatttccggtatctcaggttataacctgtagactacagaattttattcggaaatacaggtaattttttgggttactaatttttttttgcaagtatatggtaaataaatttggtttgtttatagaaataaatggggaattttcccacagacagttatataaacttatataaaaagtgtggacttagatttcttttgacacatcgaaaatccggaagactaattttgtgaattaatagatctctaccgaaattcgtgtgtattcatttaaaacatggtttagtcacgattaacacaacccaaaaacgcgcaggtaaaaaaatatggaattgcaacagattatatgcttccattatctctccaggaccttcacatatgaggtatttacgaatggtatacatgaacttagataataacaaaaattaattatatttgctgatgaggcggttgaagtgcctacctataaataagcaaaaaatttccatttgcctttgtcgccgacatctagaagagcgaagagataatcactgccctcacgatggctttgtaacacagggctgccggcctcccactcgcacaaatgatgtaacggaaaattttggaaatactatcagcagaaaactgtgtcagactgtcggtcgactagctgtcaagctaaatgcatagtcaaaccgattcgatgtttgtctgacttatgctttatgtctttacttctgcttttgaaagtgctaatcaatgggatacttgaaactgcgactcactcctaccgcggctgaagtgcgcgggaaactccgaggctgtctagacgatcgagcgggtggtcagtgaagcctagcagcgccgaaatcatatgtttagcttttaattacacgcaaggcaaaaacaaaagtcagcagagaacaaaaatgaaatgacaatcggctagggtccagactatgataagggccagcggcacagccgaccagactatgataagagcccgaagtggcgaaggcgactgaggagtcggcgatgcccgcttggcaacgctaattcatccagtcttccgtccagccagctagacggggatcatgcctagaatctaccccgaacaagctgacaactattggccgaaaattgccaaaagttagccagcagcttcaaaagcgagagcggatgagaagataacttgtgcttttaaagcttatggaggtctctggctcgctgattcactcagattttttttgttcatgaggcttttgcacgtgtagcacttttcaaagaaatgatcataatattagtttatttgtttggaatattttaccaatgccgagtgcccaacatgccgtaacaagcaaatagtttggagccttatcatctccttatcacaaggtaacgacaactacttccatatttttattaggcatttgggaaaccctagccaaattttattttaattaaatcatttatttgggtatgatgttgcttgcagttcaagtatactatgaagggcttagtatattactcacactgcatgtgccagcaacgccagatgacattgttcaggcgaattttgtccttccaccgaagtcgtactcctttgaaatgattccatttgggtgaggttagtttttgactgtaaattaaaagttattttgtgttcaataaagtaaaatatacaattgagtaaaaattaaattaaatattttataatatggaaaatcagttacaaaacaaatagatttcttagtaaatatttaatcaatgcggagattactttataaaaatagactgaccctcagccctaagccatttgcaatctttttaaaatctacctatatacacgcttctgtgtatacatttgtatcggttttaacaaaaacatctattaaatagtgtgagtaaatatatattcaggaagaaatgcctagtttctagctaaattgtttccaagcaattatagggaattatagacataaattattccgactgttttttttttaaattattttttaccaatttttgtttaaatggagcaatataatatgaaatacataaaaactgtgataaaagttttaataataattgtttttaaaccatttcatatggtattatatgtattttaatcagaactttaaaagtgtttttgtcctcataaagtaactttaaaaatgtttttgtcctcataaagtaatatatataaagcatataactgtggacggcagttcacataggggcgtctactattgtggacaacggtcctgtagtaatgaaagtcctatactaaaagaaatcttaaacgtatcgaaaggtatcgcaaaaactaataggacttttaaaaaattaaatggttcaacggaaaaaaatttgtgaagatttaacagttgaaagtaccagctaatgtgatattattaaacaaaaaaaatttaaaaaccttttaatatttaaatttttgcccgaccaagctattgaaactagaggactgtgctgtgtcggcaataataagttttttttcgactatctgatcaaaggtttgacgagataaaaaactagcaaatgcgatgaaacaaaagaaaaatcatacaatgcgtatttttaagaacacgtttttctgtgggtaattaatttccactagattaaaattgtctaaattgttactttcccactttctcagcatcatcttatgaaacatatgttctacctattgataggtgtaccgttctgaaaggacaccaacattatatatatacccgttattaggaccaatagccgaatcgatctggtcctgtgcgtctgtccgtccgtatgaacgtcgagattcataatgcaacacacgccctaaatttccacgaccacatttttgaaaaattgttggatattgttttcataattttattaatctggtaaatttctatcgatttgccaaaccactttttgcaacgcccaatctaacgccctaaagccgcccataagtgccgcgactacatttttaaaaatttttggatatttttcataagtttattagtcaaaaaaccaccccaaattgacacgcccacacttttgaagaatgtttagatttttcttcgttttatggtttgtcttgccagtattatggtatatcaaaaaccccttctcagatctacaaaacgatcatgcgaaacatttaagcaattttgaaatttgttccttagtttattccccaatatctatcgatatcgtagaaaaatgatgcaattttgatttcgcattcccactggcacttgtcccgaattggacttaaatatgtatatgtaaatatgaatgttgtgtattaaaaatcatggaattagaagagaaacaaaactttaaattttattaaaatgggtagccgcttcaaaaaaaaaaaaaaaaaacagcaaaaagtaaaataaacaagagagaatgctatagtctagttccccaaatatcagatacccgttactcaggtagtgattcgaacgccaaatttcaaaatttttctgggatatcgatagatattggggaataaaatgagaatacatttaaaaattgttctaaagactggcagctttatggcgttgagtggtggtggcaaaaagtttttttggaaaatcgatagaaatttaaaattatgaaataatatccaacaatttttcaaaaatgtgtgcgtgccagttttgtgcggttttagggcgttagaataggcgtggtaaaaagttttgttgtaaatggatagaaatgtacaagactaattaaaaaatgaaaaaattattcaaaaatgtgggcgtggcagttttgggcggtttagggcgttagagtgggcgtggaaaacaatttttttccaaatcgttagaaatttacaagactaataaaaatgtgaaaaaatatgatcacgtttttcaaaagtgtgggcgtgacagttttcagctagtgttagagtgggcgtggcaacatggctaaacaaagttgcggttttaacttggctaaacttctagattttatagggttcctgagatctcgacgttcaggcggacatggctagattgacccagctatagatcctgatcaagtcggaaacgcccgttgcatacttttcaactaatctagtatctagaatcgtagagtagaagcgtataacaattacgttgttctctcttttaatatgttatttagacaaaaaaagcgtttggaaatgtctttccatcgaaacttaacaccatcaaaacaaccggcgggcgtgcaaaatgaagcatgttataaatttaaatttatatttttcctcgtgtatattgtagtcgctaaagcgcatccaggagaacgcacactctcctagagcacttagtcacttagtgaaaaacaacaatgaaatcacatggtcgtgaaaaatgtaaggaaatccgaattcgtagttattaacaatacgcgtatatatatggatcatacaaacaactaccgtagctgttttatagtgactaaaaaccatcattataacaaacaaatttaaaatttaaaactgtataacactttttttaaacaaatccttttcgttctttaaaaaaaaacaaaaaacaatagcttcacaattcagatttttagttgataaggtctcagataataatatgttgtaagcaaattgcatttcattttgcaaaattaattcattctgatattgctttggcaatactttaatattttctctatgattgcgctgtcgtttgcagaaatgggagaagtaacagaaagaggggtataaagggtggcagaggagcgattgaggcaatgtggggccaaagtaacctgagcagcgacgtcacgtctcaacatgtgccgcgattatgggaccgaagcggtccaagctttttcgtttgctggattttcgttggccagttgagcgttatcacgctcgaaacgcgtgaacaagcgggaaacaacatttcataaatcttcagggccccggtgttcggttgtggtctcgagtacgagtcttcaactcacctgtaggccagattcatgcacttgaagagtttggtgagcgaggtctctatctccaggtgggaggtcaccatgctcatgctgctctcgtcgccctcctggtccatggcgctgaagtgggccactgtttggggtacgtaaagctgcacgtcacgacatgtgttggttggctcgcccggcttgcccagaccggggtcctcagggtctagcatcttcacctcgccgtcatcctctaggtcgtcctgcgcctcctctgcctcgaagtgcgagaccataaactggccggagtggatagactcccgctccgccttgagcaggtctgccgtagcctcggcggaccctgacgccgaagcacctactcccgtttcgtactgcaattgctggaagttttggcacagagactgttgcagataaggctgctggtgcagctgaggcagctggtgctgctggtggggaaacatttggcttgtgcgttggtatccctcgtgtttattcagcatcattttcaacaggtgccaggggatgcctatgcaaatagtttactgttgagccaaaattttggcggttgcagattatgtcgatatggcgagggcacatttaatggttttttaatgtctctcgcgtagtaaaggcttttaaaagctggtgctgacccttttttaatttggatggggtttttccatcatttcaaaatatgtaaacgttcgcagactataaaaaaaaatatgttttgtcttgcctcgtggttaacacatttattaattctctcatctagtgtttgtccttgtcattctattaactaaattactaaaataagcgattatttgatagagacatagcacggttttaagattttgatttgtttacaatgcccgacaccttcagcttttcgtcatcgacacctgtccaattgttgctttttccggagcgaagcttctctaatggcaaacacgccccgcttttgccgttatatgcgtcacacagcacaataacaacaattttcgcacacacacacacacacacaatcgcggcggggttggctggggatacggacgtcagaacgagacgtcagtggccgcttgtagctccttgaacagatagtgaagccccaactactcgtaaacacacgcggatctgatggaaggccaacaaggcgggcagaaccagcgcagaacgatcggtttcattccacaaacagaactgatcggagaacgaagctgcgaaacgcacataacctgtgcgccgcacacaacacaacaatgaacagctgacgcgaaatctctctctctccctacctcgctagcgttgcttatcagctaggaaaacgtacatacatatgtatatgtatgtatgtacgtgttcttctatatgcgcagatgtcaggcagcaatgttgtccccctctccactattactatatggagctcagtcgatttgactcctggcattcggccttgccatccagagtatgcactccacaagcagttctgtgtttgcacttttgacctctggctcagcgctgcctttgcattttgcctttttccgttcccactcatatacacgcgcatgcacgcgcaccacaatttcggtacaactgcaactgccccctatagcagaaacacgggcagttagcaggcacgacggactaccaataccacgcacacacgcgcaacacaaagcttctacgtagtttaatcacaatatagcacacattaacctattgcgggtagcgagccctcaccatcccatcagggttgtcaagcatttggtggctctgataaacagcaccctcttcctaaaaatggctgaaagctgcgagccgaaaaacgcaagaatgagcataatcaccccaaacgtaaagattgggaagggcagcatacgaggtcatatgtttcctgctccgaaattgcaatacaatgaatttaggacggctatttcccgtaattagtttccagttttatggaattgctattatatctttttccgacagcaccttgaaaccgcatcaataaaaagttaatgcgttgagactaataggaaaaactagaatatatacatatattatactcaaatgtaatgtgttttttaaacattgttgtgcttaagtaattaggaaaaattatgtaaaatggatattttccctttatgttcactatattgtttaagttagagaatagaatacccagaataaaattagtgatcacacatcaaaaaactatcgataaacattgaattagttccggttaaaatttaataataagtattcaaactgcacaccttgttacaaagtagtgtaactgcctaattctttatcagcagactagaggatttcgcactcccatgttcttttgcttaaatacctttctcgggcttatattagacattatactttcagagaattttttcatttgtactgttagaaggttcttaatgaaattgctgttcagttcaaaatttttatatagtcatttaataatactttacgaatgattttgtgcgctttagatttgtgagaaaaaggggtgggattatttagtagaaagtagcaaggcatttcccgatctggtaacactgattccaacactcattaccgttccaaatgaaacgcaaaaaggttcaattgttattttctctcacgatttcggcatttatattaacctaaagatggctctatagtttgcgcgcaagcaaaaacaagcagcacctaggtgcccaaacacaac

SEQ ID NO: 1145 - DNA, 4295 bp, DROSOPHILA
caataggttaatgtgtgctatattgtgattaaactacgtagaagctttgtgttgcgcgtgtgtgcgtggtattggtagtccgtcgtgcctgctaactgcccgtgtttctgctatagggggcagttgcagttgtaccgaaattgtggtgcgcgtgcatgcgcgtgtatatgagtgggaacggaaaaaggcaaaatgcaaaggcagcgctgagccagaggtcaaaagtgcaaacacagaactgcttgtggagtgcatactctggatggcaaggccgaatgccaggagtcaaatcgactgagctccatatagtaatagtggagagggggacaacattgctgcctgacatctgcgcatatagaagaacacgtacatacatacatatacatatgtatgtacgttttcctagctgataagcaacgctagcgagacaaaacatatttttttttatagtctgcgaacgtttacatattttgaaatgatggaaaaaccccatccaaattaaaaaagggtcagcaccagcttttaaaagcctttactacgcgagagacattaaaaaaccattaaatgtgccctcgccatatcgacataatctgcaaccgccaaaattttggctcaacagtaaactatttgcataggcatcccctggcacctgttgaaaatgatgctgaataaacacgagggataccaacgcacaagccaaatgtttccccaccagcagcaccagctgcctcagctgcaccagcagccttatctgcaacagtctctgtgccaaaacttccagcaattgcagtacgaaacgggagtaggtgcttcggcgtcagggtccgccgaggctacggcagacctgctcaaggcggagcgggagtctatccactccggccagtttatggtctcgcacttcgaggcagaggaggcgcaggacgacctagaggatgacggcgaggtgaagatgctagaccctgaggaccccggtctgggcaagccgggcgagccaaccaacacatgtcgtgacgtgcagctttacgtaccccaaacagtggcccacttcagcgccatggaccaggagggcgacgagagcagcatgagcatggtgacctcccacctggagatagagacctcgctcaccaaactcttcaagtgcatgaatctggcctacagtcaaaaactaacctcacccaaatggaatcatttcaaaggagtacgacttcggtggaaggacaaaattcgcctgaacaatgtcatctggcgttgctggcacatgcagttcatacaaaagcgcagaaccccggtgtgtcaatttgcgtcgccgctggacgttgatatacatagtaatcctcaaactgttgttcttgaaggcaaatactggaaacggcactcagctgttataaaagccgaatacaggaaatggcgcaggaactataggtcgaaggctacgggctgcttaacatatgattcgaaaagcgaattagactttttggaatggtcgcctctgaacgataggaacttaatgccagacgattggaccacagacaccttattctcggctataaacgttccattcccatttccagattctagggaaatcgcacgcggcgcgggcatcgcggactttatacagcccagtcttggtcccttgcaaccgaatttagatgacatcgacattagcttttcagacttgattccaaccacacgcttgcctccagttccagaagagggaaccgacgctgaaatgctcaaaaacgacgaatattgcctgtcagcgattgtcggtgctcctcatacgctgtattgcaacgatagcataatggatgtggtaaacagcagtaacaatggcgctgtaaatgtagatgctagcatgcttgagcttaacacgcccataaataacgtatcgtacggtgaggtagagcaacgattttctgttgcacggcaggtgcagcaatccaacaatgattctcagcttctcggagactcgggttcaatgtccggacgaatacacggaggcaagcattttggacctgctagcgcaaacgacaacaacaccaataggtgtgttataaacggtcgcgtggccaagagcactcagcggccattccgacgcgagccccacaattatgacaaggcccagcccacaatgcaccagacgaacctgtatcagcaaatgttggccgaacaacagaagaaccagcagcagcaacacgtggtagtgtcttcatttcaggcttcccaacaacagcagctcgctcaacagcaacccttttcggcccaggcaacaaacgccttcaataatcagagttttattagcagttacgcagataactatcagcatcagcagcaactcaacgtcaaggtagaacctctacatgccgatgtgctgtcattactaaacgacaatgcatacaactctattggctacaagccctatccgcaatttaagaagtccgcctcgacgggaacttttcttaatgtccccaggcagacgcagcagcagcaaagttatctgcagcaagagcccccgcaaatgcaacagtcccttcccgtaggcatgggaaatcaacaaattttgcagcttacgcgtcagcagcaggttaacaatacacagcaacagcagcaccaatccacagtggctagcttgttgcagcagcagcaccagcagcaaaaccatcagcaacagcaactacagactgctgtcagctcagccacatgggtttcgccaaacaccattttgcctaaagaaatctaccgctccaacagcttaccactgaatgtttcccttaataaactacccgatggtcgccagctgcatcatgagcagcccttcgcagtgcccaagtatcactccaaaagcaagtcgagggtgcggagtaattcgatgcaccagcaacacacttcagtggtgtctgctgctggagcgggaagttcttcattaggcgcacatagttgcagcaacctgctggtcactcagcaaatgcagcaggcaaccagcgatcccatgctaaacagcaccctggctcaactgctcacttcgaattcacgcctacaaacagcagtggcgaacagttcgtcatcaaattcaccttccgtcagtgccatagccaccactaacagcaacagcaatgcgcctccggttcattacgctaacgtcacatcgccgttgtcggttccggtgccaacacatcaacactcaccaaaaaagtccgcctccttgcctatggctgtcaactctgcattgcacagtccccctctaggaagtaaaatacacggtattgggctggccacagctaacgtgggcagtaatagcttgagtttgtcaccggaatcgacgttccacgagtcacaggattccccactgtctcctacaaccagcctaaaattccagccgcgagacacgcagcgtcgtgctggccatatccacgccgagcagaagcggcgttacaacataaagaacggatttgacactctgcacgcgctcataccacagcttcagctaaatcccaacgccaagttaagtaaggcagccatgctacaaaagggagcggaccacataaagcaactgcgacaggagcgcaatgttttaaaggataaaattgaagctttgcgcatggagcgagacgagctaaacaattcgctgacgtgagcttgtcccaacacaaccataccctttaacaaataaagatatacttttttcttaattaggcaccttcactcaattttgccagctaatggagcgcctgtaacgaggcagggtacagaacatgttcggcagctttacgacatttatgtacgatacaatacaatgaacgactggaaattttggattttgggtctcattctggaacctttgcttgcctcttacacgtcaacagtctcgagtgctagtcttgatgagctacgtcggaccgcttttctttgggttgatcagcactgttcccttattgatcttcgtccagctgttacaaataaattaaagtatctatctatgcatacggatattgtttcggagccaccaagtacattgcaagaggaggtggccaaagccctccagaattcaagtggccagcatccaaatctgcatggaccctaaccgttgatgctgatgtccttgatatgaatttatttaattcaatctttattttaacaaataatttttgctaactgctcagcactaattgtacaaaatgcctgatgagcatatttttatacaagaaatgggcaaccggcaaccaataaatacgcaaagcagcaattagtgcctagattcttgacttaagcgtataataaactaacgattttacaag

SEQ ID NO: 1146 - protein, 990 aa, DROSOPHILA
MLNKHEGYQRTSQMFPHQQHQLPQLHQQPYLQQSLCQNFQQLQYETGVGASASGSAEATADLLKAERESIHSGQFMVSHFEAEEAQDDLEDDGEVKMLDPEDPGLGKPGEPTNTCRDVQLYVPQTVAHFSAMDQEGDESSMSMVTSHLEIETSLTKLFKCMNLAYSQKLTSPKWNHFKGVRLRWKDKIRLNNVIWRCWHMQFIQKRRTPVCQFASPLDVDIHSNPQTVVLEGKYWKRHSAVIKAEYRKWRRNYRSKATGCLTYDSKSELDFLEWSPLNDRNLMPDDWTTDTLFSAINVPFPFPDSREIARGAGIADFIQPSLGPLQPNLDDIDISFSDLIPTTRLPPVPEEGTDAEMLKNDEYCLSAIVGAPHTLYCNDSIMDVVNSSNNGAVNVDASMLELNTPINNVSYGEVEQRFSVARQVQQSNNDSQLLGDSGSMSGRIHGGKHFGPASANDNNTNRCVINGRVAKSTQRPFRREPHNYDKAQPTMHQTNLYQQMLAEQQKNQQQQHVVVSSFQASQQQQLAQQQPFSAQATNAFNNQSFISSYADNYQHQQQLNVKVEPLHADVLSLLNDNAYNSIGYKPYPQFKKSASTGTFLNVPRQTQQQQSYLQQEPPQMQQSLPVGMGNQQILQLTRQQQVNNTQQQQHQSTVASLLQQQHQQQNHQQQQLQTAVSSATWVSPNTILPKEIYRSNSLPLNVSLNKLPDGRQLHHEQPFAVPKYHSKSKSRVRSNSMHQQHTSVVSAAGAGSSSLGAHSCSNLLVTQQMQQATSDPMLNSTLAQLLTSNSRLQTAVANSSSSNSPSVSAIATTNSNSNAPPVHYANVTSPLSVPVPTHQHSPKKSASLPMAVNSALHSPPLGSKIHGIGLATANVGSNSLSLSPESTFHESQDSPLSPTTSLKFQPRDTQRRAGHIHAEQKRRYNIKNGFDTLHALIPQLQLNPNAKLSKAAMLQKGADHIKQLRQERNVLKDKIEALRMERDELNNSLT

SEQ ID NO: 1147 - DNA, 25911 bp, DROSOPHILA
tatcctcacgcgtaacgggtacaaaaatatcaagacatttcttaaaattgtaggagtggccggtttgtaaaatttgcagcgttctttctagagtgtgcatgtcttatctaaactaaacgttaacagggacggaaagacagtcatggccatatcgactcgaccattgatcttgattaagaatatatgtatttttatagggtcggaaatgttatatatgttaaaacgttaatcaaccaagttaatagctataatacgttgagtaaaagaaaatgagagaagatggcgtaaatacaaaaacagagagcactatttttataattgatttaaaatcaattactgcttagaactttagacacatttcccttcatgtcatcgggttagtcaaggaggctgccagttggttgatgtgcccacatgtgaagctttcgttgtataggctcgagtggttgatctgatctgacagaggcaatgtgtagggaggtaattgcatatgacaagggcgtggtttctgatgtaccaattcgcatttgctatcatgcgcagcgaccgggcttggtataaaataggtgatttgtcagcaaggcaatcaaacattcacagcctaagcttccctaaaatctgctttcttaattcttttagctcttgtacttaattccagatatctagacgtttctacttttcgataataagcaagcaaagctttggagatcaaacgagctccctgatctgcaggggatgttcattcgtattggccaaatcaaggctctaaacagattaaaaggtccagaagaaagttcactaaggtgagtttctcgaacatcgaacagaggaaaaaaattcaatctctaagttgtggacgtggcagctatatgtgtttccttcccgtcataaaaaaagttttacaactttcaggaaggaggcatgaatactatggaataggaaaatattttcaaatttcattcaagaagaaatgaaaaaatactaaacaccatcgtaaaatcttgtaaaatcgttagtttattatacgcttaagtcaagaatctaggcactaattgctgctttgcgtatttattggttgccggttgcccatttcttgtataaaaatatgctcatcaggcattttgtacaattagtgctgagcagttagcaaaaattatttgttaaaataaagattgaattaaataaattcatatcaaggacatcagcatcaacggttagggtccatgcagatttggatgctggccacttgaattctggagggctttggccacctcctcttgcaatgtacttggtggctccgaaacaatatccgtatgcatagatagatactttaatttatttgtaacagctaaaagtatgatacaaattattattaatataccaaagtttgaattaaaccataattttttacctggacgaagatcaataagggaacagtgctgatcaacccaaagaaaagcggtccgacgtagctcatcaagactagcactcgagactgttgacgtgtaagaggcaagcaaaggttccagaatgagacccaactaaaaaacagcaatgaattattgataaaacgtaattttaaacgtaacgtttaaacgtaacgtaactttaaaaatgatgttatataagtttatggcattttcttcaaagcttaagactccaaaaaaatcaagaataggtctctaaacattactggatcccccaaactattaaacacatattattaatcgtcacaaaattttttattacaatttgttatttgaaagttgttattttcctcgtcactttaacggcaaaacaacgcctaaatctgtcactccaacaatgttttgaattaatttttgtcttgttcattattatcgatatgccaaaaatttggcgcgctcactagcgtatacaaaaggaatcacttttattcgcccaaatcactttttctacagacaacatttaccaaaaccttgaaaatagtcaaaggcactccattacattaaaatgtaataaaataagattttaagtattaaccacggtaaataatgttaaaatgtcgttaggaataaacgtaaccgccgctatgttgcgactatggtctataaggggactataacgttttatcttgttctacttacaatccaaaatttccagtcgttcattgtattgtatcgtacataaatgtcgtaaagctgccgaacatgttctgtaccctgcctcgttacaggcgctccattagctggcaaaattgagtgaaggtgcctaattaagaaaaaagtatatctttatttgttaaagggtatggttgtgttgggacaagctcacgtcagcgaattgtttagctcgtctcgctccatgcgcaaagcttcaattttatcctttaaaacattgcgctcctgtcgcagttgctttatgtggtccgctcccttttgtagcatggctgccttacttaacttggcgttgggatttagctgaagctgtggtatgagcgcgtgcagagtgtcaaatccgttctttatgttgtaacgccgcttctgctcggcgtggatatggccagcacgacgctgcgtgtctcgcggctggaattttaggctggttgtaggagacagtggggaatcctgtgactcgtggaacgtcgattccggtgacaaactcaagctattactgcccacgttagctgtggccagcccaataccgtgtattttacttcctagagggggactgtgcaatgcagagttgacagccataggcaaggaggcggacttttttggtgagtgttgatgtgttggcaccggaaccgacaacggcgatgtgacgttagcgtaatgaaccggaggcgcattgctgttgctgttagtggtggctatggcactgacggaaggtgaatttgatgacgaactgttcgccactgctgtttgtaggcgtgaatctaaaattgtgaatatcttagcacaatttgttcggagaatacaaaaaaaagacttactcgaagtgagcagttgagccagggtgctgtttagcatgggatcgctggttgcctgctgcatttgctgagtgaccagcaggttgctgcaactatgtgcgcctaatgaagaacttcccgctccagcagcagacaccactgaagtgtgttgctggtgcatcgaattactccgcaccctcgacttgcttttggagtgatacttgggcactgcgaagggctgctcatgatgcagctggcgaccatcgggtagtttattaagggaaacattcagtggtaagctgttggagcggtagatttctttaggcaaaatggtgtttggcgaaacccatgtggctgagctgacagcagtctgtagttgctgttgctgatggttttgctgctggtgctgctgctgcaacaagctagccactgtggattggtgctgctgttgctgtgtattgttaacctgctgctgacgcgtaagctgcaaaatttgttgatttcccatgcctacgggaagggactgttgcatttgcgggggctcttgctgcagataactttgctgctgctgcgtctgcctggggacattaagaaaagttcccgtcgaggcggacttcttaaattgcggatagggcttgtagccaatagagttgtatgcattgtcgtttagtaatgacagcacatcggcatgtagaggttctaccttgacgttgagttgctgctgatgctgatagttatctgcgtaactgctaataaaactctgattattgaaggcgtttgttgcctgggccgaaaagggttgctgttgagcgagctgctgttgttgggaagcctgaaatgaagacactaccacgtgttgctgctgctggttcttctgttgttcggccaacatttgctgatacaggttcgtctggtgcattgtgggctgggccttgtcataattgtggggctcgcgtcggaatggccgctgagtgctcttggccacgcgaccgtttataacacacctattggtgttgttgtcgtttgcgctagcaggtccaaaatgcttgcctccgtgtattcgtccggacattgaacccgagtctccgagaagctgagaatcattgttggattgctgcacctgccgtgcaacagaaaatcgttgctctacctcaccgtacgatacgttatttatgggcgtgttaagctcaagcatgctagcatctacatttacagcgccattgttactgctgtttaccacatccattatgctatcgttgcaatacagcgtatgaggagcaccgacaatcgctgacaggcaatattcgtcgtttttgagcatttcagcgtcggttccctcttctggaactggaggcaagcgtgtggttggaatcaagtctgtaaaacaatgttggagtctttcttcaatttagtaaaattaacgacttttcatacctgaaaagctaatgtcgatgtcatctaaattcggttgcaagggaccaagactgggctgtataaagtccgcgatgcccgcgccgcgtgctaagaaataataagcattaaactttggcgatgtaacagtaattttttttttttgataatacgcaccgatttccctagaatctggaaatgggaatggaacgtttatagccgagaataaggtgtctgtggtccaatcgtctggcattaagttcctatcgttcagaggcgaccattccaaaaagtctaattcgcttttctgtaagtaggataatttttgtaaatttcgtaacttaacttttttcagataggcagccgtcgatgtgagaattagattacattttgttaagttatacattacactgttatatattacactgtctttggaatataataaaataaaacaagagagaatgctatagtcgagttccccgactttttcatcatttttctgggatatcgataaatattggaaaataaaatgagaacaaattttaaaaattttcaaaagtgagggcgtgtcaattttgcgcggcttgtgggcgttggactgggcgtggcaaaaagtttttgacaagtcgatagaaatttacaaggctaataaaaatatgaaaaaatataaacaaattttgcaaaagtgtgggcggtttgtaggcgttaaagtgggcgtggaaacattgccgacaaacttgcgctgcgtctatgtctctagaatttgtttgcttaatctccttctagcttttatagttcctcagatctctacgttcatatagacggacagacggatatggccagttcgactcgactattgatcctgattacgaataaatatacttcatatggtcggaaacgcttcgttctgcccgttaaccctttttaacgaatccttttgctcaacgagtaacgggtataataactattggttggacatttatgtatatagcttaagaacaagaaatttttattggaaaatgtatgatactccttacttaactaaagttcgaggaagatattaagaaatagaaagaagaaatgaattttgattgtaattgtaatctttgagggaaaataataaaaaacccaaaccatccaacataagggacccatgataaatactgtagtaaaaaagcaatcatcattatctacgaacagattcaaacaacctggcaattaacgtaattgaaatacactccttcgatgatttggtgattcgttggttagttcagtgaaatatgacaaagagcacgaatgggcacaagaaatcgaaagcttctgtttttcctgcactatcagcgctacttgggccttacaaacttggacttctcaaaatcgctgcatatttactggctccatggtacttggtcttcaactgcgattcaaattgtggtcgttggggtttttatggccgctctgttgggagcactggccgaatctctttactacatggagactaaatcccagactggcaacacctttgacaatgcagtgatactaaccacctcggtcactcaattgctagccaatctttggctccgttcgcagcagaaatcacaagtaaacctacttcaacgactttcgcaggtggtagaacttttgcaatttgagccttatgcagttccacagttccgttggttataccgtatctggctattagtgtgccttatctatggggccatggtgacgcattttggcataaattggttgacaactatgcagatcagccgtgtcctgactttgataggatttgtatataggtgcgttttggccaactttcaattcacctgttataccgggatggtggtgatcttgaaaaagctgcttcaagttcaggttaagcaactggagcacttggtgtccaccaccaccatctcaatggctggagtagccggttgtttgagaacccacgatgaaatcctactgttgggtcaaagagaactgattgccgtttatggtggagttatactatttctctttatttaccaagtcatgcagtgtatattaatattttacatcagcaacctagaggggtttcattcaagcaatgacctggttctcattttctgttggctggcaccgatgctcttctatctcatcctacctttagtcgttaatgacatacataatcaggtaagtttatgttaacgcttcaccgcccatttaataaaaacatgtgaatgtgttataatcagatgtaacgactaagtgatacttatatatttttcctttttcgaaattggttttacactttcgtcagccataaattatgttcatgtgatcctttttggtattaaaaagttgacgagttctatcgcccttaaagtatttatgttacgcagtttaaagaaattaatcattatcatcaggccatagcacaattcgtgtgtacttagttgcccaaatactttaggtacgaggtgtttgaccaagaattggcttttggaagtcaaccacataaatagcggttcagctcagtttatcaagattcaaaatggacttccaaccaggtgaactctgtgcttactaccgcctttgccgatatctagggatattctgtattgattataatcccactaaaaagaaattccgactgcggcgcagtgttctctgttacatagttcattttgccttgcaagcctacttagttggttgcatctccgtcatggtcacatattggcgtaggtgcttcaaaagcgagcttaccacgactggaaaccacttcgaccgtcttgtaatggtaattgcccttggtattctggttgtccagaatgcgtggctcatctggctgcaagccccacacctacgaattgtcaggcaaatagagttttatcgaaggaatcacttggctaatgttcgactgctcctccccaaacgtctgctttggctaattattgcaaccaatgttgtctacatggctaacttcattaagacgtgcatattcgaatggctgacggatgcttctcgactttttgtcattacctccttgggatttcctttacgatatctggttactagctttacaatgggcacatatttttgcatggtgcatattgtacgcctggtgctcgactggaatcagtcgcagattaacgcgataatagatgaatcggcagacctcaaaatgactagccccaatcgtctgcgtttacgtgtatgcctggagatgcacgatcgcctgatgctgctctgcaatgatgagatcagtcttgtctacgggtttatagcctggctgtcttggatgtttgcctcgcttgatgtaactggcgtaatttatctgactatggttattcaaactaaaaaatcaatcgttctaaaattgataacaaacgtagtgtggctttcgccaacttttatgacgtgcgccgctagcttcatgagtaaccgtgttactattcaggtatgtttaaaataattcgatccgattatagctggtgtaaatatttgggcaatgatttaatatctaagaattttaaagaccatctatgttctgattttacatgcacataatataaattatatcgactcagaactacacgtgcttaaatgctatcttagtatacctctattaatattaattagttaacaaggccgaaatagatgcgtatcgtgctatcagtcgcgctgtaacttttcaacatgccactcgccgccgagtcgggagaatttattttaacgtttaagtgccttggtttatcctgcattcgacatgagcttggaagcggtgatgtttggcatacaactaaaacagtagcactcgcccaagtgatcattaagcctggagcatacaagctcgccatttacggccaagcgggaaatacgtattttgtggccaattatggcacagcctgcctgacggtgggtctaatccatatgtacttctttttgcgccgtgccagactatcatctctaatatctcttcttctgaatcgccacgtcaccgataatgcccgaatttatgcagtgtacgcgagccgggtgtttctcaccggttttctccagatcaaggcgtttggccactctgtccgggttgcggccaacctgctacttacatatgtacatacaaccatgatattgagagctgtgcactcgaaaagaaatacctatgggatgccctgataacaacgctgctatggaatctgcctataatggtggccatcttaaagactttgcgcactgatttgatggggagagaggtatgctaggaatgttatgcactttttacccgatttcttttgttgtattttaaatatttaatatatagttatcgtaaaaaatatttgttcgaaaattcttttgtatgtatttggaaaatatcttttattgattaatccatataccaatttagtaactggataatttaataactggcccactcatcactgactctgaccatgtccgactttccgtctgtatgaacatagagaactacaacataggaactataaaacacataaacttgagtttaccatgcccacccctaatacatgccatatatgtaaaactgttacgcccaacaattgtaatattctatcgatatgcgaaaataattttaaaatttgtggctatccgatcgttaccgttatgggaaacacccacttttctagttgtatgcctttcttttacttttttaacttagtaacggttatatgataggaaagcaattcgacctatcaatctatctatcaaagtgatagatgtttgacttaaacttaatacttaatgagctaatagcttatatatacaatgttcttaaattgacacaaattgtttcaaaattaaatgctaattttgctttaagtgtttttgtaaaagattatcatatcaatttaacaattcttttgagtacatgaaagagaaaaactaatattgatacgcttactgcatatttaagtacccaaacttaatccattagggggttttatcctaagcaagataggcaaataaaactcgactgtgggtaaacaacggtctactagaccatgtccctgaagtgcttccattgacatatttttgtcgaaacaaaataatctgctttacaatattagtgattagttgattgacgcagaccaaatgaaacgcaacgcatttgaagagttgagggttcagttgcgaaccttaaaatggcttggagtcctgcggttcactatcgactttaataagtgcttagtacgggaaaatgcgtctgaggagcgcagtgcctggctgtatttgataggtgtagtgggaattacgtgcagcttgatcgtctacagcacttactttcccagtcactttattatgggaaaacacaacaccacgggcaattgctatgccctaatcaacatcaggtcctgttccattgtaacaatgctgatttacacacagctctacatacaacgttttcgattcgtcgccctcttacagtccattctacgttttaaccagatctctgggagtcacagagaagaaggaagatttgctttttattattatacacatttatccctactaatcatttgtatgctgaactatgcttatggttactggacagcaggtgttcgcttgaccacaattcctatttatctgcttcaatacggattttcatacctcttcctcggacaggtggtggtcctgtttgcctgcattcaacaaatattactttcgattttaaagtactataaccaagtagttcttaaaaatattaaatcaagcaaggagagtcgcgaattctattacaacttttgcaaatacaaccaagtaatatggctaagctataccgagatcaaccattgtttcggtttgctactattactcgtaaccggattaattctgctaatcaccccttctgggccgttctatttggtatctaccatatttgaaggacgatttcgtcagaattggcagttcagcttaatgtcgttcactgccatactttggagcttaccatggatagttttgctggttttggcaatgggcaggaatgatgtacagaaggaggttggtaaatttgtgtactccctttaaagtagcatagtggtttatttctaaaaaaaactttagcttttatagttactcgtagagtaaaagggtatgctagattttttgaaaagtatgaaaccgttagaacgaagcgttaccaaccatttaaagaatgtacaaattcttgatcaggatcagtagccgctcttctctttcgagttacctcaagtcgtgctggccatgtattatcgttgaaatctcataaaacctaaaaagttgaggctaagcatacagatcccagagacccagcgcaagtttgtttccttatgttgacacgcccagcaccacttgaggtgactcgaaagagaaatttcaacaaatttttgtcatatcgatggaaaacaaatcacaaaagtgttccaaagtctgtgactgactggtttgggcggtaagacatatgaattaaaaaaaaaaacgaaataaaatctaaaaacatttgaagtatgtttttggatggcttgtgagatctctacgtttatacagacggacatgtccagatcgactcggcaagtgatcgtgattaagaatatacttacatacggtaggaaacgcttgatatatgttttttaacgaaatatttatcactcaacaagtattaagagatttaagaaaaagggcaccagcacttttgtccgtgtattaaaagcagggactccataaggtgggggagcaattaaataaattcctaggctacaccacaaaactaatcaattaccgtgaacatactggcagtgtcatatcgtgtaaatcaacaatgaaattgtatacatattcagtaaaattgttagttcgcagtgacctatcaactgcataatgtcaaaagtctgccgggacctacgtatctatctccgtcttcttcacatcatgggcatgatgtgctggcatttcgattccgaccactgtcaactagtggccacatctggaagcgagcgctatgccgtcgtttatgctggctgtattttagtttctactacggctggctttatctttgcgcttttacatccgagtcgattccacatagccatttataaccagacgggaaatttttacgaggccgtcatatttcgcagcacgtgtgtggtgcttttcttggtttatgtgatattgtatgcatggcggcatcggtacagggatttggttcaacatatattgcgtcttaacagacgctgtgctagcagttgcacaaaccaacagtttctgcacaacataatactttacggtatgcttacgatcctctgcttcggcaactatctccacggctatactcgcgctggactggccacacttccgctggccctttgtatgttggtctatatcttcgcctttttggttttatgccttcttctgatgttctttgttagtctaaagcaagtcatgaccgcgggattgattcactacaaccaacagctttgtcagggcgatctgatctctggtcttcgaggcaggcagcagattctgaaattatgcggcggcgaactaaacgagtgcttcggcttacttatgctccccattgtagccctggtgctcctgatggcaccttcggggccgttcttcttaatcagtaccgttttagagggaaaatttcgacccgacgaatgcttgatcatgcttttgacctcctctacttgggatactccgtggatgattatgttggttctcatgttacgcactaatggcatttcagaggaagtgagttatttgggggggacaaagtcaaaaattaaatttagaaaaccaattatttaatgaaaacatttacacatgccttacaccattttttgtaggcaaataaaacagcaaagatgctgacaaaagtaccccgaaccgggactgggttggatagaatggtaagaatacacttttttacatttccttttgtacaactggtacaacgttaacgaatataatagaaaaaaaatcacttttaggtaaaaactaaattattatttttccagattgaaaaattcttactcaagaaccttcgacagaagcccattttaaccgcttatggatttttcgctctggataaaagtactttgtttaaggtaatacattttgtatctcaaaggcaaacgttgatagcttccatattaatatagctatttactgcaatcttcacgtatatggttattctggtccaattcaaggagatggaaaattccacaaagtctattaataaattttgatcacttaccgaatcatatgttaagcagcccgtagccttcgacctatagttcctgcgccatttcctgtattcggcttttataacagctgagtgccgtttccagtatttgccttcaagaacaacagtctgcgtggtttacaacagaaagaaaaagcgtgatgagaaaagaaacacggcaaattcgaattaattttccatccacaaatatattttcaaaagtatcctaacttaattagcgaattgcataatatatgactcactttgcaaaacccatttaaattgctaagcccacgctcagatctgtaatgtaatgtaaccgtgaacattcaaaaaccttattgtacatccttaaataatatacccacgcacatcttgtaaaaaaaagtttttcgcaaagcccaagaactaaaaacaatacaaagagcagatagcaatgcacgcaatgacgatgagcgtgtatgcgactataaagaatagaaaatctgttacgatcaatcgttctcgtttttattttataagctcgtccttttttttattgatttatatctttataaagggacagaaaagattgatattccgcgtttaatttctatatatgtatgtatgccgtgcaaaagaatttttcaaaaaattataactaagcaaattaagttattttgtacatcccttgaagcccttaaaattaacgaatcatgggtattaattttttcagctagaataaaactaatcaaaacaaaactaatcagtctattgctttagaacattagttttaattttaaaaatttgtttcgtaacaatctactgtctactaccatataaaaaattcaattcgtataaaatttttttttaataaaaaacaatctctaagaaaaacttcctgttgtcaaggtatttataaaatcaaacaaggaaacacaaataagactttgggacctttaagtccataatttgcgattaaaaatgttttgcattagtattcaattttaaagtaatatgtttacgttatgtaaaaactgaaaataatattcttagtctcgatttggtgcctaaactgtagaaaatctaccaaaaacgtacaattcatttttaatataatttaattttttgtattgtctttttattaatgttaatgtttaaaagttacatctttactttaatatcggtcacctcattaagaagttttcatacccggtacttgcaggtataagaaagaaagagtttcaaccccataagcatatttatatttttgatcaagttcactagcagagtcgatctggacatgtgtctctatccgtccgtctgtccgtcaaaatctctggaattatagaaggttgaggttaaaaaaaatgctgattctacaatattttctcatgccataacaagattccttgaaattatgcaaaaggtggagcgaagcgtttccggacctatgaagtatatttattattaatcaggatcaatatcagggtcgatctggctatgtttgcatttgcacacaaaaaagctacttttgagaaaaaagagcgaacacaaaccttgcacatttctcaatatttttcatattatcataatttgtcttgctaatttgtttcttgtttctgaataccccataacccctaaccgaccaacactgcctattctttaaaaagatgttttgaatattatttgattatatatctcattatttgcctggccaaattctccctcgcactcccactttcttaggaacgggtatctgatagtcgtcgaactcgattctagtggtttctcttgttatggttgataatacaaacatttattgaaatacaaaaaataagatcattattaaaatttcagggaaaatagtcgaacgataacaacaaaaatgtttatacattctggtacttatgctcaatctcagtttataaataaaaatgcccccctccaaaaggttcatgacggctaaaaataacactgcaaaaagtcccactgctcttatcacttgtcgcaagagagaatacgccggaaagtagacggtagactcacggcaatccatggggtccaagctgtatctaaccctggtatttaatggcgtcgacgatcacgccgcaatcgagtgatgccttttttccagcagcgtaagccacctaccggtcagtgatttttagagagggtgtgctttataccctcggaaagtagtgttttgtcgatatcaatccaggcgtgcgccacatttcacaaggaattttacgtttatgatgcgcatcgatggtacgaaatgaactgatccatggcatttaaagtagtaaaattacggaagcaatgactgttgctgacaatattacatgtacatacatatataaatatatacaagtctacacatttgaacaattttcaaattttttctcatattatttcccaatatctatcgatatcccagaaaaattataaaatttcgcgttcgcattcacactagccgagtaacggtcagatgagatgatcgggaaactcgactatagcattttctcctgattttattttactcatttaaaattggaagggtacattgtgttcattgaagaatgtgttacaaatgtctggcttttatctgttaaagattaagttccatcatacacatttgaatcctctaatgacttttgcttctacgagtatttaaaatgaagtttatttttattatactataaaatgcctactagattaactagaccaccgatagatttgttgcaaagtacgtaacagttataaagatgtacgtgctttgtcttgatcaggatcactagccgtgtcgatatggccatatccgtttgtccgtatgaacgtcgaggttttggggataatataagaactaacagatatttgttcaatataattttagaacttatggacagtgatagcgttactactgcttacttgttagcttttatttttctgttcatactgttacagatcatgagcaaattgacttgggtagttatcctgaatacacataggaccggaaacgcattcatctacctcatttatatttatcagcccatctagtataactttttattgttcaaatgaagggtttaaatacagcattacctaacatgtatcatcaacaaaagtatcatcaagaagaaatcttcacaaccaacaagaaagaacacgacacacagatattattcaggtaaaggaagtccgaacaatttgttccaacggtagaaattggcaagaatgcaaaaataaacagtgttaagtttgggagtttacgttttaggcgcaacagaataaaccttctagttaatacgtataaagtgtgtgtattcttgcttaagatcaccagccaggtcgatatggtaatttccgtccggctgtacatacatataaacgctttgattcgggaactatgttaaataatagaacgttgaaattatgcagtttctaattacgccaaggttttgcaattaatgtaaagaattttgctacgctcgtgttaatcccatttatcaattagttttgaggttctacaaatacgatgtacaactgtgatcccattttatattattcttaaagaaaatatttcgtcttttcccactataataaaacataaatgtagtaataagatcaattcattaaattaatctaacataaacaattttaattggaatcgcaggaaatactgtttacgtcaaataatttttctcagaacttcttacgacactttgttcgtggccaaattatttaaaaggatgccagttggctatacccaaatctacaggtacttacttgaggattactatgtatatcaacgtccagcggcgacgcaaattgacacaccggggttctgcgcttttgtatgactgcaaaaatggaaaacacacaaacaccgtttagtatggaaaacataaaaaacgacgtgataagattctggggatagatagagatagtgagttccccagagatgacaaaatgtgtcagaaacacgtgtcgttttaccagtggttcttcctaacaactatctggaaagctgtgccgtagccaacaattgcctaaaagagcaagctgctcttaattcttactttaggccttaggcatatggatacaaagaataccctagtgtatttgaatcagcaaaggaaacattgagaacacttcgttaacactaacatgttgaataaagtggaataaaaaaatggtttttaaaaaattggttctaaatggtaataaggctgagaaaaatctttttgaaataaataaagaataaaaaagtatgtgactgttctgctattttcagatataacaacagatttctttaattttaaaaaagtatctttttctctttgttagcgaattttgaatttaaacataacaagagagaatactatagtcgaattccccgactgtcagatacccgttactcggctagtgtgaatgcgaacacgaaatttcataatttttctggaatatcgatagatattggcgaataaaatgaaaaaatttaaaaattgttcagaagtgtggcgtgaccgctttggcggctttagggcgttaaagtgggcatggcaaaaagttgtttggcaaatcaatagaaatttaagagactaatgaaattatgttatattaaaataatgaaattatgaaaaagtatccaacaatttttcaaaaaagtgggcgtggcagttttggtcggttttatgtcgtaagagtgggcgtggcagcatgggtcaacaaacttgcgctgcgtctatgtctctagaatctgtatgatgaatcttttacagttcctgagatctgtgagttcatacggacagtcgaacagttcgacagacggacatcgccaaatcgattcggctattaatcctgatcaaaaatatatatactatggtcggaaacgcttccttctgcctgttacatacttttcaacgaattcatacaaaatatacaacatttttggtgttaaaggtcccaaggtcccttgaatcttaccttgttaagagataattatacccgttccgcgtagactaagaggtatactagattcgttgaaaactatacttgaacactatataaagtatatatattcttgatcaggatccatagccgaatcgatctagccatgtccgtctgttcgactatccgtatgaacttcaagatctcaggaactataaaagctagaacgttaagattcagcatacagattctagagacatagacgcagcgcaagtttgttgacccatgttacccactctaacgcgcacaaaaccgccacgcccacatttttgaaccatttttcaatattttttcataatttaattagtcttgtaaacttctatcgatttgccaaacaactttttaccacgcccactcactttggaataatttttttctcattttattacccaacatcccagaaaaattatgtgttttcgcctttgcattcacactagcgttaacgggtatctcatagtcggagaactcaactatagcattctttcttatttatctttattttttttgagggtttacgaatttgaaccttttgggtaacattttatatagtactttagaagggtgaaaacaaactaaaaccatgctattttttaaacgaattcgaactattctttctcattaaaagaccccaaaaaaaaccttgatttccggtatctcaggttataacctgtagactacagaattttattcggaaatacaggtaattttttgggttactaatttttttttgcaagtatatggtaaataaatttggtttgtttatagaaataaatggggaattttcccacagacagttatataaacttatataaaaagtgtggacttagatttcttttgacacatcgaaaatccggaagactaattttgtgaattaatagatctctaccgaaattcgtgtgtattcatttaaaacatggtttagtcacgattaacacaacccaaaaacgcgcaggtaaaaaaatatggaattgcaacagattatatgcttccattatctctccaggaccttcacatatgaggtatttacgaatggtatacatgaacttagataataacaaaaattaattatatttgctgatgaggcggttgaagtgcctacctataaataagcaaaaaatttccatttgcctttgtcgccgacatctagaagagcgaagagataatcactgccctcacgatggctttgtaacacagggctgccggcctcccactcgcacaaatgatgtaacggaaaattttggaaatactatcagcagaaaactgtgtcagactgtcggtcgactagctgtcaagctaaatgcatagtcaaaccgattcgatgtttgtctgacttatgctttatgtctttacttctgcttttgaaagtgctaatcaatgggatacttgaaactgcgactcactcctaccgcggctgaagtgcgcgggaaactccgaggctgtctagacgatcgagcgggtggtcagtgaagcctagcagcgccgaaatcatatgtttagcttttaattacacgcaaggcaaaaacaaaagtcagcagagaacaaaaatgaaatgacaatcggctagggtccagactatgataagggccagcggcacagccgaccagactatgataagagcccgaagtggcgaaggcgactgaggagtcggcgatgcccgcttggcaacgctaattcatccagtcttccgtccagccagctagacggggatcatgcctagaatctaccccgaacaagctgacaactattggccgaaaattgccaaaagttagccagcagcttcaaaagcgagagcggatgagaagataacttgtgcttttaaagcttatggaggtctctggctcgctgattcactcagattttttttgttcatgaggcttttgcacgtgtagcacttttcaaagaaatgatcataatattagtttatttgtttggaatattttaccaatgccgagtgcccaacatgccgtaacaagcaaatagtttggagccttatcatctccttatcacaaggtaacgacaactacttccatatttttattaggcatttgggaaaccctagccaaattttattttaattaaatcatttatttgggtatgatgttgcttgcagttcaagtatactatgaagggcttagtatattactcacactgcatgtgccagcaacgccagatgacattgttcaggcgaattttgtccttccaccgaagtcgtactcctttgaaatgattccatttgggtgaggttagtttttgactgtaaattaaaagttattttgtgttcaataaagtaaaatatacaattgagtaaaaattaaattaaatattttataatatggaaaatcagttacaaaacaaatagatttcttagtaaatatttaatcaatgcggagattactttataaaaatagactgaccctcagccctaagccatttgcaatctttttaaaatctacctatatacacgcttctgtgtatacatttgtatcggttttaacaaaaacatctattaaatagtgtgagtaaatatatattcaggaagaaatgcctagtttctagctaaattgtttccaagcaattatagggaattatagacataaattattccgactgttttttttttaaattattttttaccaatttttgtttaaatggagcaatataatatgaaatacataaaaactgtgataaaagttttaataataattgtttttaaaccatttcatatggtattatatgtattttaatcagaactttaaaagtgtttttgtcctcataaagtaactttaaaaatgtttttgtcctcataaagtaatatatataaagcatataactgtggacggcagttcacataggggcgtctactattgtggacaacggtcctgtagtaatgaaagtcctatactaaaagaaatcttaaacgtatcgaaaggtatcgcaaaaactaataggacttttaaaaaattaaatggttcaacggaaaaaaatttgtgaagatttaacagttgaaagtaccagctaatgtgatattattaaacaaaaaaaatttaaaaaccttttaatatttaaatttttgcccgaccaagctattgaaactagaggactgtgctgtgtcggcaataataagttttttttcgactatctgatcaaaggtttgacgagataaaaaactagcaaatgcgatgaaacaaaagaaaaatcatacaatgcgtatttttaagaacacgtttttctgtgggtaattaatttccactagattaaaattgtctaaattgttactttcccactttctcagcatcatcttatgaaacatatgttctacctattgataggtgtaccgttctgaaaggacaccaacattatatatatacccgttattaggaccaatagccgaatcgatctggtcctgtgcgtctgtccgtccgtatgaacgtcgagattcataatgcaacacacgccctaaatttccacgaccacatttttgaaaaattgttggatattgttttcataattttattaatctggtaaatttctatcgatttgccaaaccactttttgcaacgcccaatctaacgccctaaagccgcccataagtgccgcgactacatttttaaaaatttttggatatttttcataagtttattagtcaaaaaaccaccccaaattgacacgcccacacttttgaagaatgtttagatttttcttcgttttatggtttgtcttgccagtattatggtatatcaaaaaccccttctcagatctacaaaacgatcatgcgaaacatttaagcaattttgaaatttgttccttagtttattccccaatatctatcgatatcgtagaaaaatgatgcaattttgatttcgcattcccactggcacttgtcccgaattggacttaaatatgtatatgtaaatatgaatgttgtgtattaaaaatcatggaattagaagagaaacaaaactttaaattttattaaaatgggtagccgcttcaaaaaaaaaaaaaaaaaacagcaaaaagtaaaataaacaagagagaatgctatagtctagttccccaaatatcagatacccgttactcaggtagtgattcgaacgccaaatttcaaaatttttctgggatatcgatagatattggggaataaaatgagaatacatttaaaaattgttctaaagactggcagctttatggcgttgagtggtggtggcaaaaagtttttttggaaaatcgatagaaatttaaaattatgaaataatatccaacaatttttcaaaaatgtgtgcgtgccagttttgtgcggttttagggcgttagaataggcgtggtaaaaagttttgttgtaaatggatagaaatgtacaagactaattaaaaaatgaaaaaattattcaaaaatgtgggcgtggcagttttgggcggtttagggcgttagagtgggcgtggaaaacaatttttttccaaatcgttagaaatttacaagactaataaaaatgtgaaaaaatatgatcacgtttttcaaaagtgtgggcgtgacagttttcagctagtgttagagtgggcgtggcaacatggctaaacaaagttgcggttttaacttggctaaacttctagattttatagggttcctgagatctcgacgttcaggcggacatggctagattgacccagctatagatcctgatcaagtcggaaacgcccgttgcatacttttcaactaatctagtatctagaatcgtagagtagaagcgtataacaattacgttgttctctcttttaatatgttatttagacaaaaaaagcgtttggaaatgtctttccatcgaaacttaacaccatcaaaacaaccggcgggcgtgcaaaatgaagcatgttataaatttaaatttatatttttcctcgtgtatattgtagtcgctaaagcgcatccaggagaacgcacactctcctagagcacttagtcacttagtgaaaaacaacaatgaaatcacatggtcgtgaaaaatgtaaggaaatccgaattcgtagttattaacaatacgcgtatatatatggatcatacaaacaactaccgtagctgttttatagtgactaaaaaccatcattataacaaacaaatttaaaatttaaaactgtataacactttttttaaacaaatccttttcgttctttaaaaaaaaacaaaaaacaatagcttcacaattcagatttttagttgataaggtctcagataataatatgttgtaagcaaattgcatttcattttgcaaaattaattcattctgatattgctttggcaatactttaatattttctctatgattgcgctgtcgtttgcagaaatgggagaagtaacagaaagaggggtataaagggtggcagaggagcgattgaggcaatgtggggccaaagtaacctgagcagcgacgtcacgtctcaacatgtgccgcgattatgggaccgaagcggtccaagctttttcgtttgctggattttcgttggccagttgagcgttatcacgctcgaaacgcgtgaacaagcgggaaacaacatttcataaatcttcagggccccggtgttcggttgtggtctcgagtacgagtcttcaactcacctgtaggccagattcatgcacttgaagagtttggtgagcgaggtctctatctccaggtgggaggtcaccatgctcatgctgctctcgtcgccctcctggtccatggcgctgaagtgggccactgtttggggtacgtaaagctgcacgtcacgacatgtgttggttggctcgcccggcttgcccagaccggggtcctcagggtctagcatcttcacctcgccgtcatcctctaggtcgtcctgcgcctcctctgcctcgaagtgcgagaccataaactggccggagtggatagactcccgctccgccttgagcaggtctgccgtagcctcggcggaccctgacgccgaagcacctactcccgtttcgtactgcaattgctggaagttttggcacagagactgttgcagataaggctgctggtgcagctgaggcagctggtgctgctggtggggaaacatttggcttgtgcgttggtatccctcgtgtttattcagcatcattttcaacaggtgccaggggatgcctatgcaaatagtttactgttgagccaaaattttggcggttgcagattatgtcgatatggcgagggcacatttaatggttttttaatgtctctcgcgtagtaaaggcttttaaaagctggtgctgacccttttttaatttggatggggtttttccatcatttcaaaatatgtaaacgttcgcagactataaaaaaaaatatgttttgtcttgcctcgtggttaacacatttattaattctctcatctagtgtttgtccttgtcattctattaactaaattactaaaataagcgattatttgatagagacatagcacggttttaagattttgatttgtttacaatgcccgacaccttcagcttttcgtcatcgacacctgtccaattgttgctttttccggagcgaagcttctctaatggcaaacacgccccgcttttgccgttatatgcgtcacacagcacaataacaacaattttcgcacacacacacacacacacaatcgcggcggggttggctggggatacggacgtcagaacgagacgtcagtggccgcttgtagctccttgaacagatagtgaagccccaactactcgtaaacacacgcggatctgatggaaggccaacaaggcgggcagaaccagcgcagaacgatcggtttcattccacaaacagaactgatcggagaacgaagctgcgaaacgcacataacctgtgcgccgcacacaacacaacaatgaacagctgacgcgaaatctctctctctccctacctcgctagcgttgcttatcagctaggaaaacgtacatacatatgtatatgtatgtatgtacgtgttcttctatatgcgcagatgtcaggcagcaatgttgtccccctctccactattactatatggagctcagtcgatttgactcctggcattcggccttgccatccagagtatgcactccacaagcagttctgtgtttgcacttttgacctctggctcagcgctgcctttgcattttgcctttttccgttcccactcatatacacgcgcatgcacgcgcaccacaatttcggtacaactgcaactgccccctatagcagaaacacgggcagttagcaggcacgacggactaccaataccacgcacacacgcgcaacacaaagcttctacgtagtttaatcacaatatagcacacattaacctattgcgggtagcgagccctcaccatcccatcagggttgtcaagcatttggtggctctgataaacagcaccctcttcctaaaaatggctgaaagctgcgagccgaaaaacgcaagaatgagcataatcaccccaaacgtaaagattgggaagggcagcatacgaggtcatatgtttcctgctccgaaattgcaatacaatgaatttaggacggctatttcccgtaattagtttccagttttatggaattgctattatatctttttccgacagcaccttgaaaccgcatcaataaaaagttaatgcgttgagactaataggaaaaactagaatatatacatatattatactcaaatgtaatgtgttttttaaacattgttgtgcttaagtaattaggaaaaattatgtaaaatggatattttccctttatgttcactatattgtttaagttagagaatagaatacccagaataaaattagtgatcacacatcaaaaaactatcgataaacattgaattagttccggttaaaatttaataataagtattcaaactgcacaccttgttacaaagtagtgtaactgcctaattctttatcagcagactagaggatttcgcactcccatgttcttttgcttaaatacctttctcgggcttatattagacattatactttcagagaattttttcatttgtactgttagaaggttcttaatgaaattgctgttcagttcaaaatttttatatagtcatttaataatactttacgaatgattttgtgcgctttagatttgtgagaaaaaggggtgggattatttagtagaaagtagcaaggcatttcccgatctggtaacactgattccaacactcattaccgttccaaatgaaacgcaaaaaggttcaattgttattttctctcacgatttcggcatttatattaacctaaagatggctctatagtttgcgcgcaagcaaaaacaagcagcacc

SEQ ID NO: 1148 - DNA, 3838 bp, DROSOPHILA
tatattgtgattaaactacgtagaagctttgtgttgcgcgtgtgtgcgtgggtcagcaccagcttttaaaagcctttactacgcgagagacattaaaaaaccattaaatgtgccctcgccatatcgacataatctgcaaccgccaaaattttggctcaacagtaaactatttgcataggcatcccctggcacctgttgaaaatgatgctgaataaacacgagggataccaacgcacaagccaaatgtttccccaccagcagcaccagctgcctcagctgcaccagcagccttatctgcaacagtctctgtgccaaaacttccagcaattgcagtacgaaacgggagtaggtgcttcggcgtcagggtccgccgaggctacggcagacctgctcaaggcggagcgggagtctatccactccggccagtttatggtctcgcacttcgaggcagaggaggcgcaggacgacctagaggatgacggcgaggtgaagatgctagaccctgaggaccccggtctgggcaagccgggcgagccaaccaacacatgtcgtgacgtgcagctttacgtaccccaaacagtggcccacttcagcgccatggaccaggagggcgacgagagcagcatgagcatggtgacctcccacctggagatagagacctcgctcaccaaactcttcaagtgcatgaatctggcctacagtcaaaaactaacctcacccaaatggaatcatttcaaaggagtacgacttcggtggaaggacaaaattcgcctgaacaatgtcatctggcgttgctggcacatgcagttcatacaaaagcgcagaaccccggtgtgtcaatttgcgtcgccgctggacgttgatatacatagtaatcctcaaactgttgttcttgaaggcaaatactggaaacggcactcagctgttataaaagccgaatacaggaaatggcgcaggaactataggtcgaaggctacgggctgcttaacatatgattcgaaaagcgaattagactttttggaatggtcgcctctgaacgataggaacttaatgccagacgattggaccacagacaccttattctcggctataaacgttccattcccatttccagattctagggaaatcgcacgcggcgcgggcatcgcggactttatacagcccagtcttggtcccttgcaaccgaatttagatgacatcgacattagcttttcagacttgattccaaccacacgcttgcctccagttccagaagagggaaccgacgctgaaatgctcaaaaacgacgaatattgcctgtcagcgattgtcggtgctcctcatacgctgtattgcaacgatagcataatggatgtggtaaacagcagtaacaatggcgctgtaaatgtagatgctagcatgcttgagcttaacacgcccataaataacgtatcgtacggtgaggtagagcaacgattttctgttgcacggcaggtgcagcaatccaacaatgattctcagcttctcggagactcgggttcaatgtccggacgaatacacggaggcaagcattttggacctgctagcgcaaacgacaacaacaccaataggtgtgttataaacggtcgcgtggccaagagcactcagcggccattccgacgcgagccccacaattatgacaaggcccagcccacaatgcaccagacgaacctgtatcagcaaatgttggccgaacaacagaagaaccagcagcagcaacacgtggtagtgtcttcatttcaggcttcccaacaacagcagctcgctcaacagcaacccttttcggcccaggcaacaaacgccttcaataatcagagttttattagcagttacgcagataactatcagcatcagcagcaactcaacgtcaaggtagaacctctacatgccgatgtgctgtcattactaaacgacaatgcatacaactctattggctacaagccctatccgcaatttaagaagtccgcctcgacgggaacttttcttaatgtccccaggcagacgcagcagcagcaaagttatctgcagcaagagcccccgcaaatgcaacagtcccttcccgtaggcatgggaaatcaacaaattttgcagcttacgcgtcagcagcaggttaacaatacacagcaacagcagcaccaatccacagtggctagcttgttgcagcagcagcaccagcagcaaaaccatcagcaacagcaactacagactgctgtcagctcagccacatgggtttcgccaaacaccattttgcctaaagaaatctaccgctccaacagcttaccactgaatgtttcccttaataaactacccgatggtcgccagctgcatcatgagcagcccttcgcagtgcccaagtatcactccaaaagcaagtcgagggtgcggagtaattcgatgcaccagcaacacacttcagtggtgtctgctgctggagcgggaagttcttcattaggcgcacatagttgcagcaacctgctggtcactcagcaaatgcagcaggcaaccagcgatcccatgctaaacagcaccctggctcaactgctcacttcgaattcacgcctacaaacagcagtggcgaacagttcgtcatcaaattcaccttccgtcagtgccatagccaccactaacagcaacagcaatgcgcctccggttcattacgctaacgtcacatcgccgttgtcggttccggtgccaacacatcaacactcaccaaaaaagtccgcctccttgcctatggctgtcaactctgcattgcacagtccccctctaggaagtaaaatacacggtattgggctggccacagctaacgtgggcagtaatagcttgagtttgtcaccggaatcgacgttccacgagtcacaggattccccactgtctcctacaaccagcctaaaattccagccgcgagacacgcagcgtcgtgctggccatatccacgccgagcagaagcggcgttacaacataaagaacggatttgacactctgcacgcgctcataccacagcttcagctaaatcccaacgccaagttaagtaaggcagccatgctacaaaagggagcggaccacataaagcaactgcgacaggagcgcaatgttttaaaggataaaattgaagctttgcgcatggagcgagacgagctaaacaattcgctgacgtgagcttgtcccaacacaaccataccctttaacaaataaagatatacttttttcttaattaggcaccttcactcaattttgccagctaatggagcgcctgtaacgaggcagggtacagaacatgttcggcagctttacgacatttatgtacgatacaatacaatgaacgactggaaattttggattttgggtctcattctggaacctttgcttgcctcttacacgtcaacagtctcgagtgctagtcttgatgagctacgtcggaccgcttttctttgggttgatcagcactgttcccttattgatcttcgtccagctgttacaaataaattaaagtatctatctatgcatacggatattgtttcggagccaccaagtacattgcaagaggaggtggccaaagccctccagaattcaagtggccagcatccaaatctgcatggaccctaaccgttgatgctgatgtccttgatatgaatttatttaattcaatctttattttaacaaataatttttgctaactgctcagcactaattgtacaaaatgcctgatgagcatatttttatacaagaaatgggcaaccggcaaccaataaatacgcaaagcagcaattagtgcctagattcttgacttaagcgtataataaactaacgattttacaag

SEQ ID NO: 1149 - protein, 990 aa, DROSOPHILA; identical to SEQ ID NO: 1146

SEQ ID NO: 1150 - DNA, 19795 bp, DROSOPHILA
gaggataaaacctaagggaaaggcaggcaaatgcgaaataaaaacgaaaattatgaactgcacaaaagctgttgtgaatattaataaattctgcctgctgcttgtttctgtttctgtttcagtttcagcttcctttgaaagtatcgctgtctctgtggctgtatttctgtgctggcagagcgaacaaatcaaaaaggggaaagtcccagggaggagatacagatacaaatacaaacgcaaggatacgtcaaaaggagcagttatttatttatttgcgaggggcggtcggggggttaaactggcacaggcacaggcacaacaatggcgggctaacgcagaataatgggataacaaaacgcccttgacacccagtaaaagacagccagccctcaaaagtgggcaaagtagccttattattatgaacacagcacgtagcaattgtccaggggcggagggcagggctctgccaggggtcctcaaagggggagaacggaacaaaggaccaaaccagagccaaacccgaaagtacaaatcaaaccctcgagagcggccaaataatgtacggatgaagagcgagagggagagtgggcgagagagggagagcacagcaatggcgcactgcaaacaccagggtctgagtgagagagagcgagagagtgccgactttgggggtgtgtcttccacgcactcgaatgatcggacctccctttcgcactgccgctgcacaggcagctctcgctactcgtcggccagaagaccatctccctcacaccctctcgccggtgcacgggcagaaaagagagataagatagcgggcaatacacggggctcttgcgttcgaaaggcgaaattccggggtattgcgttcagtagccgcgagttctcgtcgccagcaccacgtttaccgttagcactggcccaaccaccccgcacaaccccaccagccagatactcgctgcatgcgctgtacagtgtacacgcatccaacagatacttttccgaattcgttttcaatccagctacgtcctgttacggatgcagacgcgtcgcctccgttgtgataccagatacatgtaattgcaggtctagagctacagatttagatacagagattcgagtaccctagcagatacttagcctaattacgccgtggattaaactattaaacacttaaatccgccaggatttgcctatcaaatcaaatcgaatcgaaatcatatcactgagagtgccgcgagtgactgtgtgcgcgagtgtgtgtttctgtgaagcggcagcgagattaaaaacatatccccgagttacttaaaattaatcactaacataatcactgtgatttttattatttgatctgccgacgtcaacaccgcgtgtgcgaaaactgtttaacggctggggctttattaaatgccgcttcgcatttgattagcaatctgttgcaacaacacagcacaaacctaccgatctccccgagatttatagcccactgcccacgcgatatatccggaagattttcggagactttcccagatctccggcattagaaatgctggccatctgatttattgacggacccacgacatttgctccatcaaagttcgcctttgatattcgggatcgacagaaccagagaaccgacggaagttcgttcccaccacctagtggattaattttaattcctctcccatcattcagaggtgagtcgcagtcgcataaagttaatcataacttaaaacttgttacactgacctcagtgattcttgagttgctaacgcacgaagcaagaaattataaatcaaatttgatttagaaattcaaagattttagaaattgaattatatagggatcttttaaaaacgaaagttattatcagcaacaacgatgtgttaggtcataatagccaacagaagttttccggtaaacacctggctaggaacttaagcgccccttaatagcaatgtcaattcagctgatgctaggaaaacagcctagctttccagcgaggatcagcagaggttcccattgagggcccagagcaagcccataaacggcttgttggacaacgaattaagtttacggcggactctcacgccgcgcataaatcacggcggagtgagactcggatccggattgccgccataaacagagatctcggccattccgtaagggggcctctgggcttctgggccagtactgtgggttttgccaaaaaaattggaggagagcccggccaagcggcgctggctcattgacgtcacctgaacaattagcaaacaagatgtggaaaaaacctaagtacacaatgctcggactcggatctccgggcagccgctaaactcgaatttgaataaaataataaaattaaatagaaatgaaagcatgtggaaagccttggcacaacatcggaatcttggcaccttcgcgacgaagaggccgtaaacacacgagatctcgcggccataaagtggcataaaataattctggcattctttgtcttagggaatcattatgtaaataaattctcacttttgaaataaaatgacgaggcagaaaagccaaaagctgaaaaacacacaagaaatggagcggagaatattctttggcgaaatggaatggaaacaatggcaaactggcaaccgaattatttattagacgctgcggcagataatttagccagaaattgagacaactgcggcaaagacagagcaaataacagtattataaatatccccatcacggcaataaatgcagaacttttcatttcaacggctgaccccccccccccacccacacacacaccaactaaccaatcgtgtggcccataaattggcttgaagtgaaattatgtttatcacgaaaggctgcctattattattgctgttgaacaaccgcaaatggatttaacattacagccgcactaatccactggggatcaagtggagatcaagcggcattatcagcgaaatcgaaagtgacagctcaagccaaggcattccaattaaatttaattaaattcacttaaacacacaactgcgaatttatgctgccgctagatttatgaaattcgttctcgtttcgaatgcctttgaatgcctttagtttgttgtgattgagattagataaccatttattgcaacgtttcgtttcgtttagtttggtttcgttagctcagatagcggaccgcatatataacgtatatgtacatatatgtatatgcccattcccgcccgatatcgggcaaaggggcctaggaacctggagaggtgttccctccctttttgctaattgatttacgatcgtttatggctattttcgtgctactgtcagtgggctgtttttatttttaacgaatttattggacgcccatggcacagtttatcgcactactgactgtcagtgcggcgctctactacttcttcgagctttccccaatttcgattgccaaaatccaaaggcgcccagtgtacgtgcaatcataacaataataatagcggagaaatgctcgcagaaatgaaaatattttacatcgataaggctgttatcacctggcccccgccatctccgctccaacagtctgctgatagcagtgtaggcggttcgggggtgcggtggtgcggtggctcggtggtgctgttgtcagcccatatgccccaccagatcccctcaggtgcgctccgccagccatacgatttacgacgccaactgaaagagtcccagtttaccactccgtttgccgccggctccagcatccgtggtattaaccccttgacgtgtttggtgttaacttgccattcggctggtgtttgggttaagctccctgtttgccttcgccgttgaggcgataaaaggttccaccagttgatttgcctaccaggtagccagccaagcgataattatgtctgagtagcaatgaacccgatatgactaaccttagcacagagcgacatctctgaactaaatctatagttagtgaaacgaattagaaaaattagtgaaatacatcccagcttttcgcagtgttttaatgacataccccgcctgatcttttccagcttttcgggctctggcaacggctgcatcttggatttgctttcaccacagttggaagataccggcctcaagacgacgactttcctgcagcacttcaaggacgtcgtcacgacgaagttcacggggagggaccaccacctgccgccgctgcaccccgcacaccccgcccacccggcgcaccagcagtcggcgctgcaccaccaccaccaccagcagcagagcttctccaccattttccccacgtatctaggcatggaccgctcctccgccgtcggcggttgcggcgggggcggcggtctgggagtgggcgtggtcaccagctcggccacggccttgggaccgggtggcctgaccaacgggggcggcggagtggtcagtggcgcactcaacggattggaggccatgtcggccgagtccacgggtctgtgcctgcaggatctggtgagtgccgggacggccaacggagcaggctccgcaggatcggcagagagtgccaccaccaccagcacggcactgagcagcggcagcaccggaagctccacggtcaacggaggaggcagcagcacctccggcacggagcacctgcacagccaccacagcctgcacgactccagctcgtcggtcagcatctcacccgccatctcgagcctgatgcccatcagcagcctgagccacttgcaccactccgcgggccaggacctggtgggtggctactcccagcacccgcatcacacggtggtgccgccgcacacgcccaagcacgagccgctcgagaaactcagaagtaagtatcaggtcgagcagttcaggggaaatatcatataatagctgggcattgtataaaaaagatataataggtaatgaactgaaggtttttgaaaggaggtttgtagattggcacacatttggcattatattagtaggtagaataaatcccagattcataaatttgcttcgaaatatttcaacttagtcttgggcatgatttccttttgatctgttcccttttgaggagaattttaccgaaatatatcagaaacgtttatttttccttggcataatgggataccatttcgtgggcaatttgtagtgaaatttgtgagcggcatctcgcgcattgacagctaattagtgggctcataactcagtctgagagacgaacatttttggggcgctactaagaagatattcccttcgatccgagtcatcaacaagtgtccacattctcattgctattcatggcacttttgtgggcttgtgttttatacattttcctctgtcagtggcagctgttgtcatttcaatatgcgattcgttttggccatcattcacgctccgtgccaaaagctcactccctgggccacttgtcgctccattcgaatctccattcccctcatgcatattcataatcattgggcaatcattagcgcataatctccacaaagcgttacaaagggaacagggcaaaaaaaaaaaaaaacaggagtcgggctgcgatatatctaaacaaatttcaattttgtgcgcatgtcacggctaattgagcacccttctggcgtagtgccgaaagcaacactctaccctgctcacttcctcttcccttggattcgtccctctgaaattcgatatgtgcattgcagtcaagtgtttgttgttccgattgctctaattgttatgggaatttggattcttcggaggatgctggattggcggccgagtgcgcaatgccacagcttcaagtggcaatatgacaactcaattggttctggggaagatttcggatagagtcagggcactccagatgggcaggaaacctgttggccgaaggcaaagatcacaactttatcaagacaagttggaattagatatatgaatatgaagatctctctttaatgcaactagttttgctaatgctaactttatttagaaggagcaggagcagcacatgaaagtcctgcccgacgagtgcctccgtacgaaatttccatttgcacaagagatttgtctgccctcgcccagagatttgttggctgtcgtcctgtcaactcaactctgccccttcggggttaacagcccggcaaactttgcacttgtctgcatcccgaaatggctggaataccggaaaagaacccaaccgaactgaactgagatgggcctgggtgaacccatggccacagatgtcctgccatttatttgcgtgccaaaacaatttagcacaaaaatggctggcatttaaaatatgcacgactgcagttatcctttgacacccgtacaaacacgtagatattcgtagctgcaggtgcgggccacgttaacagctctgagccacaaatttccactcctgtccgcctgtttgctcccgctttcccccgttttcccccgattttcccccttgtcgtcgttattgtttacgctcttgtttaaataatggccacgcaacgtgattctgctcctgccgccggttggcaggattttcatcagactcccagaattgcatggctgcaatcggattttcaattattggccaatttaatggtcagcacacaaacagagacaaacacccacaacccttgcttttatacacatttatttatgcgtatttatatgtgcggcagaggtaataattttttacgattgcacttttttatgggccgtgttccaccttttagtttcgactctactcgactcgactctttcgttttatttttggtagatcattttatggcttcggtgcgtgtttttatttcgctggcggtgctcaaaggatttcaagttcacgttctacactaatttagttcgaggagtaaagatttttatgtgctgaaagatgtaactctttaatagatcggaattgtcgcctaaattatgttgtcagcagctgggaggaaccgaccttgtccctccgactgtgtatttcatatttcaccaccgcggcaattagggaattatctcgctgtatcagtgactatataaacatatatccactggcgttcatatttgccccaggcaaaccaaacagaaaccgaaacgaaactgaaaccgaaaccgaaaccgaaatccaaatcagagcagtttacatttattttttggttgctcggcaaataatagaatgttgttctattcctattcctatttctttttgtttctattttttattgccagctagtccttagcttgtttgccaagttgttaccacagatacgacgagatggagaactatttgcccatgacaatgtttgtggctgatgccgttgataaaattatgaaattaccagagtttcccttcgggtttctggtgaaatcgtgctgttatctattgtgtctacacgaaagtaaatgcccatcttcccgctaagtgttaatggcacgtgcagctcgccgggctctaaaaaaaaaaaacaaaaaacaagaaaaaacagagcagaacacaacagaaccacataaacaaaacgccagactaagaaatccaggagatacacacttttccaatggggaggtgttctccaggacacccgaacctgggctactttaaattccgcaccaacgcccgtttttgtcaggcctggtccttatgaatataaataccttttatcgattttccgctcgtcgcctgtttcgccgcttaaagccttaaaggatttcgtcctgcggtgtgcgaacagtgcattgcccgcaaatctctgcgaaattgctcacatatgtcatcgagcactggcaaaaccaaggatcacactcgaattggcaatgcaagcatctcgaatgccacataaattgcacttgctgaccgcacagtggaatatcgaagaaggcaaaataagaaataggaaatgtttaacatagagtactttatattttaatgtaatttaattttttgaaaatggatttgcaagccaatatggtaccagatctaatttagtgtttgtattttttatttcttgtgcccattgtactcgatgcaccactgtaactactacacagaagttgccatttatcaatccatctgcacagctctatctgtaggtttcctcctcgctggctggcactgatttcgtttatataaattataatgtcattatggcaaccagccacagaatccacaaccctccatcaccatccccaatccacgtcgctccccgttttccttgaggcaattaccccgttgcagaagttagtcgggaaaacttgattctctgtccgcttttccgcctcttttctcattatccgggcatcgtgcaatttcgtaaaaatgtcgcattagagattatctgaggaaacaaacttgtccgccggacaggactcgaaggtccttggtccggtccgttggccggctttttgctggctgacccaatggcaggaatggaattcgagctgacagtcgggcaaattactggccaaagtcattgcagtggaaaactacaggccaagaagaaggggaaaagctagtctggacagaaaaacagagatctgcccttttttgggtgtccttctcccttttgtcttatctgcagcctcaactaatgagtccgggctttcggccaggacctctggtacatatagccagggccatttggccaagggttgttctccattcttgggacatgtcaatgtgatttccgagatttttatgcgactttgctccggttggtcaagtgcctggagctcattatagggccataacatatggtcaggggccattgtctcgaccaaaggattagttctgcgagacataaaaattaactctccaagccgttgcctaattttcatgactcccgaattgggctaatttgcagcgaggggtgcaggcgaggtttttcttttgcggcatatgggccagcaatttccacggacatcaacacctcggcggcaaatgtggcatgaaattggaaaatattttcatttgcggtggagtgtttaaccctttggtgggccagccagtggtttacagcgaaagcaactcttgctcgatatgtcctggtcccatttccaattccaatctcaatctcaattccaatcccgatcccaatcccaggacccacagccaaagccaatcccgatccccttttaactgtcacattaatcgtttgtttttggtcaacaactaaacgttgcttatgcttgacattttcctttaaccgttttcctcccttttccggggcatgtcctttgttggctcgtccttttatttttgtttgttttggtctggtgaggttttcctcctctgacagtctccgtctcctgcgtctcctgccccggataatttattgctccggctgccgtgtcgtgtgtcaaaagtttttatgtggaaatctgtctatgaatgaggcgcgtatgggtgcagggtgcctagatgctctcacatcctcggaggcgaaaaaaatccgaatcattttcgaatttttgtgcagtttcattcgggcaaccctcgcttgattaattgtgcccgcccctcgggagtgtttgtctttgacttttgtttaggatcatcacaatagtcgaagtcaagtcaaataaatttaccatcgctcatttgtttgctcagcggctaatgccactgcaaaatggctgtcggggattggaattggaaaaatttgaaaatcgggaaatcggggaatcggagaatccgaaaatcacagagagccggaatgccagcaaatcagaatagcgaaagtgacgccgacacttgttgtcacagaacacagaactcttgcctgacatgtgcaaaatgctcccgacaagcaacgcccacctctattgacacttgccactcatccaaattcgatacccactcgaaagccttgaaaacattgtaaaactcgggcgacaactggccgacaaatgtcaccgccagctgacagatgacgacaatttttccgacgacctgtcaggcgggaaagcagaacaagaaaacaacaaagcaccagcacagcaggaaaatcaaactcaaattagtcgctggccaaaatgctggggaaatatttacacaaatgaaaatcgccgtgctacgtgattttcgctgcgttttttcgaattccccgtattttttgtcggttcggttttgtttttagagcgtgtcgttaggaaaatattttacgatacgaagaatgggcgatgacgacccatttagctcaggtcggaaatcggatttgggatcgagaattggagcaaagatggcctattccatctattcggattcattcagctgtgtcttcgaattcaaaggttgcaacgaggcgttcactaaaaaatgaaagtggaaatgaggatgcagtggaattggtgcgagaagtggagtctcacatgacaaataacttatgacatattaacaaattaacagctgaaatgaattttcaaggcgactggattttttttaacaattttaatcgaacttgacaaaacatttatacaaaaattaattcgagcatatttgtttttccaatttccctcccaacatccaagacgctcgtaataaagcaatgaaattttaattaccccaaaacgcactcattagaggccataaaaatacttttcacgcagaaatttgaattttccaacggcatgtgaggctgttgtcggcggcataaattatgcaactggcaataaactaattgagccatgggccacctccaaggagatgacatttgtgactcctaggggtgccggaatacccactccccctcccgcacccaccaaaaaggagcaggctaattgtttcgaatgtcgccccgggtgtttgctcactttaaaaaccactttaaagtgacagcatgtgagaaggccataaataatcagcggtatgcaaaggaagtggtccagaagatttaggagaaagtcgggaagtcgggatccctaaccatatgggtgcacaccttccacttcgcaggaaaaccccaagaaatcaattgccacggccataaatctgtgacgaaatagctttttttttggggggggaatcatgccaatagctgagtaattaataccaaaataggcgtgactaactgcggcaattattacgtagcaaattgagtcatttggcgccggtagatttatggggccaagcggccagggcgattccctcgatttagtttctccatggcaactctttttgagcccgggctgaagttttataatccagcccctggaaacaattaagttggcctcctccaggagcaatacgctttttaatcgggttaaccaagaggccatttcaggctgcggtatcataaatccttttatgagctcttttacgggctcctcttttctgttcagggaaaaaggaatagtggggataacaaggtgggtggagtttttccgcaggggaaaatatcttttaacgttagcaagaggaggctgtagattctgtagattcaagctgaattgtatttaagataaactaccctaagctagacagttttagatgttttggttaaagcataaatttttttgtaattttctcttgcctgcgctggcttgttcttttcagtttgggccgaaaccggcgatttccgtgatagtcatagctccatgaccgccgtagcaaatagtttggatagcacccacttgaacaactttcagacgtcatcgacatcctcgatatcgaaccggagtcgggatcgcaaagatggtgagtagcagtagctgccatatccgtaacccccagcaccaccacaccaaaagtgctgttcccagaccgtatccgctatctccggcggcccatcgataaggaacataatttataataatttcggaaagcgtggccaacgattccacctttgtcggcgaaatttactcggccgggtccgtttagttttcgattagactgcctttgatttgcgacctcacgacgacagcagaacagaaaaaagtgagaatggagccgaacgaaaatgatatttcacaggggcagtaatttagtttatttgattaagttttcggcagctacgaattcgatttggtctcactttctggcttccctggcccagaacatacgaaaaaacacaaaaagcacgccgcatgatcgatgacattcgggaacatacattaactggttataaatctgtttgccggcggtccgcctttgaactttttcgagggtggtgggtggttaatggctggtgtttgctggcgacgcctgaaggttgcatggcaattagtaacggtgctccgctgacgccagaaatcggagggcgctcagaagacctttccccttcgcgcttatctaccctacactggtaacccgagcaaacccagacggacggcatagctacagcttagctactccaaccgatgggcaaacaaattacacagccgatttatatatccacattatatatccatccttaaaaagtatctaagagtatgaattgcttctcccacaggcaatcgcagtgtaaacgaaaccacgatcaagacagaaaacatatcaagttccgggcacgatgagccgatgaccaccagtggcgaggagccgaagaacgacaagaagaacaagaggcagcggcgccagaggacacacttcacctcgcaacagctccaggagctggagcacaccttcagccggaacaggtatccggacatgtccacccgcgaagagatcgccatgtggaccaatcttacagaggcccgcgtcagggtgagtaagctttgataaagcgaattagtcgattattctgatgaatgagatttttacgttatattttttataactaagtagtgacatgttcgtatcacttttgcacatagtgcttccagcaggaagtattccctccctttccacaaattttcaaactttgcaccaccattaccgcgctgatgctcgaattaattgccaaccaagccgcaaacggcaaacaaacgccagattccgccagcttggttgccacattatgcggccattatagtccggaccccaattatattacggaccgcaggagtcgcgaccgcaatgcagccgcacagactcgtaaatatgtcgcctcgtttggcgttggcttaaacccaatgcggccaacacggccaacgcggccaatatggccaatactcgacccggaaagaagagccgatttccctgcgccaccggggatttatgtgcagctttgggggcggtgccggggcgtggcaggccgtggccaggggtggggtgttgccataaattgccgcagctaaaactgcagttggcagcgtttgcagcatttgctgtttgtaaaccgcgggcttatcgaacgcccgacctcaactgaactgaatcggagtgtttgctcaatatccgttctattgacatgggcccggggcatttgtccatgtccgagatacaatggagtacgatggtatttgtatctgtgggaaggtggttctatagaactctataactaacgccaatactttttcagtagtttatagtttcaatagtttatgctaaatctttttcttgatttatatttattttgaaagtttttaatagaggagtaaggtacaccccagtgtggaaggtctcttcatcgggagcaaaaactaataacaggggcatcgagttgtacaagatatcttggccacacaagcgttgtaattgtttgtaaacacgatagttagttgggcaaacaattggagttgtggcgccagcgcggcaaatactcctctgatatcgaagatatctgcggctatatctctattaccatttccacttccatttccattcgccgtcgaaacggacggaaagacaatcagcagacaggcgaagatatgatagacaaatgatcgatgatcgccggtgattgctgatgatgatcgggtttgtgatcattgtcattggacgtatggcgacattagcgtggcattaattgtacagttagaagtggctgctatcacagccatccgagtgcaattgccgcggaaaaggagaacatctgcgaggaaggcgaatgcttcatggttttcctatgcaaatttccctggactttcgcatatgcccagaaaaatcgacggaccgacccccttgcacttgacaacatttattaagaaattagctgcggcccagaatgacaagggacggagccgggaatgatggcaatctaaacatgtgttcctcgcataaagcagctaaatgcataaaatattgatacagtttgttttatggtccattatatgatgatgacaaaaaggttggctcggttgctcactttccgctgcttccacccctcggtagatgcaaaacaatgcccagactatttgtcatcgccagccgagggttgtttaatgaattagaaaaccgcacacgaattaatgatgatcgcgatcatgcctttgcgactgtctgaggggtggctcacatttgactttgactccgactccggctgcccattgtaatagcggaggcaataaaatttatcaaatatacaaaaggattacggcccactggcggtgcaactccgctccgggatgggccgtataaatctggccgggctttaaactgtcaaaaaagagcagcccccgtttccatttcttcgggccctgatagctactaatccggggatttacatgcgccggcaattatggcaatatgttcgccccgtctgtcccattgtctcagtgctcagtgctcagtgctcagtacccagtactctttcttcactcttccgctttttaatgtgtcaaatagaactcactttttaattcaattaccagccaaggactggcaaaaaacaaggcccatataaaagcatttgtcgctgccctcaatcggaggtggcatcgagcatcgatcgaatccatggggttgtatcgagtgttttttgccagttctttttatggtcaggtgtcggcaatggcccggaaatggaaacagcatttgccaatcgctgaaagtgtataaaaaagccattgaaagtggccacaaaggagccacaatatgctggcatgattgcagtttgaatggttcaatgtactggataagttgggaaagaggaatcacacaaaaaaaaaactgggttatgccaaacaattgtgatatttttataggctatacaatgaacccaacataaatatttgagcttaaataattgcgtttaaaatgttgctattggctactgtgcctttggtgtcttcctcgaccctttgactttatttactcctgtaatagccgtgattaggctactttttgttcacatatgtccgtatatctgcagctgcagtcgaacatcggaccaattaataccggcgatactctgacgggagtgtggtagtgatgtatctgtgtgtcatccagacagttgagcacacaaagagacaacgctgcgtggagtagttcacgtatcgatgttatctgctgattttcacttgggctgggctatcactggaatagaagaaccccggaaatgagaacccgtcccatttcacatttaacatttcacattgggcaaataaaaaacgtatttagctgcaatttgcgaccatcaatcatggcagccagcacaaaaaatgaggccctaacttctagtggccacatggccacttttggccactcatatctttttgccacgtccaccatttacctgatgaagcgttgcaggagttgccgtcgagtggcgttgatgctttcatcaaaaccaattaggattttccacaggactctgcccgttgagtggaaaattgcgctgttttttttgcactctctcatatttcactttttcacttttgcgcagagctcccttttttttcagcaggcccatcaatttgccatcagcattttccgttttttccgtctccccggattttgtgttttttttttgcaactttggcaacttgctaaatgatacgtgaaaatgacagctgacgagatcgatgacgttagttttgcatccttgatgatgcacgagatccttgagctcctgatgcggatgctgatgctgatgctgatgctgatgctgatgctgatgcccatgatgatgatgctggcgatggtgatggggctgagcgatgtaccttgacaaattgacacattgcgatggcaggggatttggtttttgtttctgggaaaatggaaaactctcactttcgctttcgcctcggcaaccagttcatgcgatttcaattaactgccgcgactaattagattaaggcaattgccgcaccaaattctcttgctggcacgcggccatagtttttcacttgttagccgcgttaggaatgtctcaatcaggattttcccaggcgaaaacaaacattttttgcatagatcagcgcgtgtcggattttagtcacgccagttaggggtatgggaagtttacaggacataaaggacatgcatagtgcgtagagaggggggggggtgcagaccagcattggccataaatctgcaaccccgctacgtggaaaccgacgaccaacgcgttgatttagggacaatgtggcaatgcggcaacaagccatgaaattcgaatgtgcagctttaattgcccgggctaatgtttcgccatcggtgagaaccttttcccagttggcttctgtttctgttttaagaagtgtatcttaaagcttcgtggctcgagagcaagaaactcatcaaaatgctgccaacgtctgcgcagctctttgtcatttgtatctgtatctgagtaggagtatctttgtctgcccccaaacatccgtatctgtgcaaacttcagccataaattacaaagttgccattttgtttttatcttcttctggggagcactcgcccgccttttctctgcactttctgtgtgcaaaataattttgatttatttttgcgccctcgcaactttttcctccacgcccctcgctcgcagacttttttggggtggcaagccgagtttatttatataaagctctccattaaaaaaggcagcccgggctgactggaagtatttatgtatatatttgtatatttataattactgcacatgcgtattgaggcgggcgcgcattttgggggaagttttgccttgccactcgttgccagttgccagggcagatacataaattttcaagtaataaattataaggaaaatggccgactgttcggcttaaaagctgcgaataagtcgcgctgggaactatgaataaaacttttagatttgtgtctagttttttgaaaaacgaacagctatcttccttcttttttaaattttactcaatttaatctcacagtgagctaatcaagaacctacctgtttttatttccaggtgtggttcaagaatcggcgggccaagtggcgcaagagggagcggaacgcgatgaacgcggcagtggcggcggcggactttaagtccggattcggaacgcagttcatgcagccgttcgcggatgactcgctgtacagctcgtatccgtataacaactggaccaaggtgccctcgccgctgggaaccaagccctttccgtggccagtgaacccactcggatcgatggtggccggcaatcatcaccagaactcggtgaactgcttcaacacgggcgccagtggcgtggcggtcagcatgaacaacgcatccatgctgccgggttcgatgggctcgtccttgagcaacaccagcaacgtgggagccgtgggcgccccctgtccgtacaccacccccgccaatccgtacatgtaccgctccgccgccgagccctgcatgagcagcagcatgagctcgagcattgccaccctgcggctgaaggctaagcagcacgcctccgccggattcggcagcccctactccgccccctcccccgtgtcgaggtccaattccgccggactctccgcctgccagtacaccggagtgggcgtgacggacgtggtctgagaaaacgccctgggtgcgctgctcaaccagcaccagcaccacttgcagcacttctcgggaggatcggtgggcggatccggggtgccgaatgggatgcaacagcactccggcaacatgctgcatcacagcaacttgggcctggaccactccgatctcggtttggttgggggagggccgtccaatcaccaggacgagggcaaccacagtctggagggcagcaacaagtcccccatggaggcgcccctggccaacagcagcaacaacaacaacaacgacaacgatgacgaggacgtgatcgattgaaaaacgctctaacttaaatcaaactaaaggcagcctagccctaagcattcataaataattttagatgtttgcccaaactaaagataaataacataaatgaagcccctaaccaaaaagatacaattttttgaagaacaataattacatttaccagaaaagagtcccaaactctatttaatttgcattgagattagatgcccctttgttcgagcgcccccaaatcagcaattaagtgtttttgtaaataaaagcaaatatctagtgttaagcaacggaacccctttaactaatcaagccaaatagccatcccaaagatcatatagtcgctcctagttccaccttcagttccccgtcgtatatatcgtatatatataaaccagaaacgtatcaagattgtaaacacctaaggccaaaaaagaacactaaagctaaactatatatcaagcagtagcagtttttaaggagttgtctagtcgtatagatccgcatatggcatataccatattactgtctgtatatgtatatgtacatgtacatgtatatccccactaaagagccccgtataaatataaactatttaataattgtacacttaacattactagttatagaaattgaatcaaaagaacaataaaaattatggaaaaaaaaaaacacccacgcgacctcataatgaattacgagggcaaattgcggtcaaccgctgggataacggatggcttttcccgctgggaaagccgcgtaggtggagtgggaaatggaaacattaaaaaatcaaattgtaatttacagccgtcggggggcgatatatgccaatagccatttcccggtggcggggacaggaatggggacttaatttaaagcagcttttcctcccccaaaagtgagcaagtgcttaattccaaggtggacctggtggcaaaagatccatccatcaatttattcattacggtgaaattatgtcgcatttatatgcaccccgcaaagtgacaaccccccggaaaatcaccgcacaataaaaataataataaaaggacatccgcgtcgggggtgggttggttttcctggttcggggcatcaaatttgaatttcatatgctgcccgccttgattgaaggcggctaataaagtggccagagaagggaaaatcgggaaaatgggatttcccgctgcgttaagcatcaatttcggcgattgcgggagatgcaggggggctaaactgcgacccggcgaccatttgatttattttattcccccttgcccgctgttaatgttttaataagattgattttattgccgcctctgtgcgtgggtggatttggcccgctgcggcgtcaaagggttaataagttgcgctccagctgttttagcaactctattattgtccccatttctgtgctgggcacagtattcctcgtgccaggaaatcgcaagatggtttgcgaatgtgagagtttcggggagtttttttttcccctatctggaattactttatcgacacacacttactcgcgcaattaacttttcggcgtaattaatgccgagcctaattattgttaaccaagctcaggccgtcaaccgggcagagcagccccaaacgggccgcataatggatgagccgcaattaaaatcaacttcctata

SEQ ID NO: 1151 - DNA, 3422 bp, DROSOPHILA
gaattcgttttcaatccagctacgtcctgttacggatgcagacgcgtcgcctccgttgtgataccagatacatgtaattgcaggtctagagctacagatttagatacagagattcgagtaccctagcagatacttagcctaattacgccgtggattaaactattaaacacttaaatccgccaggatttgcctatcaaatcaaatcgaatcgaaatcatatcactgagagtgccgcgagtgactgtgtgcgcgagtgtgtgtttctgtgaagcggcagcgagattaaaaacatatccccgagttacttaaaattaatcactaacataatcactgtgatttttattatttgatctgccgacgtcaacaccgcgtgtgcgaaaactgtttaacggctggggctttattaaatgccgcttcgcatttgattagcaatctgttgcaacaacacagcacaaacctaccgatctccccgagatttatagcccactgcccacgcgatatatccggaagattttcggagactttcccagatctccggcattagaaatgctggccatctgatttattgacggacccacgacatttgctccatcaaagttcgcctttgatattcgggatcgacagaaccagagaaccgacggaagttcgttcccaccacctagtggattaattttaattcctctcccatcattcagagcttttcgggctctggcaacggctgcatcttggatttgctttcaccacagttggaagataccggcctcaagacgacgactttcctgcagcacttcaaggacgtcgtcacgacgaagttcacggggagggaccaccacctgccgccgctgcaccccgcacaccccgcccacccggcgcaccagcagtcggcgctgcaccaccaccaccaccagcagcagagcttctccaccattttccccacgtatctaggcatggaccgctcctccgccgtcggcggttgcggcgggggcggcggtctgggagtgggcgtggtcaccagctcggccacggccttgggaccgggtggcctgaccaacgggggcggcggagtggtcagtggcgcactcaacggattggaggccatgtcggccgagtccacgggtctgtgcctgcaggatctggtgagtgccgggacggccaacggagcaggctccgcaggatcggcagagagtgccaccaccaccagcacggcactgagcagcggcagcaccggaagctccacggtcaacggaggaggcagcagcacctccggcacggagcacctgcacagccaccacagcctgcacgactccagctcgtcggtcagcatctcacccgccatctcgagcctgatgcccatcagcagcctgagccacttgcaccactccgcgggccaggacctggtgggtggctactcccagcacccgcatcacacggtggtgccgccgcacacgcccaagcacgagccgctcgagaaactcagaatttgggccgaaaccggcgatttccgtgatagtcatagctccatgaccgccgtagcaaatagtttggatagcacccacttgaacaactttcagacgtcatcgacatcctcgatatcgaaccggagtcgggatcgcaaagatggcaatcgcagtgtaaacgaaaccacgatcaagacagaaaacatatcaagttccgggcacgatgagccgatgaccaccagtggcgaggagccgaagaacgacaagaagaacaagaggcagcggcgccagaggacacacttcacctcgcaacagctccaggagctggagcacaccttcagccggaacaggtatccggacatgtccacccgcgaagagatcgccatgtggaccaatcttacagaggcccgcgtcagggtgtggttcaagaatcggcgggccaagtggcgcaagagggagcggaacgcgatgaacgcggcagtggcggcggcggactttaagtccggattcggaacgcagttcatgcagccgttcgcggatgactcgctgtacagctcgtatccgtataacaactggaccaaggtgccctcgccgctgggaaccaagccctttccgtggccagtgaacccactcggatcgatggtggccggcaatcatcaccagaactcggtgaactgcttcaacacgggcgccagtggcgtggcggtcagcatgaacaacgcatccatgctgccgggttcgatgggctcgtccttgagcaacaccagcaacgtgggagccgtgggcgccccctgtccgtacaccacccccgccaatccgtacatgtaccgctccgccgccgagccctgcatgagcagcagcatgagctcgagcattgccaccctgcggctgaaggctaagcagcacgcctccgccggattcggcagcccctactccgccccctcccccgtgtcgaggtccaattccgccggactctccgcctgccagtacaccggagtgggcgtgacggacgtggtctgagaaaacgccctgggtgcgctgctcaaccagcaccagcaccacttgcagcacttctcgggaggatcggtgggcggatccggggtgccgaatgggatgcaacagcactccggcaacatgctgcatcacagcaacttgggcctggaccactccgatctcggtttggttgggggagggccgtccaatcaccaggacgagggcaaccacagtctggagggcagcaacaagtcccccatggaggcgcccctggccaacagcagcaacaacaacaacaacgacaacgatgacgaggacgtgatcgattgaaaaacgctctaacttaaatcaaactaaaggcagcctagccctaagcattcataaataattttagatgtttgcccaaactaaagataaataacataaatgaagcccctaaccaaaaagatacaattttttgaagaacaataattacatttaccagaaaagagtcccaaactctatttaatttgcattgagattagatgcccctttgttcgagcgcccccaaatcagcaattaagtgtttttgtaaataaaagcaaatatctagtgttaagcaacggaacccctttaactaatcaagccaaatagccatcccaaagatcatatagtcgctcctagttccaccttcagttccccgtcgtatatatcgtatatatataaaccagaaacgtatcaagattgtaaacacctaaggccaaaaaagaacactaaagctaaactatatatcaagcagtagcagtttttaaggagttgtctagtcgtatagatccgcatatggcatataccatattactgtctgtatatgtatatgtacatgtacatgtatatccccactaaagagccccgtataaatataaactatttaataattgtacacttaacattactagttatagaaattgaatcaaaagaacaataaaaattatg

SEQ ID NO: 1152 - protein, 509 aa, DROSOPHILA
MDRSSAVGGCGGGGGLGVGVVTSSATALGPGGLTNGGGGVVSGALNGLEAMSAESTGLCLQDLVSAGTANGAGSAGSAESATTTSTALSSGSTGSSTVNGGGSSTSGTEHLHSHHSLHDSSSSVSISPAISSLMPISSLSHLHHSAGQDLVGGYSQHPHHTVVPPHTPKHEPLEKLRIWAETGDFRDSHSSMTAVANSLDSTHLNNFQTSSTSSISNRSRDRKDGNRSVNETTIKTENISSSGHDEPMTTSGEEPKNDKKNKRQRRQRTHFTSQQLQELEHTFSRNRYPDMSTREEIAMWTNLTEARVRVWFKNRRAKWRKRERNAMNAAVAAADFKSGFGTQFMQPFADDSLYSSYPYNNWTKVPSPLGTKPFPWPVNPLGSMVAGNHHQNSVNCFNTGASGVAVSMNNASMLPGSMGSSLSNTSNVGAVGAPCPYTTPANPYMYRSAAEPCMSSSMSSSIATLRLKAKQHASAGFGSPYSAPSPVSRSNSAGLSACQYTGVGVTDVV

SEQ ID NO: 1153 - DNA, 2522 bp, DROSOPHILA
aaataagttgaatttttgactttaaagcttaaaattaagggttttttgcttaattaaactcaatttttttataaaatataattaaacaatatttattttacttataaatcaaaaaacaaattaaaaatattaaatatacaagaaaataaacaacaaattccaagtttacacacttttgagactgtcaagaaactctttacacattttgttttcctactttgttttgttctttttcttagaacgaactagatttttccgttatttttggctttgcattgctttttacaacgcttttattgaaatttgttgactttgcctgtgaaattttgctgatcaaattattaaatttaataaaatgcctggaaagagattaacttttgaagttacccaattaataaactataaccaccatgtatatatttatcattaactagggcctgcagcaagtcaagaacttctatctcaggtccgagaagctgcccacgcccattcccactggagaatatctgctgatgattgactgggtgttcaacaagaaaccgcaggctgccacaaatgtttacttcacatttgtggaggacctaaaagatagttaacgaatcaatcgttcagaccaaaatgtttaaactgaactgtaattacaaaataaacaatataagtctatattgttttagccgatgaaaattatatggaattttggctttgccatcaacgagaaattgtttctatccgtgatctgtggaatacaaatgcgactattaagtctttgttcctgagaccatcaagagcacttccagcagccagcgcaatatcgtaatcgtaatttaaaacaaacaatacaaaaataattaccaattaagcccattttaaattcacattccgtattgcaaagcacaaaatagccttgtgtccagtggtatccagaaaaccggcccatttaataagcttttaaaaacgttgagggatgtgcaatagttagtttattcgtctctttgggattttagcactgttcgttacactcatcgcccgcgtctgcctttgtccatacggagattttgttgatatttttgcgaatcctgacaaaagccccacaaatctgatcgcagtgatcgcaggcctcgccaatcatgcaaagaagcacgtccagccaagttttgtccagttcggctgtggaccttttatccactttatatgtccaacgacctccgcccttgttcggcggatcctcccacatggggcgaatgcccttcttgaagagcatgtaatcacagccgcggttgagcttggatggcgtatcgatgcggaaatacaggttccagaagtcctcgacggtattgaagctgtcaatctccttcagcatgtcctcccatgatatttcagggtcgtactttacgccccacagggtccatgtgttctgcagccggtgcttgtttgtggcacccaacgatgccagtttgttattatccagagaagtccccattttaaattccgatgactctttggtttgccttaagttttccatttcgcagatactctatgctgaagcccccttttaaaatgcattcgtagaattcgtagaattgtttttaatggacttacaatatttaccgacgaatgtggtcaagcttagagcatttgatcatttaattattgacgttaaagcaatgcactgtcaattaggaaacaatcgtgattactaatggctgcatttatatgtaaaatacatttgacaggcaatcgaaacatatcgatatatcgcgtgatgctatcgtgagaggttggcccagcgctagtattgattgttaaacaaaaaggaattttgcactaacttgtgggccgcagttactgcaaattcgcgccaggatggacatgataaacaagttctactcatccgccgtacagacggtgtccacactgtccggcgttctgcccgggaacaatgtgacgcgggagtacgaggtgctggaacaggtgtgcactgccggagtgggtgagtttacctgcattgctagttgaacatattgtggcttgctgataccgagtaatcccactgccaggtctgatgtggaaggtgtacaatggccacaagaagagcaccaaacaggaagtgtccgtcttcgtgttcgagaaaaagtcgttggagcgctggtcgaaggatgaccgggagaccatgctggaaacactgcgtcgcggggttcaacagctaacaaaaattcgacatcctcacgtgctaaccgtacagcatccactggaggagagtcgggactcgcttgccttcgccacggagccggtttttgcctccctagccaacgtggtcggcgacaacgtccgctccgaaaagaagctctatgatgtagagattcgacacggtctgctgcagctcttcgatggcctgcagttccttcaccaagacgccaagattgtgcaccgcaacattagcgccgagacaatcgtgatcaacaagaaccgcagctggaagctgttcggatttgatttctgcattgccaaccaaccggccaccg

SEQ ID NO: 1154 - DNA, 522 bp, DROSOPHILA
atggaaaacttaaggcaaaccaaagagtcatcggaatttaaaatggggacttctctggataataacaaactggcatcgttgggtgccacaaacaagcaccggctgcagaacacatggaccctgtggggcgtaaagtacgaccctgaaatatcatgggaggacatgctgaaggagattgacagcttcaataccgtcgaggacttctggaacctgtatttccgcatcgatacgccatccaagctcaaccgcggctgtgattacatgctcttcaagaagggcattcgccccatgtgggaggatccgccgaacaagggcggaggtcgttggacatataaagtggataaaaggtccacagccgaactggacaaaacttggctggacgtgcttctttgcatgattggcgaggcctgcgatcactgcgatcagatttgtggggcttttgtcaggattcgcaaaaatatcaacaaaatctccgtatggacaaaggcagacgcgggcgatgagtgtaacgaacagtgctaa

SEQ ID NO: 1155 - protein, 173 aa, DROSOPHILA
MENLRQTKESSEFKMGTSLDNNKLASLGATNKHRLQNTWTLWGVKYDPEISWEDMLKEIDSFNTVEDFWNLYFRIDTPSKLNRGCDYMLFKKGIRPMWEDPPNKGGGRWTYKVDKRSTAELDKTWLDVLLCMIGEACDHCDQICGAFVRIRKNINKISVWTKADAGDECNEQC

SEQ ID NO: 1156 - DNA, 6461 bp, DROSOPHILA
gtgtgcgagcgtaaagcgataaagcgccttacaggatttttgcatcggactgctgctgttcgcaatttgataagctacctctgggcattatttttacgactcttttccactgctcacacaaacacgcctggaaatatgcaataaaatattccgattttaagctggtgtgtaaatcaaacaaatcttattgttttcaatttgtgctcattcccgaacctccttcgtcctgcgcctctgcccatttgttcagtcaattggtaaactctccgacacttgatcctgttgaaatcgcagcggccggagtcataagtatatatcaaccaggcgggtaacgaagttgaaggttgccgttgagtgaaatttgccctggcaaccgaaaagtacgtgtatttaaaagtcagccacatttattaagcatacgcactggtgagcaatttatgaaatcatttaagggcagctttcgactcaatgctcgcagtaatgaaatggaattcagcttaaattaaacagtgtagtcccacttttatattggtttaatatatcgcttctctatgtttgtttgggtttcagcatgcttcataacttgacctacttttgtaatgataagaacattttgaaagctcactcctaattatcaaatacaggtcacaactttgctgccctgttaacccaataaaaagattatgaatttcccaaacaaaatgtgaagcagtttttattgtacttgtaatcgatcatctacatccacattacgccatcaacttttgcaaatttacatttagagacgtacgaactaagctatacaagattcggataaagcgtttcaaacatatgactatgggcatatggttatggtacaaacatacaaacgatatatacgatacatacaactataactaacaactactggaaacgaaagtgttacgagcttgaccgaaagattggggagttcaagatatgccctacaatggatacgaaagatagatatagttaaaggatcctataagaatagcttgagcagggcatagagcgcccaggcagctaacgcgtagaaaacagccagtgtcgtatagtgcaggaccttcaatctgaagagaaagatagttgggtaaaataatgggttcagatatgaggatgatgcacttacctctcgtagcgcttgatggactcgggaatgttgctgggatcatccttgaccacatacagacgcagtccgtagagactgacgcggaacagattggtccagtccagatcgcgcatatcgaaggcgaagagccgcttatcccgatcatctagcttttccgtaagtttcctaacattatcgttgtcaaatcgaaattcgtttgaactgaagtacttgaggacattgcttagcttgtggatcttgcgatagatcttcatcattctgtaggtgaacaattcaagtagttgtagcacgcttaaattaaatatattgtaaacctacctgggtttcttgccaattatcaccatgatggcgtccatgaccagggcgggcaatgtgtggtagaggaagcacaggatgtggtactgccacatgtgcggcacgatggtgaagcgcggataccagatggacttccgcatcgggatgtcacagccgtactcgaagccatcctccatgtagcgccgccaggtgaccatgttctctgcatccggcacgtagttgtaaatcggcggagtctcgtatctgtgcaaaaattaattaggtaattaaatatactcattcagttagtgtttccagtcggcacttacttgtttcgcgctatatcccacgcactggctaacagagcatttacacacatgtccacgggaacaatgtgtgccttgttgtccatgtcacccgtgaaaacccgcagcactccggatccaattcccacgatcactccgcacggaccgtacatgttgtcgatccagccagtgaccggttcgcggtaagtggtgatcactgtaagtgaaccgaaatgtatttttcaattcatattttaatatttaataaaacatgatcttaaaccttttgtacgtcaatggctaagaagcgcactcgcaaaccggtttcaagcaagcatatcattaatatattgagtaaaaaagtgcggcgaaacctaagtttcttaatgaatgactttattacagagcgatgactttggaatgctaagcgaacgtattatttaattctactaaacaaacttgttgcacaacgagcaacttaattgcaggggcggcaccagagctaatgtatcatagtaatcaatttaataatgacttcgaggtgctgtcgagagttgaaggattgatcttaccaatgccgggtctgaagatagtaactggcaaattctgagcgctctgttgcacgacattctcggccaggactttggtgaaggtgtatgtgttcggatatcccttgatgatggtcggcgtaagggtgttcagggtgtgctcatcgaggcactcgctcagcttgaaggcgttctcgccagacatggtgccactgtagaatctctcctggatgtgccgcatgttgcagtgtgcaaatgctgtagagacgtggacgagagcctgtcaacacgagcagatgtaataataggattagcataattcttatacaaatatggtatatgttgcatccaactcaccttcaagttaacaatctctttggccagcttgatgatttccttagtgccgtgcacattgatggcgatggccattttgagcttctcatcgaatcgcactgtggccgcactgtgcaggacgatgttgacgttctccatgatggtctcccgctcgtcggcactgattcccagtccaggcagcgagcagtcgccactgatgatggtgatctggcagcggtacttgggattcacctgcttcatcttggcaaagacctgtgcgcagttaaaaatttaaattagttagccagggaggcgggagagaaaacaattagcaggtctccatcacttaccggatcgttaaacagatcctcgatcctggcgaaggcatccttgcccttcttggtgcgtatcagcaaatagatttgtcccacctccgtgacgcgcagcaatttctcgatgataactggagacacgagacgaaatgagatggaatggtatgtggtaagtatgtggtccgcattccagtcacgtactgcgagccgagtggaacttacttttgccaaagaatccggtgccgccagtgaggaagacgcccttgtccttgtagaacatttgcatgggcgactcgtctgggtaagagatcaatgcaaacagtcattaaacaattagccaatttgatgcgcatcattgatggtgggctcagtggggcgtccttcctggccccctttttgccgcccaaccgaaaaccatctgtttgctcagttggcttcgcttcggttcggtttgtttgccaccaacttgaagctccgtcacgaatttaaatgcgcatcaaatgccacttcaattccgcataattcacgccccacacaaacacacacacgcacacaaagacacatacatacacacacacaatcgcaggacgataggatagacccacaaacactgaaatagttgggagggcacgaagttcgctcctggctgcatttttgccaaagtgccaaaacggcaacaacacttgacgtttcaacgccgcctgccaatgggtctaggaatcctccacacccaaatccaccgccaactccctccaccccctgccacaccctgcggagtccatccatctctgcccacattgttgtttgcggcatcggttgccgttgcctgccacttgctgggccactcataaatatttgcaagttagcagctcgtcgagccattcatctattgtctaaaacgcacacacgcctaaaatactcgcacacgcacagttgcatatgctgcacgtgtgtggccagatgcactggcagaaaagggggttggttggtcatccaaatgaatctaaaggaatcaaatagcttaattaaaactattttattacctagctgaaatctgatttgatataattgtacagtgaatcacaaattcatcaggataacacttcctacctcacctctttcattaaaatgcttaattaggaagattgaatatctagcttaattaatatatatttgaagttaaattcacttgtacttctctgcgtgcaagggctctgcacattcctcaattgaatggcatttcatcttgagatggcacgactcgccttagccctcatctcaagccgcctaattgccaatcgtcggcgtaaatcactgtcagttggagaactgggacccatagacacagaagcacacacacactgatcccctccgcagatcccaatacccatgcacaattgccacttgataattgcataataaatgcaacattgccgagcaggatgtgccgccgccgccggcccttcatcctcgcccatttgcctccggctgaggcattacaagcacattcatacaaatacaacttgacacctagagctgacaccgagcaccgaacggctcctaaacggcttctgtttcacggcaagccgccgctatgccgacccagcaccaccccctccttggagcggattcctggcccgaggccgcactcaaccacaagcacttggctggctcactcaaatgttttgtttacctatgctaattggcttaaatgcaactcgagcgcactttgcatcgcctcgcgcctccgtccaccagcctcaaactgaaaatgtgaaaatgtggaaatgtggcagggtcccccatctaccccccccccagcaaaacctcgccccacatccaaaaacaatcagaaagacagcactcagatacccagggcatcattgttccgtggacgcggcgaaattgagcctcacttggagtgactcgagtgggagtttcgagtgcggcgtttaaagctcttcgagcgctttggggcatttgttcaacgctaactccaacagctgaggcaacagcaacaacagcagcaacatcagcccccctttggggcacaacgagaaacaaaaacaacaacaacagcaagaggggtgctcactttgagtgaattgtcaacaacaattgttgttggctcttcggattctgtgggcgacagacaaaagtctgtcacataatttgtcaatttcaacaaatttttgtttttgaaaccccgctccccccactcgacacccacccccacaggcagtcatcccccgctaatgtaatatttcacataaatgcgttttatttttccgggcttgcggtggggttttgcgttttgggtacttgatcttgggtcgaatttttgtttgcacttggtaaaatttttttttttttttttgactggccacttacccttgacgtcgcttatgagctgacaatgatcttccagcgacttcatgccgttcataatgttcattattttgggatcatccatctcggacggataaatgatttctgattacctgtaggacgagaaagtaaatgggattacattggggtataagcagaaaatttatgaacatgatcgtatgcgtaagttcattaaaccatttggcgtaaatttaaagaatttcgaacaatataaagcaagctactaatcagttgtaaaaccgcttaggagaacgtgccacccactttaaaacgaaatttatagtgaaaagaagtgcgattccattcgctttcagcgacacagataatcccttaattgaatatctggacacccattctgctcaccgaccccctcctacaccgcccccgccccccccccctctctctcatcccttcagaaaactgaacagaagtttggggaaattattcctttaattcgagctagatgaatgggaagcgaaaaccataaagccaattacaagagccccaaagcggtggccatgcgactgtttcttggctactaaaaatcaaatatatatataagtaaatttcgctccagtaaagctcgaaatttaattaaaactttgttcgtctcctggcagaccagaacaggcggaacagagaaagggatagacggagagagcgagatggcggagtgaaggagtggagcgcgtcagggaaattcctaatgaagtgccagacgcacctgttgacacagaccaaaaacacagagaaaaccaggtagatataaaagcaaaagtaaaccgaaccgagccgaactcgaataatatttaataaaattcaaataaaattttcgaaagctagagcagcgcgaaattaagttgctgaatgagaacccgaatctttgaagtaagctgctatttgaagttgaaatttcgaactggacccgcatattttagccaacccgtttgcaggcaaatgcaacctgttacttaaactcatataaacaattttgatttcagtttcaaatcgattcgcatgtccaatgtcagcagccattggcagttcgatgacgcctgaaatttgcgttcaaatgcgcacatgccatgctgaa

SEQ ID NO: 1157 - DNA, 1583 bp, DROSOPHILA
ggtaatcagaaatcatttatccgtccgagatggatgatcccaaaataatgaacattatgaacggcatgaagtcgctggaagatcattgtcagctcataagcgacgtcaaggacgagtcgcccatgcaaatgttctacaaggacaagggcgtcttcctcactggcggcaccggattctttggcaaaattatcatcgagaaattgctgcgcgtcacggaggtgggacaaatctatttgctgatacgcaccaagaagggcaaggatgccttcgccaggatcgaggatctgtttaacgatccggtctttgccaagatgaagcaggtgaatcccaagtaccgctgccagatcaccatcatcagtggcgactgctcgctgcctggactgggaatcagtgccgacgagcgggagaccatcatggagaacgtcaacatcgtcctgcacagtgcggccacagtgcgattcgatgagaagctcaaaatggccatcgccatcaatgtgcacggcactaaggaaatcatcaagctggccaaagagattgttaacttgaaggctctcgtccacgtctctacagcatttgcacactgcaacatgcggcacatccaggagagattctacagtggcaccatgtctggcgagaacgccttcaagctgagcgagtgcctcgatgagcacaccctgaacacccttacgccgaccatcatcaagggatatccgaacacatacaccttcaccaaagtcctggccgagaatgtcgtgcaacagagcgctcagaatttgccagttactatcttcagacccggcattgtgatcaccacttaccgcgaaccggtcactggctggatcgacaacatgtacggtccgtgcggagtgatcgtgggaattggatccggagtgctgcgggttttcacgggtgacatggacaacaaggcacacattgttcccgtggacatgtgtgtaaatgctctgttagccagtgcgtgggatatagcgcgaaacaaatacgagactccgccgatttacaactacgtgccggatgcagagaacatggtcacctggcggcgctacatggaggatggcttcgagtacggctgtgacatcccgatgcggaagtccatctggtatccgcgcttcaccatcgtgccgcacatgtggcagtaccacatcctgtgcttcctctaccacacattgcccgccctggtcatggacgccatcatggtgataattggcaagaaacccagaatgatgaagatctatcgcaagatccacaagctaagcaatgtcctcaagtacttcagttcaaacgaatttcgatttgacaacgataatgttaggaaacttacggaaaagctagatgatcgggataagcggctcttcgccttcgatatgcgcgatctggactggaccaatctgttccgcgtcagtctctacggactgcgtctgtatgtggtcaaggatgatcccagcaacattcccgagtccatcaagcgctacgagagattgaaggtcctgcactatacgacactggctgttttctacgcgttagctgcctgggcgctctatgccctgctcaagctattcttatag

SEQ ID NO: 1158 - protein, 505 aa, DROSOPHILA
MKSLEDHCQLISDVKDESPMQMFYKDKGVFLTGGTGFFGKIIIEKLLRVTEVGQIYLLIRTKKGKDAFARIEDLFNDPVFAKMKQVNPKYRCQITIISGDCSLPGLGISADERETIMENVNIVLHSAATVRFDEKLKMAIAINVHGTKEIIKLAKEIVNLKALVHVSTAFAHCNMRHIQERFYSGTMSGENAFKLSECLDEHTLNTLTPTIIKGYPNTYTFTKVLAENVVQQSAQNLPVTIFRPGIVITTYREPVTGWIDNMYGPCGVIVGIGSGVLRVFTGDMDNKAHIVPVDMCVNALLASAWDIARNKYETPPIYNYVPDAENMVTWRRYMEDGFEYGCDIPMRKSIWYPRFTIVPHMWQYHILCFLYHTLPALVMDAIMVIIGKKPRMMKIYRKIHKLSNVLKYFSSNEFRFDNDNVRKLTEKLDDRDKRLFAFDMRDLDWTNLFRVSLYGLRLYVVKDDPSNIPESIKRYERLKVLHYTTLAVFYALAAWALYALLKLFL

SEQ ID NO: 1159 - DNA, 6894 bp, DROSOPHILA
tcagatggttgtggtttcaaagatagattggggcaatcggtaagtgatcagatattggatattgatatagggatattggaagctaatgaaaacatccgtagcttattgaagatagactttcatggattcgcgtttcatgtaaaaaacttaaagttgttcttgaaggtttcccttgtttataagtactctcaactaatgcgtagtactctagttcaaaatcacagcttttttcataaacaatggaaaatccgaccttagcaattgagaaatccaaaaccacaatcgcttcccgcccactgataagtcctgggtttagctgaaattgtatgtagaatatttattacaactttgaacttagatagcttgggttctcttttgctttatgtaaaatgtgttcttttctagcaataatcacaataattttgttataaacaaaattgcttaaaattacgatatatctgtagactaaatgttaggacaaaaatagcgagagcattgtgtatactcgtttaaatattcataatcatattcctcgtcgtattcgtaccattcgattactacaattttatatagatcaacgtttcgtgagcgtgcgtgagcggtaagcagatatatagctgcataggtattcctcgatccgaactatccatctgtccactatcgagctaactgctaaacttatgtgtatattttaaatggcgcatcattgtcaacgacctaactacgataccaagtagcaaaatcgttatatgggatatcctcgatcgtcgttcaatcatcatcttcaacctacaaattgcacggtctgcctgtgtccctctcgttttttatgatattttttttttcacatttttatttgatttattttttatttgtatcttctcactctgtggctcacctcgtgtcaatgacgaactgcacctgtctttcgcctgcctaggaccatattcaaagattgtttccttataattttgctaaatatatttcgcacagaacattactgagttggatctccgaaagtgcaattgctgattcgttctcttgcagtcttagtggtagaaatggaaatgcctaacctcatgacacacaactctctctatctcccccctacaaatattattgagaaatcattgaaatcattgttttgaagccaaaccctggccacgggctcatgtctccgtctccttgccaccgccgaaggtctccacgggcggataaatcggatggctgatgcggttcatttcaagggtcgatggtgcggatggtgttcgggatgctcctagcagaccgcagagctgctgcagcatgtcactgtacgatcttgtgctgaggttctggctcaggaagtgcaagatcaggaagtcaccaatctgttgagaaaaaccaaaaacggattaatatacaataggtatggatggtattctagttgagcacccacctccaaacgcctaaccagtccggcgatttccttccgttgtgccgagcgataagaacgcttgatgatggtctcccgagtggtgggcatcatgataaccaccagtgaatagagcacagccacgccggagatggtggccaagatgataaaccagaacctatgaaaagtaataaaggttaaagattccctcaaagagtaagaacccactcaactacttaccacaggaagatgtagatcttctcgttgaggatattcagtgccagcacacagagagtgtcgtgtttctggaccgatccactgggaccgaacttgtggaacgtgcacttggtgagccggggaaagatctcgatcatcggatcgaagcgcttgtcctgatccatgttggagaacttgagcacatccgtaccgtaggacatgaaagcaccgcccagaaacttatccaccataaagatattcacaatcacgttgataaagttaagcagttcgcagaaaaagtatgcgaacgagtagccgttgtgggtgttcaaactgttcacgaaatacttgaggatccggtcctggcgatcacgccgatagtcatccggcacactgaccatgccgcgcagtccatcggtgatcatgcggatcttgccgtcttccatgttcttccaaacccagtggggcacgtagaacatgagcccctgaaataatttacagattagtttggtcggaagcgggaattacaataaattaatgaaaccacatttgtcacgtttaaagcgaacagcatgtgataggccacagtcatactaagacttcaattaagttcacttaatctacagacaagatggaacttttcgtattgcaagattgctcatcatcatgtaaattgagaaagcgtggggtaaattattcaattaagtactactcctatggatttcaaaataaatccacagcgatgtaaacaattcaaattgtaaatctttcctaagtactgcgtacatatattacttcgagcgtcactcacctggaagaatagcacgaatggcacccattgatagtagctgtgatagcgcttctcctggccgtactcattgcccaatcccggaccagccacgtccgttccgatttgccgatgctgctggccaggtatcgtgtacgtgtaggtgatccagcagaaggtgttgattacgtgcatcggaatggcgccgtcgttgatgcaacttatgggatcgcctgcaagcgcagagatagagataattttttagatatgcactcgacctcgtcgcaattcagatcaagggaaacgcaagcgcattcctcgccagaaaccttctcgccagccgttcgtcaacgtcaagtgccattagggcaatctctggtggtctggtggagctggctccacggtcccaatttgtcgacgctgtgggtgcggtaacgactatgctacggttacatttattatggctgcagacgtgcctaggtaaacctgcaacattcggctggatggacgaacggacggacggacagatagacagccttttttttttgggtgcgccccaactttatcgttcactatgactcccccgtgttcctactataactcctcccccttttggataaacaaagtggatacaaatggagctgcagacgaaggtggagcgggctggatggggaattcccagaaccaaccgtcaatatttgactgtggttttgtcagttgttcacttttggagcacttcttttaatgtacaaatatttggattgaagctgcgatggctttgcgatgcctagatcagataaaaatctcgtaaaatgggttttaaagtcagcaagttttcaatgacaaaaaataaaaacgattgagcataattaaattgccttgttgtttaaaaaccatttgttggaaatgtgcttagtctactagttctgatttttaataacgctaatcatttgtttattcaaggcctttttcttatcaccctttttcgaatgaagagagataattgcttcgagtttaatacaaagctcgcttaaaagtgcgtgggaatgtaaaatcatattaataacaagtaccattatgtaagacaccattcactgagcccagcttgagccatatacattgattttcacgccaatttctggcgaggcacaggctagcaccaccaccacccgtggggaccgaggaatgagtcattcgaataaatggctttagctgaaatccgatcaacgtgttgcggtcaatttgtgaaagctctgcacgcgtttatgcctccgttccgaagagctcaaattcaaatgggtcgaatcgtatttcttggaatttagtgctgcattagcagcattgcagcaattgcaaaagcaaactgacaaactgggctactcaagtgctaaacacttgcatagctgcactaattttcagtaggtgctaacttaccgatcagattgtttgcggtgacgatgatgcaacaagtgaacagaatggccgtcgtgatcctgtagtggcagcggaaaaccatgttgtcgatgaccgccttgtccagcagatagcgtatcttgataaagccggacacagccgagaccatgccaaagaccgccatgttgatggttggtgtgctgctgcaacgaagctaactgcaagtggagaagagagcattaacgagttgagcagcgggacactgtgagaaatgggcatagagttcctaattacgctcaattattaacaatgcggtttattgattcgaatctgttttacttttcttttgttattggacattggattgggagcaagttatcttgattgtggagtgcattgcaatctgcctcatttcttttgccacacttgattgcgttctgtgtgtttgccttgtgcgttatctaggacagacatgacatattccaaattatttcaccaccctttacccacccatacacgaccatacttcctccccactactcccaatctgagctccagtaccagtccatgttcccatgccatactatatagcataccgaaccattccatcggttgtctgggtctctcggcgttatcgtcgacaagccgcacttacaattaggtaagtgcttgggcagtgccggaattgtttgtcgggagcatagctatttctctctctaactgaataatgcgagtatgttgtgcaatctaatctaatctgcgctaagctccaggtccaggttgaatgccctgcccttgcctggtaaccccgggctgtccccaaaagtactagatagcgaacaagttcatctcaagaactcggctctcagaaccggtacagctttttgtcaacccacgcataaatttcactttgtccccatgcccaaaaggggttttgttttcttttcccactttttggtcttttgtcggtgctttttgggtttcgagttgggtttttggatttcggctcgccgtggatcaggttctgcttggctttcttctcggctcttttgtttatatgcaaattttttttttttggtgtttcgggctattgtgtgtgttttggctgtatttcatttcggcacgacagatcgcatcgtatataactccgaatccgaatcggaatccgtaactccgagagcgaaacgcacacagcaacactgcgccgcacgcagggcgcatagagtcgtctctgtcgcacgcatacgagcggcaattaaagtcgcaaagtatctgtatctgcgcaacggcagctactccttttaaatgcatcagcttctgcactgaacattcaatcttaccacgcacacaacgccacgaacggcactcacacagatacgcggagagcacttcatttcggcccaacttcaattctggccttttttctttcaataactcttttttccctcttttttttttcgaaaaagacaaaaaaagaaactggttttaaggtattttctttttgggagcggagctgagcggtcgcgatcggatccgatcggttgttgccactgttctctctcattttgtgtcgttttccttggtgtgtcattttttttctccttttttcctgaaggtgttgctaccaagattggcaacagcaacctgccagttggccagaaccgaactgcgacgaccccttcgcacacttaagtgattcttttgctcctgctggagtcgaagtagctccgcttttcagagctctccgctcgcatttaaatttattgctgccactttgacacttcggaaacgggttttcgctcccagtatttataatttctggctggttttttagttgttttttgtttgtttttaactttgttgcaaatgcgagatttctattatacacaagtacaaacacacagatacactcagacacagacagactcagctggaattgcactcgcaactgcattcgatggtggtgtgcgtgcagcttggtggttgctcagtggtgctgagctgtgatttcagacaagtcaatggtgcccatacccgtatccgtatctcgaaaatgtgcagctgctctcagcggcgttcaaaaacctactgaaaaccaagtccccgagctcgaaacagaacgatccattgtatatatgcctcccgagccgcgagagagtcgctcttgcgatctgggtggttttccctctccggcggaaccagcgatcccagctggttcccgctccgagttcgtaaatacgctcaagctgcattcgcgcattgcctcttacctgagccgagagacccggtgttgttacctgtagaagtatttggtgccgaggtgcagaggacccacccaaccacctcaggtcgcttaggtagttctcgctcaaatggcttgattctcagattttccctcgatcttgaaccgacttgaacgaggcccaataacatctggatttgaaatctgtaaatccattgattagtttggtctctggatgaaggggggacgtacaacttaatcagctagatttgggttttagagtatgttagggtagcttaaacagtcgcagttcaagtcgacgaagggcaaacaaagatttaggaacacaatgggccacaactggaacatccaataaaagagtttaagaacaaaagatatatttaagacttgggcagagttcaagaaaacaaaactgtagatgtactaagagtttgctcaaagtctctctccttatttaagtgattttattacgtatagtattcaattttaaaatttattgcattttaaagtctttttattgaatttagtactacaagtttattaaactttaacaatactgcactggaaaacttgaagtctataatacgtacttttagttcttatgcaatcgctagcccatgcaattatttatccttctatcaatcacctctaaattaataggacctcgaatccaaactcaagtaagtaaaattaatgaggtggaccccaagtgcattccaattaattcctcggaacttggagctgcctgttcgtttaatttatcgctgtttccacatccagcgagtcctctgacagcacaga

SEQ ID NO: 1160 - DNA, 1421 bp, DROSOPHILA
cagctgcacattttcgagatacggatacggttagcttcgttgcagcagcacaccaaccatcaacatggcggtctttggcatggtctcggctgtgtccggctttatcaagatacgctatctgctggacaaggcggtcatcgacaacatggttttccgctgccactacaggatcacgacggccattctgttcacttgttgcatcatcgtcaccgcaaacaatctgatcggcgatcccataagttgcatcaacgacggcgccattccgatgcacgtaatcaacaccttctgctggatcacctacacgtacacgatacctggccagcagcatcggcaaatcggaacggacgtggctggtccgggattgggcaatgagtacggccaggagaagcgctatcacagctactatcaatgggtgccattcgtgctattcttccaggggctcatgttctacgtgccccactgggtttggaagaacatggaagacggcaagatccgcatgatcaccgatggactgcgcggcatggtcagtgtgccggatgactatcggcgtgatcgccaggaccggatcctcaagtatttcgtgaacagtttgaacacccacaacggctactcgttcgcatactttttctgcgaactgcttaactttatcaacgtgattgtgaatatctttatggtggataagtttctgggcggtgctttcatgtcctacggtacggatgtgctcaagttctccaacatggatcaggacaagcgcttcgatccgatgatcgagatctttccccggctcaccaagtgcacgttccacaagttcggtcccagtggatcggtccagaaacacgacactctctgtgtgctggcactgaatatcctcaacgagaagatctacatcttcctgtggttctggtttatcatcttggccaccatctccggcgtggctgtgctctattcactggtggttatcatgatgcccaccactcgggagaccatcatcaagcgttcttatcgctcggcacaacggaaggaaatcgccggactggttaggcgtttggagattggtgacttcctgatcttgcacttcctgagccagaacctcagcacaagatcgtacagtgacatgctgcagcagctctgcggtctgctaggagcatcccgaacaccatccgcaccatcgacccttgaaatgaaccgcatcagccatccgatttatccgcccgtggagaccttcggcggtggcaaggagacggagacatgagcccgtggccagggtttggcttcaaaacaatgatttcaatgatttctcaataatatttgtaggggggagatagagagagttgtgtgtcatgaggttaggcatttccatttctaccactaagactgcaagagaacgaatcagcaattgcactttcggagatccaactcag

SEQ ID NO: 1161 - protein, 395 aa, DROSOPHILA
MAVFGMVSAVSGFIKIRYLLDKAVIDNMVFRCHYRITTAILFTCCIIVTANNLIGDPISCINDGAIPMHVINTFCWITYTYTIPGQQHRQIGTDVAGPGLGNEYGQEKRYHSYYQWVPFVLFFQGLMFYVPHWVWKNMEDGKIRMITDGLRGMVSVPDDYRRDRQDRILKYFVNSLNTHNGYSFAYFFCELLNFINVIVNIFMVDKFLGGAFMSYGTDVLKFSNMDQDKRFDPMIEIFPRLTKCTFHKFGPSGSVQKHDTLCVLALNILNEKIYIFLWFWFIILATISGVAVLYSLVVIMMPTTRETIIKRSYRSAQRKEIAGLVRRLEIGDFLILHFLSQNLSTRSYSDMLQQLCGLLGASRTPSAPSTLEMNRISHPIYPPVETFGGGKETET

SEQ ID NO: 1162 - DNA, 6950 bp, DROSOPHILA
tatatatctagtttccaatgataaataacgccttttatttgcagtcctttattttgtatttaacttcttatttgttcttgctagcgatttttctttttccctatgatttttcatgtttttcggatccaatttgaatttgaattggatgtgtcgataacggcaatagctatcgattggtcatcgataggcgcgcccttcggctaatcggcgagatgggaatgacagaaagagatacaacacttcgcgcagggcgaagaagcaaagcaaagggcaaaattcataaacataacagtaaagatagtgtatagccgggcgtgaaatgtaatgaatcggattcatgacgtgacgtgttatcagggccagcccaatcccaactgcgcagcagcagcgacagcaacaacaataacaacaacacatcaagctgaatcgaaggagcgtgtaatcagtaatcagagtcgcttgttttgatttcctttcctcggaaacgaatcaacacgaaacgagacgagacgattcgaaacgaaatgaaatcaaaactccgctccggataaagctggtcaaaccaatcaacttgttgcggatccgcagcgtcgcccagtattgatttggcgcatattgccgacagttgtggttccgatttcgattcccagccagctgtctctctgcccatatatttcaatatacgacggacgcttctccaaaagccgatacaatactgtgcgataccatatttgtattcgtttctcattcgttgacgggcgaggcggtggaggcggcggtggaggttaagaagaagaaggagaggtcgtcgacaacggagcagtagaagaaggaggaggtggtggacaccagaccaaagcggaattgacgcaattgttgagaactatttttaatggtcagcgggtcgaaaatgtacaaaactcatcaaatattcagaagaagtaggcaataaggtgaggaggcagtgattcggaagtcccgaatcgaagtcaatcggccgatggaatcagaggagcacgctgtggacgccatggagaatcgccgtttgccactgtttcccatcgaaccggagccatccgtaacggcaacgcaacgcctaacgctccttgccacccggtaagtccatacaaataatgtccaatcaaatacatatattggatacagactagccctgaaatcccttacagactactacgtgcattgcaattaaattggaggattattgtttcgggcatcacgcttacattgctggccgtcatctggtattatcccaccttctttctgttcttcgcctttgtggtctattccctggtcttggtttttgcgggtaagtcttccgctttcgttccagggcgttttctaatggaatgatggcaaatgagtcaccatatcgggcgcaatcagttccgaacgagcgcctaattaaaaatgccaaatatctaattgcccttatctcgccgacagctgtggcgggaaccgtctatatccattatatattcaccaccaacgagccgacgccaccaagtcgcgtgccctcgcgattgctctacaatgccaccaagtgagtagcggactttgttctatatgatatatatgtatatatctctatctccattgacccgcagaagcaacatcttcgatctacccaagcccatcaagaatccatcgaatttgcccctgattttcggcaaaacagtggacctgcagctccagcagatcattgaatatgtgctgcgcgattttatgctgccctggttgggctacgtggtcaccaagcccaagctgatcaacgatgtggtgcgcgaagatctgtggaacgcgatacagaagatccatgagcgcgccctcagaatggacgccgccaagatcatagccgtggacatggtcaaccgggtgacagtgcatctggagaagattcgcatcgctgaggccagagcgtaagtacttcactttaacctggcttagtatccacaaaattaaactttttaaataaatagatatatattagtaatgaacagagtaggtcaaaaacctttccagataagtaatgtatagcaaagatatcggattaatccaatacatttttttgattgcgctcaaacaaagaaatgcatagaggatgattgtgattggatataaaagatacaatgtgcaattcgactctttgtttaatacctttactctctaatgctttgggccacaataagttgttgtttatctttgcgtgaaaaaatgcagtgaacagaattaaatgtaatttatatgcctcagagaatggccatcaatcccaaatcattaaattggtaatcaataagcagaaaggcaacagctgcgattactttgcattccattgttcaacgattcagatctataataaatatatgtattcctctttttagagctgaaaccaacacgccgccagtttttagtacaaactcgtacctcgccgacgaggagaaggagatggagttcctgcgcaagctttgcgagattatggtgatcctgctgctgccacgcggttattccctgcccccattgaaggtcttgctcagcgagattctctcctacaagagtaagaaccattgccgcttaataaacgacacgttttacttagtatcctgtccgcagttttctttccgatgatcaaaatgctgacagcaccggactacatcaaccagaaggtggtccaaaacattgaaactcgcttggcagcggcggccatgagcaagagaagctacgagtatgcagccagcttcgaggatttcctcaaaatcatcaacaactcgggcaacctcgaggagctctcgctcatccgcaagagcatagtaaacgatctgatgcatgctactaccatgcagaatctacagcgtgccaaaggcctcgatccggatcacgaggaccactcgctctccaagtcggagctcacagccgccgtccgactgaagcgctacgtacgccaactcacaatggccaagggcgagtgcgagaagaatctggccaagttcggctggaatggcaattactcgagtgatattgtaattaaactttagcattccccatatccacaacactgataaactcaattattatttgcaggacctaacactggtcgagatcctaaacactgcggttggccggcgctacttcaccctgttcctggagccgctgaaggctagcgctctgattggtttctacctggccgtggaggagatcaagcacgcgcacaagtcggccagccatcagctgggcacggagatcttttacacctacatcagagtgcccaagtcagagatccagattgacaagcacgaacgcaaactgatcgagacgttcctgctgggagatgccgagcctgacatcttctatgacatccagcgcaatgtactacgcacgctggaggaaaagtactatccgccatttgtgctcagcgatcaatatcgtcagttgaaggaggcattggactccaatgagattgcagatcccacgctgctaatgtgtcacaccattggcgatgtacaggagccgctggcggatgagcaaccgggcgcggcggatggactaaatggcggagctggtggtgccatcgatgtggccgcccacacatcctatgcacgacgaaaattggaacaaatacaggaacggattgataaaaagaatcaggcgctggacgccctcaaatattccgtgaagccggagtccaaggtgctgaccattctcgaaaaggagatggagtggctgaagagcgagaagcgacagacagaggcgcatttgcgtcgcacggacgcctggacagagcatctgggcaagtggaaggctaccatccaaagtgtagaggtcagtgctccatccctgagtgattttatcagccatcttcaattttttttttttttttgcatcttttaggtctccgatgagaaagagtccttgcagtttatgatcttggttcatgtggacgaggatattaatgccccagtacaaccgacttcatccaaaaacggtgacagcggccatgccaatctacgtaagcgaccgtcgggcatttccagtggttgggtagtaatgcgctcccttaatcaagtccatgtgtgtattccctttaagattctatagatcactctcactaacattttggttatttgtgaaggaactacaacggaagctgagacacgtgagctctaacctgaaggccatcgacctgcctacgaactttaagttcttttttctgaaaacagatcgtcatggtcaggaaaaggccaagtcacagattcagaagttcttgaatgtaagtttaattttttcttttacaccatagataagtttgtgattccatactttttggccacttagtttatcctggaggacgatcatttgaatggcagcgaggccatctacacgtttcttagcccaagttccgaccacctgaaacaatcgctgccctcgccaaagaagtccaaattctcgctatctacgctattccgcagcgatgctggcaaagctcacgaggccagcaaggcaaccgatccgttttggggtctgcagcgcgatgacgaggatatatctacctatttagacggcgagtccggcggtgaggctaaaatgctagcagcggatctggatagcaaggattcgatagcagaaccgatgtacgctctaatgggcgaaatctttgacatgggcggagttttcaagtggttgcgtaagagtctcatctcgtttgtgcagatcacatacggccgtacgatcaatcgacagatccgcgaatcggtggcctatctctttgaggagtctatgctgcacaactacttttcggccatcctcaagtcattttggccaggcggagttcttgcctccgcctatccgacgcgatcggaggatatgcgcgaaatgaccaccacggcggccaaggccctgctcaccgatcacataccggaggtactgtgcaacctggtcggtgcacaggctgccaaacggggtgtccttaaggttttcgatgccctgcagaatcccgcctacaacaagcagctattctacgtgagtagtggtttcagtggtcatatagccaaatatacaattggtatctctaatcttcaggagctgctggagatacttatgattgagttctttcctgaaatccgacaattgcgcgtcagcaactccaatggaaccaagttaaatacggctactgctggagcggcagctgcatccgccgctgcggcactggtggctgccacggcatcagcttcgctgccctcgcttaatcatagtggtgggggtcacagtgcatccacggggggtcaccaaaaccatcagggatcctcgtcggccagcggatcctcagctggcgcgagtggcgccaccggtggtggtgccgcctcgcaccaccaatcgcattaccaccacggatcccaccaccaccagcagcagcagcaccaccattcgcaagcgggcagttcgaagtgaagtgaacttaagaagaaccacttcgttttagattttactttaacctaaacccttttttttatttatgttatgttttgtttgattttatgttcaatgtttaatgctctccctctttctaaccggtggatattgttgatttagccgaggaaagggattacaaagaatagttatgtagaacacaacacaactcagtagtaccagtatcattccctgtacaaatgcagacttacaatccatatgaattcagttcttgttgattcgttcgtccatcacttcctgtagccagatttgtttgttatgtgtatatgtctgtacataggtcagtattaagcgttgtaccaaatcgttgtttatatactcgtatagtaaattgtgacactcagtttggattgattttaattatagtttagtagcagatattgagcccaaagttgcgtctgcagctggcgttgagtcggtgcttgtgattcccatgccgcgccagctgtagatccatcctccccccaaaaatattatagaaacacaacaggtgagattagtttgaggcaagctaatgggcgtccagaacagtgcgttccatggccataaagcaacttccgtattgacacacattgtattctttttcgaatttgtattaaaatgattcaattgttgcacatcgataaccatcaattaaaaattgtatttgaaatttcctaattgaccaaaattggtaatggtatcaaataatcttaaagactaagcgttgattgaggctgtcttaaaaaacagaacgtttgataacacaataaaacagtcgcaagtcaggactttaaagaagcattaatccttaagcatttgtggttatccaaatgcattttgataccatgttaaaacacacaactcgaaattacaacatttagaattgacccaaaatcagttttgtggacctgaaacgccccgtagacacccacccaccaccaccacgacccaaagacaccggcaccttctgtaacactaggcaaaatgacacttagatgattcatccccaatgagccaaacgtatcccacttaggacccacattaagagtttcgaggcgctttcaatctatttatgtattgcagttgtacacttttatgtgaaaatgcgaaataaagatcgctatttatgtagatggttcaccagtattttgatgggaccaccccacatacacttagaaaacgaccatatttgcgacaagcttttccaggggaatggcttgcatgtcgacgaccacaatgacgagatgattgcgcactcccaccggctttttgatcatcaatcttacctcgaagtatttcagcagaaagcgccactttagctcgcttttctcgcgctccgccagtcgctcgaagtcttcagcccgaagtcccaggatacgttctgccggatgtccagctaaccgggcttcgacgagagtgccggtctggtcggacaaatgaatgttgatattgaagtagctaatggatcg

SEQ ID NO: 1163 - DNA, 3435 bp, DROSOPHILA
atggaatcagaggagcacgctgtggacgccatggagaatcgccgtttgccactgtttcccatcgaaccggagccatccgtaacggcaacgcaacgcctaacgctccttgccacccgactactacgtgcattgcaattaaattggaggattattgtttcgggcatcacgcttacattgctggccgtcatctggtattatcccaccttctttctgttcttcgcctttgtggtctattccctggtcttggtttttgcggctgtggcgggaaccgtctatatccattatatattcaccaccaacgagccgacgccaccaagtcgcgtgccctcgcgattgctctacaatgccaccaaaagcaacatcttcgatctacccaagcccatcaagaatccatcgaatttgcccctgattttcggcaaaacagtggacctgcagctccagcagatcattgaatatgtgctgcgcgattttatgctgccctggttgggctacgtggtcaccaagcccaagctgatcaacgatgtggtgcgcgaagatctgtggaacgcgatacagaagatccatgagcgcgccctcagaatggacgccgccaagatcatagccgtggacatggtcaaccgggtgacagtgcatctggagaagattcgcatcgctgaggccagagcagctgaaaccaacacgccgccagtttttagtacaaactcgtacctcgccgacgaggagaaggagatggagttcctgcgcaagctttgcgagattatggtgatcctgctgctgccacgcggttattccctgcccccattgaaggtcttgctcagcgagattctctcctacaagattttctttccgatgatcaaaatgctgacagcaccggactacatcaaccagaaggtggtccaaaacattgaaactcgcttggcagcggcggccatgagcaagagaagctacgagtatgcagccagcttcgaggatttcctcaaaatcatcaacaactcgggcaacctcgaggagctctcgctcatccgcaagagcatagtaaacgatctgatgcatgctactaccatgcagaatctacagcgtgccaaaggcctcgatccggatcacgaggaccactcgctctccaagtcggagctcacagccgccgtccgactgaagcgctacgtacgccaactcacaatggccaagggcgagtgcgagaagaatctggccaagttcggctggaatggcaattactcgagtgatattgacctaacactggtcgagatcctaaacactgcggttggccggcgctacttcaccctgttcctggagccgctgaaggctagcgctctgattggtttctacctggccgtggaggagatcaagcacgcgcacaagtcggccagccatcagctgggcacggagatcttttacacctacatcagagtgcccaagtcagagatccagattgacaagcacgaacgcaaactgatcgagacgttcctgctgggagatgccgagcctgacatcttctatgacatccagcgcaatgtactacgcacgctggaggaaaagtactatccgccatttgtgctcagcgatcaatatcgtcagttgaaggaggcattggactccaatgagattgcagatcccacgctgctaatgtgtcacaccattggcgatgtacaggagccgctggcggatgagcaaccgggcgcggcggatggactaaatggcggagctggtggtgccatcgatgtggccgcccacacatcctatgcacgacgaaaattggaacaaatacaggaacggattgataaaaagaatcaggcgctggacgccctcaaatattccgtgaagccggagtccaaggtgctgaccattctcgaaaaggagatggagtggctgaagagcgagaagcgacagacagaggcgcatttgcgtcgcacggacgcctggacagagcatctgggcaagtggaaggctaccatccaaagtgtagaggtctccgatgagaaagagtccttgcagtttatgatcttggttcatgtggacgaggatattaatgccccagtacaaccgacttcatccaaaaacggtgacagcggccatgccaatctacgtaagcgaccgtcgggcatttccagtggttgggtagtaatgcgctcccttaatcaagtccatgaactacaacggaagctgagacacgtgagctctaacctgaaggccatcgacctgcctacgaactttaagttcttttttctgaaaacagatcgtcatggtcaggaaaaggccaagtcacagattcagaagttcttgaattttatcctggaggacgatcatttgaatggcagcgaggccatctacacgtttcttagcccaagttccgaccacctgaaacaatcgctgccctcgccaaagaagtccaaattctcgctatctacgctattccgcagcgatgctggcaaagctcacgaggccagcaaggcaaccgatccgttttggggtctgcagcgcgatgacgaggatatatctacctatttagacggcgagtccggcggtgaggctaaaatgctagcagcggatctggatagcaaggattcgatagcagaaccgatgtacgctctaatgggcgaaatctttgacatgggcggagttttcaagtggttgcgtaagagtctcatctcgtttgtgcagatcacatacggccgtacgatcaatcgacagatccgcgaatcggtggcctatctctttgaggagtctatgctgcacaactacttttcggccatcctcaagtcattttggccaggcggagttcttgcctccgcctatccgacgcgatcggaggatatgcgcgaaatgaccaccacggcggccaaggccctgctcaccgatcacataccggaggtactgtgcaacctggtcggtgcacaggctgccaaacggggtgtccttaaggttttcgatgccctgcagaatcccgcctacaacaagcagctattctacgagctgctggagatacttatgattgagttctttcctgaaatccgacaattgcgcgtcagcaactccaatggaaccaagttaaatacggctactgctggagcggcagctgcatccgccgctgcggcactggtggctgccacggcatcagcttcgctgccctcgcttaatcatagtggtgggggtcacagtgcatccacggggggtcaccaaaaccatcagggatcctcgtcggccagcggatcctcagctggcgcgagtggcgccaccggtggtggtgccgcctcgcaccaccaatcgcattaccaccacggatcccaccaccaccagcagcagcagcaccaccattcgcaagcgggcagttcgaatttagtagcagatattgagcccaaagttgcgtctgcagctggcgttgagtcggtgcttgtgattcccatgccgcgccagctgtag

SEQ ID NO: 1164 - protein, 1144 aa, DROSOPHILA
MESEEHAVDAMENRRLPLFPIEPEPSVTATQRLTLLATRLLRALQLNWRIIVSGITLTLLAVIWYYPTFFLFFAFVVYSLVLVFAAVAGTVYIHYIFTTNEPTPPSRVPSRLLYNATKSNIFDLPKPIKNPSNLPLIFGKTVDLQLQQIIEYVLRDFMLPWLGYVVTKPKLINDVVREDLWNAIQKIHERALRMDAAKIIAVDMVNRVTVHLEKIRIAEARAAETNTPPVFSTNSYLADEEKEMEFLRKLCEIMVILLLPRGYSLPPLKVLLSEILSYKIFFPMIKMLTAPDYINQKVVQNIETRLAAAAMSKRSYEYAASFEDFLKIINNSGNLEELSLIRKSIVNDLMHATTMQNLQRAKGLDPDHEDHSLSKSELTAAVRLKRYVRQLTMAKGECEKNLAKFGWNGNYSSDIDLTLVEILNTAVGRRYFTLFLEPLKASALIGFYLAVEEIKHAHKSASHQLGTEIFYTYIRVPKSEIQIDKHERKLIETFLLGDAEPDIFYDIQRNVLRTLEEKYYPPFVLSDQYRQLKEALDSNEIADPTLLMCHTIGDVQEPLADEQPGAADGLNGGAGGAIDVAAHTSYARRKLEQIQERIDKKNQALDALKYSVKPESKVLTILEKEMEWLKSEKRQTEAHLRRTDAWTEHLGKWKATIQSVEVSDEKESLQFMILVHVDEDINAPVQPTSSKNGDSGHANLRKRPSGISSGWVVMRSLNQVHELQRKLRHVSSNLKAIDLPTNFKFFFLKTDRHGQEKAKSQIQKFLNFILEDDHLNGSEAIYTFLSPSSDHLKQSLPSPKKSKFSLSTLFRSDAGKAHEASKATDPFWGLQRDDEDISTYLDGESGGEAKMLAADLDSKDSIAEPMYALMGEIFDMGGVFKWLRKSLISFVQITYGRTINRQIRESVAYLFEESMLHNYFSAILKSFWPGGVLASAYPTRSEDMREMTTTAAKALLTDHIPEVLCNLVGAQAAKRGVLKVFDALQNPAYNKQLFYELLEILMIEFFPEIRQLRVSNSNGTKLNTATAGAAAASAAAALVAATASASLPSLNHSGGGHSASTGGHQNHQGSSSASGSSAGASGATGGGAASHHQSHYHHGSHHHQQQQHHHSQAGSSNLVADIEPKVASAAGVESVLVIPMPRQL

SEQ ID NO: 1165 - DNA, 3914 bp, DROSOPHILA
tttgcagagacagtacctctacggttttggtggagagatttgatagtccctctacctccagctttttgccccagtggaaggtggaggtgagattggagtccccgaacgggttgtcttcgttggagtacgtctggtactcgttgtcccagcccattcgttcgcgacgccgctgctccttggcctgcttttcgcgcaggcgacgggcgcgcttctcctcgggcgtttcatgggccttcagctcctcctttttacgctgacgatccttctgctcgacgaggcgacgggcttccagcgtctggagaagcttcatcgggctttttaccagcggcgaacgaggggcaccgggcaccgagctggacgtcgaactcgacggggatgagctggaggaagaggaccggcgtctccggcttttgtgctcccgcttcttgtccctgcttttgtccttttccctttccctgcgctggtcacgttccttgtctctgtgatctctgtggtcacgatccttttcccgctcgcgttcacgatcccgatccctgttcctgctgctcctcggatccggactgcgatgatcccgcctctcccgactgcggctgcgatgccggtgcttggatttctccttgggcatcttttttaatgagtttttcgggataaaacttgtgaaataaaatataaacaatgctagcgttgccagatggagaaaaccaacccagatagccactaataattgcaaaagtgctatcgatataagcattataacattaacacatctccctcttgccgataagtcgatttatttttccaagggttagtttttacaaactttaaattttaaaatttcggctgcagcgtattataaatacacaaaaataaataatttatcgatggaatccttggtgcagtgtaaaaggctttttagggtcttcgtggtaatgcccactatcgaaactgaagactcgatgtgtcattgcaagtgccattactcaatatatcgatacaaacgcaagtagccaatccagctcttcgcagaaacccggttggcaaaaacgtttatgtgcattttttgtattcaatcgccaacacgagagccgagctaccagcaaaaggattgtccagatagcccgccactgcgctgagtaagtagtgattctggaaaagtgtcggggaagacaggaaaaacacggcagacggtgaaaatcgcgcgcggcaaaaaggccagcgacaagccagacgcacacacacacgcgagcatccgcacaaagccgacgcacacagacgcatgcaggcgaactcaaaaaccgaaacacaaacaaaaggatggttattagtcgactattagttaccttacttccagttcagcagcaactgaaaatctgaactaatctctaatccagaaattctggatttaaaacaaatccaaccctatccactgtcaaatacacgtttcgtatttgaaagaaatgtgtatgcattcacttaaaacacagccatctaaaacagctaaaagaagttatatcgagaatatagcctcttttctcgttggttggcttttcattgcgaaatagcctcatggactatctcaacaagtggaatagctgggaacgcgaatgtgtgtgtttatattatttgcccaatccgtaaatatagttgaatcgtcttgattcttagatgtgggggatgcagctatacagatgcactttatggcctctaaaacgctagacttgctgtgcacgactagagtagtaccctatcctatcactcaagcgaccaaaaatttatagtatttctcttatgcaaccttgtggctacctgaaaaccacccgcgccagtttggtgaacgactaacaacgctgtccccgccctgtcaacgcctgcagtccgattcaccgcttccccgtcgcctcggctgccgccatcctccgggtgaagatgtccgactacagcgacctggaccgacagatcgagcaactgaagcgctgcgagatcatcaaggagaacgaggtgaaggccctgtgcgccaaagcccgcgagatcctggtggaggagggcaacgtgcagcgtgtggactcgccagtgaccgtgtgcggcgacatccacggtcagttctacgacctgaaggagctgttcaaggttggcggcgatgtgcccgagaagaactacctgtttatgggcgatttcgtggaccgcggctactatagtgtggagacgtttctgctgctgttggcgctgaaggtgcgctatccggaccgaatcacgctgatccggggcaaccatgagtcgcgccaaatcacacaggtctacggcttttacgatgagtgcctgcgcaagtacggatcgacggccgtgtggcggtactgcacggagatctttgactacctcagcctttcggcgatcatcgacggcaaaatattctgcgtgcacggcgggctgtcgccgtccatccagtacctcgaccagattcgcagcatcgaccggaagcaggaggtgccgcacgacgggcccatgtgcgacctgctttggagcgatccggaggaccagactggctggggcgtgtcgccgcgcggcgctggctatctctttggctcggacgtggtctcccagttcaaccgcacgaacgatatcgacatgatttgccgtgcacaccagttggtaatggagggcttcaagtggcacttcaacgaaaccgtcctgaccgtctggtcggcacccaattactgctatcggtgagtcagcctcctgtgcaatttcgaacttgtgttgttaactctggaatctctccacatgcagctgcggcaatgtagctgccatcctggagctgaatgagtacctgcaccgcgacttcgtcatctttgaggcagctccgcaagagagtcgcggcattccctcgaagaagcctcaggcggactactttctctaagacgcttccgttcctgacaatccggtggaacggagtcggcacaggatgcgggtgccgactggtagcttacataaatcatctagggaatagaaatagaaactgccagcctgcaaaagcgaagcgaacgcgaatagcaactgatggtgtaaaacaaaaaatatgtaacataaacgtaagctagggtagagctgccggacacaggtccacgttcagttagacttatttgcttttttggttcaactaagatatttaaattttttttaccatctgtttacctctacctgtgtttaatcaggctatttgcgcgatcttttaatggctgttttcaaaacatgtagagatcagccatgcagatcgcgtatgacctgtgcacctcatctagctactaactaataggtttaatgaccatagcccaagaccctgagaattcgccttgcgtagacggaccgcaatcggagccgccgtcttctcgacacgaattccctgggcttgggcagcatactatactaggagcccaagttgagcaaatagatatttttaccgacagattgcgttaagtcggctaagctaggacatatttaggggagccgagagcgaacgcgcatccctggctgggtcccttctccgcaggatatcacctggagaaacccaggtacgaagaacatcgtgcattaataaatagtgagtaagaatcttttaaatatgccccagattgggagatgatatacaaaaaaatgtacttgtatttataataataaagattgtaatataatcgtcgaaattgagcaagaattttttattagtaaattatgggtcccgaggagtcttggaggataaccacacccatacgaatcccccttcacaatccaacaaacaatcaagcctgcagtttctcagtttatcaagtacttaattcatagtatacacataaaaaaaaaagatggttatattccagaagggcgcttgtgatacagtaacggggggtcgtcatgggtctcaa

SEQ ID NO: 1166 - DNA, 1157 bp, DROSOPHILA
caagtagccaatccagctcttcgcagaaacccggttggcaaaaacgtttatgtgcattttttgtattcaatcgccaacacgagagccgagctaccagcaaaaggattgtccagatagcccgccactgcgctgatttggtgaacgactaacaacgctgtccccgccctgtcaacgcctgcagtccgattcaccgcttccccgtcgcctcggctgccgccatcctccgggtgaagatgtccgactacagcgacctggaccgacagatcgagcaactgaagcgctgcgagatcatcaaggagaacgaggtgaaggccctgtgcgccaaagcccgcgagatcctggtggaggagggcaacgtgcagcgtgtggactcgccagtgaccgtgtgcggcgacatccacggtcagttctacgacctgaaggagctgttcaaggttggcggcgatgtgcccgagaagaactacctgtttatgggcgatttcgtggaccgcggctactatagtgtggagacgtttctgctgctgttggcgctgaaggtgcgctatccggaccgaatcacgctgatccggggcaaccatgagtcgcgccaaatcacacaggtctacggcttttacgatgagtgcctgcgcaagtacggatcgacggccgtgtggcggtactgcacggagatctttgactacctcagcctttcggcgatcatcgacggcaaaatattctgcgtgcacggcgggctgtcgccgtccatccagtacctcgaccagattcgcagcatcgaccggaagcaggaggtgccgcacgacgggcccatgtgcgacctgctttggagcgatccggaggaccagactggctggggcgtgtcgccgcgcggcgctggctatctctttggctcggacgtggtctcccagttcaaccgcacgaacgatatcgacatgatttgccgtgcacaccagttggtaatggagggcttcaagtggcacttcaacgaaaccgtcctgaccgtctggtcggcacccaattactgctatcgctgcggcaatgtagctgccatcctggagctgaatgagtacctgcaccgcgacttcgtcatctttgaggcagctccgcaagagagtcgcggcattccctcgaagaagcctcaggcggactactttctctaa

SEQ ID NO: 1167 - protein, 307 aa, DROSOPHILA
MSDYSDLDRQIEQLKRCEIIKENEVKALCAKAREILVEEGNVQRVDSPVTVCGDIHGQFYDLKELFKVGGDVPEKNYLFMGDFVDRGYYSVETFLLLLALKVRYPDRITLIRGNHESRQITQVYGFYDECLRKYGSTAVWRYCTEIFDYLSLSAIIDGKIFCVHGGLSPSIQYLDQIRSIDRKQEVPHDGPMCDLLWSDPEDQTGWGVSPRGAGYLFGSDVVSQFNRTNDIDMICRAHQLVMEGFKWHFNETVLTVWSAPNYCYRCGNVAAILELNEYLHRDFVIFEAAPQESRGIPSKKPQADYFL

SEQ ID NO: 1168 - DNA, 14361 bp, DROSOPHILA
ggtgcccgagagtcggaaatcagaagcagaaacagaaacagtcagccagcaagccagccagctgcgtttgaatgtgggcaaaagccaggccagtggcaaactcttcgaaaagagcccttatctttggcgaaaagcactgattaggtgtgcgcatgtatctatgtgtgatacatgcacagtggtctgggttactcaacattcggcactcgccacaagccaccagccaatccaccccactgtgcgccactccgtagctccaagatttgtgacaacacctgtccgtcgtcgcgccaggtggggtgaaaatgcaaatgtaaatagacagacgctgctgcggattgggagtaagttcatgggttgggttggttcggcttggatgggatgggatgatgtgctgccctactcaaggtctcgaatttcccttgtgagctgctctgctgggggggtcgcccattgattttttgcgtttattttcgtgcactgctcttcactctttcgtttttttcccacacacaacacaacacaccacaaaatctgtgtagtctctggccttgcggattccgggactcttatcgggaggctctactgtgcgcgcgtccgcgtcatcgagtgcatggcgttgaaaacgagtgttcctcggttgattattcgtctgttcccggacgcaatgctagtttgtttattcatttattttttttcactccaattcaattgctgccagtgtgaccgaccgaaaaaggcgataggctaaaaatactatcctttcgataatttcctaaaatatgcatcaagctctgccaaggccctgtgcagaccatgctcgagacttttcaattttgcccatcactagttccgcttaaaagtttatcaaaaagtttcaggcaattccgttaagaaatcgcgagtggagagctgtgggaatagtatattttttcatttatgttatcttttccgttaaatttgattttgtttaccacgcccgtaaattcgaataaatatttgttcatctggctttcaaaatatgttttattttgatataaattataatcgagtaaattcacattggtttaattttttgctgacaaaaagcatatttcgatttattcatattgaaaatggttaatcgcattgaatcggtaaaaactaagtcgcaaatgatgagcttaatgcataagctgtttcctaaaacagttacccttaacttgctaaattatataaaagaatacttaaaaagcagtgactaaaaaatgtgaatttcttctctcttcagatatttggtgtttgcataaggaagccaggggcatattttaaacttagagtatattctcaataaagatgtgcaactatatgattgtaattgatttcagtagctcaccagttggaggacagctcatctaactaagtgttaaaaaagttaaatcagaacagacattcgacttggtaaacctttcctagttaatgcgacaatcgaatatatagcatttatatatatgccagtatacattttgtatatattgggtagttgtacacatgttgaaaggcctgattttgtgtatatatatgcaatacatttggctacacacgatcgggagcatcgggagcttccttctctgactgtgatttggataagttgaagttactaggagtttgcgctaactctatgctaaactggttgcttacaaagttttagggtctacgtataatgtataaagtaaaaggagagtaaaatatggattacatagcgtatgtatattaactcctatcctaaaaactctttgattttgactctgactctagctcggcttgtggatgtggacctgtgcgtgttcggttcctaaaaaatgcttgacaaatacagtcctgttcctcttacaatctccacttccgttttcgctttaacttggctaatttgtgatccatactatcctgaacaaattaaccctctatttccgcgcgcccaccactggcagcttggacttgactcctccagcggtgctgggggtattgtcaaacgtggagctgcgcaggagcgtcggcttggttccatttgcgttgagcatgttggaagatttggttttctgcgtcctcaggttggatgacgattgcttggttttggcctcgtccactctcttccagatgttggcgatacgactttgcgcatggttgatcttggccgcagctgctgcggctgcactgcttccatttaggttggagttgctgcgggatggtggagtagtggacgacacgcggccggagaccacacgtgaggcagcgtgagatttgcccgcagctagtcgcagactggtgtttgccctttgaggcgtcattcggcgggccggcgccaagggaatcctcttgggagagcccgctttcgatggtgacccaccgctggccgtgcctttctttgtgggtaacttcgaggcgcggtgagtgggactggtttgagccggttttgtctccaccacgggcacttgaacattggagttagtgggctcgtccttgacaaaggttccctggcgttccaagcgtgcgggtgccggctcaggcggcggcgtcggcttctttttcgctggtaacctaactcctgaaccgccgggcaccagacttcgtttggcaattgttggagatagggttttcttcttggacggggcggcattgttgctattccgttgactttgcatgctgtagggtgagacataggctggtttcttgcgacctcgcaccagttttacggccgtggcgggctccaaggttgtgggcttaacgactgatgttctaaggtccacaattgacggaggaggaggcagctgatccggttcctgaccatcgcacgactccgtctcagagttctgatcgcactccggggattcccctgcgtcttctggatgatcagtactctcgcaagtctcctgactgtgtccaatgttaatgtccgtgatgaaagtgaactgttgcatcattgctcgaattgaggagagctgttcgcttgggcaatcatcgggttggggttgtatcaaagccaggggacattcaatcagttgggtcttgtaccgctccgcactgccccttctccttccattggcgcgtggcgatggcgtggccacaggaacggcagcttccacaatttctatctgcaaagtttcattggcctctggtgcttccatctcgcagctggtggctatggtgtaggtcttgaagcgatcctttgtgagacgtcgcttgtctttcggtgtgagggaacgacgattgggtgatggagtagatccgtgcttgggtgtggactcggccgagctgtagtcattcattgtggcatcctcatcctcgtcgaaacaactttggagcacggtcatcgtctgatcatcgcaagcagccgtctcatagttggacacggaaatggtggtggccatgctgcagtcctgctcgccatcggccacctcagattgaatgctgtccacactgatcatcgagtccagcagctcatccatcagtgacggaggcttgatgttgtccagcaggttgcagctggagttcacgctctccgcactgccagctaagtgacccagtgctcgtctggctaccaaattggctggaaacatttttcgcgcgaagcgtggactcttgctgggcatcgcctggcgcagagaactaggctgggagtgatcctggtagcagctgttcagcgattccattcccgacggcggacgaatattatccagatccaaactgttcaagctgaaggtcatctccgtggtgtcatcgtcagtggcagcgggctggagtagattttccgccagagctcgcgcttcgaacgcaatcatggtcgagtttgtcataatggaggcactagttccattaaataatagtctttgcggctccaatctaacgccagcattctgcacctgcccacccaactggaagttaagacctccagacgatcctgagtagctatcagcatgaccattaaccagggtatcagtttccccttcgagcgattccggttgctgttcattcgtgggcgttatctcaatcaactcgtgcagggatctcgcctccgtggcatcttcatccaagctcaaggaggccagaaccggtgccgtttgactgacgctggggaaactcacatcattgggacaggtgctctcgttccaggtgttgttgctactgttgttcttgtggctgttgctgctgctgtggttgtggctgctgctgcgcaactgctccgccgacgtaacaaactccatggtcagtctctccacagacttcagcatcaggtcgggatccttgtgcttctcgcttgctccggagatgcacgtttcgttgagagcactgtccaacctgaccatggtttccatgatgaaggactgatttgattcatcgctggatcgatcttccgaatccaagtccttagacccagtagcggtctcgagaccgttctgactcgcgttcccgttcccttgatttggagctgctggacttcttactgtgtcggtgacggtggcgatggcgtcgataggattcgggaggatgtggctgctcgggtgcgtggacgactgctgctgcggattgctggtggcgtgcgctttctgctctacgtctggagctgctgtgctgagggcacttgctgatgtagtagctgccattgggtgacacggttccaatgcagccgcagacgtagccaggacgttttttggcacggcgttgatcttcttcgagatgcccgtattgatgcactcctgcagcagcttctcgtccttgcgttctcgctctcgctccctatgatgatggtgatgatgatgatggcgctgccgcttgacctgtccactagatggcagctgcaccggcagcgaatcgaactgctttagactgggattcgactggacggaggatgaacccactataggttgctcctgcatctgctgggcccgggcgccgggttccttcgtcttgtacatgcccttgaggatgcacagctcgaagagcgactttgactggttgtcgttagaatcgctagagtccacggaactgtaggactcctgctgttggctcttgcgtactgtcatcgccgaattcagggagctggccgaggtggccgcattgatggctattggctgcgaggagctcagcgagctggagcgcttgccgttcgagctgaagccaagattcgatttcggtctattgcaaccagcggcaatagcctaaagaaataaagaaatggcttaatccatggttgattttttgattcaattactgctcacctgactcagtaagttggtgtcatcttccgagtcaatggatagagaactcagcgaatcatcttgccaatgcggcggtcttcggacttgctcctgtttgccaggcttcgccttcatctcaggattctgatccgcactggatctattgggaaatcgattgatttaatatagtcagttaaaatagttgagatatgattttctaacttgaaccaccaattaatattgaagcaaaacattatacaattgcaataatcatagtaatgatatgatattgatatcacaactgaatttcaatgcaatgctgttatttttaaagcctactttgctatttagtttaaatgcgatcactactcacggttcggtctccttgagctgtacggctggcccaaccagactggatcccacggtgagattagataaaccagagaccactgagaagttacagggactgtcctccaccaaaaacttgttcatttcatcggcagagggcagatagccaggcaattcgtttccgcctcgtcgaagcatggctataggatctgaagtggcttcaccgaggggtttcttcatgccatcccggatgcactgctgtagcaggtgaccagaggctccaccgcagtccgatgcattggaagatacatcgtcggatagctgatgagcgtacatctgtgcctgaccagccgtggcatccttgggatcggtggagctcatggagataaccgaaaggttagtgttacttggtactttggagagcaatgctggcgtatcttcggtgcagtagctacgaatggtctcctcagccacgtccacttctgagttcacaactgtcgatttcacagcctcagttggcttccgctgcatacccatgttgatgcagttggccaaaaggagctcatcttcgttgtcttcctcggccacactggccggtgccttttcatcgtccactatgctcaggttgctcaaactggtggccgtggagaactgagcaggtgtatgctccacgttgaagctactcaggtcgtcctcgaaaacgctgcgtaatggttgtaggctggccgggattacaaccggtggagaatcgacattctgccccgaaccagcgacactatttcgtcgtggagattggggcatactttgtgtgggggaatctgggatctcggatggggatattaccccactggccaagcgactgaagtcactaaccaccgagctcttgtcatcgcagttggccacatcgacatccggatcgtggactagggagtccatggaactgcgtcgcgagaacatcaacggggtttccaatgccgagtttgcctgggtgggaggtttggtcaggacctgctctgctggctgggattcctgttcctcctgcttctctaatttgggcttgatatccgcatccgttcctactattgcctggttagccttaccggattcatccaagctgctcagtgaatcgtagcgactaaagtacccaggagttccctcctcgcagtagttaatgggtttctctggagtgtacgaaccggagccacactgcgaaagcttgggaagctttttgggagctccttctttggaagtcacctcgcgaacttctggcttgacttccgcttctgcatccgctttagcagcgactcgtaaatctgtgactgaagccgcattggatataacataaggggtatcctccgtctggtagcacttaacactgtcgtctaggatcaacaatatttcctggccctcggatttctcgggaactgtttcagcaggaggagtgatagtgctcttttgtccgcctgctggtcctgatatgtccaggtcggattcaatttggttctcagcgtagcgaaggctgaagtccgtgggctgatccaggtccgtttcctgatatgttgaggtcttggtggcattctcgctgtacttcaccgagtagtcaatgggttgttcctcggttgcctccgtgtcctgctccatttccagatcgaagtccgtgatcttgggcttcacctttcgatgggcatctgaagcagaggctgagcgaattagatgatcgtaagcgcaatcggatttggccgagtacaccgaatccctgctctcgctcttcgttagcattgccgatcgggttaagcgtggcgcaggatgacgtctggatgaactggaggctcgttctttatccagttttccgcccgtgtccaagttatcgcacgtctcggccgtgtgacgctcacccagctcctgttgcaatgccttggcttttcgtgcctccagagtgggcaatgctttgaggcccatggagcgggcaattggatccagctggtgatgattttgaacagctggtcggaagttcaaaaggttcttcaaggccgaagagctgccctctgagatcatggcgtgtttggagtggatcaacgaacggagcatgggcactgctccattgtcccacaggaacttctgatcctcggcagagcgagctgacaggttccatagagttccacaggagttgctgaccacggtaaggctttcggacttcaattgctgcagcagaatagccaggcagttgtgctggcgcaggatctgccgataaggttcacaaacagcaatgtggctggacacgttccgcaggatccctcccgcattctcaatgatcttcaatgttttgctgggaccttcgtaacttagcattcctactaggaatgccaaggccccatctacggcacagaactccgccttgttggtgctgcagtgcgccgagagattccacagggccgagagtatggccttcagggtgttctcactcctattccgcatggccgccagggccagagctgtcactgttccaatctcattcagcactgccttcatgttgctgtccgctcgccaggagagattgcgcagcacgctggccgtcacctggagcagatcgtccggggccgagtccaattgggccaccagggcctccatgaactgcttttgaccacacagcagcgccttgttgttctcatccccaaaggtcagattggtcagggccatcaaagcgtatcttcgcagagaattgcagcactgatcctccggtttgggtccatgaacggcgtgatccaaatgaaccagattggggatcgcgtgcaatgcccccagctcgcacatagcgtgtcggtgctcctcatcgaagctcaccttcatcagtgaagagatggcggccagcggatgacggtcggagtcatctgcaatagcctctccgccactctggagcagcgtcttcaggaaggagcagtagtcaacgatctggtcaagcagtcggagcaccttggcttcccttctgccagccttctcgtccggatggctgtgcaccacattgtgcagcgcctgtccagcacacttcctcacctcctggtcgttgtccggtgcatgcatcatctgcaccagaagcggcatgcaaccagagcgtctaagagttgcacaactttgagcatttccggacagctccaggaactttttggccatttcgagaggatcatttgagcccaacatggagagcagtgagtaaacacactccaccttggatcccaaggtggcttccactgccgaggaggtgtatcgctcatcgaagctggtcgtccaggcagctcccttgggcagccttggagcaggggcaggtgcatctccgtccagaaatcgggagagcgtgtaagatggttccttgctgcgcgatggacgacctgcgctggctggagagccgcctccattcctcggaggcaattcatccagctgctgctgctgcgccgactgtcgctcgaagttcctgtccaggctgcgatgttctctcatctcccgcagctcctgggccaacatgtagtccggcggaatggggttctcgtccagaaaatgcttggctgctggttttttaccaacggctccggatcccagtccgactgcgctctgggtgaagtgcagcgtgttgtcgtcctgggtgaactccttcttggtatagccactggcggccagttcgtagtcgctcacttcgccatcccgctcgtacttcttgtccatctttagctgctccccggaactggccccaaagccttcttcatagtctggcgggggcactgcgtcgtagtcgaggaagtgcggcttacgctctggcaccgagtccacatccacgtcctccagactgagctcggcgatgccctcctccagatcgggcgtcagcgttggctccaacatggcctggcgggaatcggggactagggattcggggtctcagtggtgcaagtcaatgctccatggcctgcaaggaaagcagataggaaaacacagtgagcgaaggcacaattgagactctagattgctataaatttagtgccggaccagggcgtgggctaattatagacgcaccaccaccaccaccactctgcccgccaatctctgtagtaatccgatgggcaaaactcaaacagagacgagtcagctagttgcatggatgcatataagacatattagatgtgggcagcgctaagaaaggcaacagtattaagtttaaaaggtgattcgatggaaaatatagcaaaaatgtaaaaaggcataggcgtgtgtctcgaaaaagatgatattgaatgtatatatttcttttttcttaacactcattcgaagctcaacttaattatagtttatttaactgaggaaagttaaaacagcaagttaagcatgggaaaatattggcagtcgtcagtttagtgcctacacttaactcatcatgagcatatgactcgctttatgatcgatggaaactatgtatgtcagctttatgatatgaaaatccagccaagataaatgctatcttaagcggtgaagtcattgcgccaaattttaaggaaatgatccaaagcctcaagtttcttgtagttcttgttgttttattttagaacaccacataaaatataaaagcgaaatatataaattcatcttaatgggaaaccaatttaatagcttttcactttttaattggccgacccctatctatctataaggttgctcggtaggatcgactttctaagcagatgcttggatgctgttgtatcccagaagaattcgcctattgtggcaggttctgtgcattgcctgctctatcgctctgtaacttaatcatcggccaacattcaggtggcggcagccacaatagcaaatgagcagctaagtcattatcatgattagctggcgctgcatctttttagaaagttagcggcacacggcgtcgtctttgcggaatttccagtgcatgaagaaagatacagatgcgttttcagcagatatattatattgcctcggctctcattgttgttgctacacacactccataagcacaagacatatttctcatttgagctaccgttgaattatgtgcaaatgcaatttggtgctgcacttcttttttttcagctgttattgtagcgtaaaattgagcgtggacggacagaagtgcataaatatgtatgtacacagagagaaaataacgtaactaacgtaaggtcactattaagttatttacacaactttaatcaagggtcaaataaatccttggggttcttaaatcaatctacaaagtgtcttaaagtatggcacaatttatttactgcataattttagatatcgaatgaaaaggaatataacaaatgatttgataccttgtattttcaagcattttttcactgtgtacccaatccaattcaagacttcaagtggattgagtttgggattgggaatgacccgggtcgtgtaccagttctggctccgcacaagtcgacttgttcaagctccaattggcaaattaatcaaattttaattgcgaccagcgtaaagagcgaaaacagccggcgaacgaaaagtggtaaccgcaatttgagtggctgtgaaatgcaaatcgcttgtgtaacagcggaaatgcatccatccatccaagccactcgattggaatgccgcactggacacagtggccatcgttcatcattgccgatcgattgtttgcctaggcctcaaatatataaaatatgtgatcagccggcactatcaccgccttgataaggcacacagttcggctccaccgattaacatttagcaagagtcacgatatcagtgctctcgaggccaagaattcgaaagacgaacagagcagagtagagcgattcgatgaatcaacgatccgcgaattagacaaacacaagtatctagatacgacatagatacttttagtaccccaaagaatgcgagaatatgcgtcacttgtctagccaagagccgtgtacccggtcccccagagacgactcctcgtgtcattaaccggccagcgagtcgcacaagggaatcagccctgcacaatggacacaattcgactccaagcgtttcgagtcaactgtattgggaaactaaattggttcgcatagttagcgaaaacagaaacaaccccacgctttgaaataaaatacaagtgccatagtttagcggatagaaagtgaatcagactgacaaacttttagtcacccagtttctatttctttcagagataacgagatttcaaaaacaaatgtgacttattgcttgaataacacttgcttagtaagacttactaagcacttacttaaactgataggtgtaaaagaataaataaaagtgtttatttgataattgtatatccaaatatttgcataattaaatgaattatgagaatgaacaattccatttttggtaatatgcatataaattaagcatttgtgtagcatgggtggatcagatttggattttgaaagataaagcttcatcaccttatagagggtaaggtcttaaaagttattttaaaccgacatatgaatacctaatttggaaagtgtaatttgttgtgataaaatgaatactaggttgaaatatttgaaagagggaaatattttttttggcagattgatgatctgaagggtggttttcgtcacaccctcccctaaaaatggtacaattacaattacaattagaagggaatagcaaaaataaaaaatatttctccaataagtgaattcccattaagctaataaccaattttgccaccacatcgccccatcccacccactgtgcggttttttggcttggcacacattttgcatacgaaatattcgcggcagaattatcaaagaaaaaagaatggaagatttgcgggggaaggaaaagcggtaaagatgatgacaccgcgagccatcaaaccacagggaaatgtacgcaaaaacattaaataatgaaactacatactaactactgtacatatgtacatatgtatgtacttatgatttctgtgtgtgcatttatgagctggtttaatgaacgccacttttgttttgctgcccggttgttttgtgtctttgccgccgcgagatgatgattatgtaaattgtagaaaagtaaaagggaaactaaatacgagcgcatgcagtgtggaattgtgttttccttttctcccatgtttgtgggcatgtaagacaatcgagcgtgccgatattaacgtattttccttaatgcggtgattaattatgctgaggtgaagttgaatggaagtgctcgaaaatagttatcaattaggcgtgccacaatcacttgcagctgttggaaaactaaaacgaaaacaacaacaacgaaacaaacgaaacacactgcgttttccaactgataaaggagcactcacacacatagacacacacatgcacgcactttgcacacccacactagggcgcagtcgcgttctgattgggacctttattgatttttcctgtaaaaggaatcggcaggagaacaggaaactactaaagagtatctcatgctccaagttgagctaaacacatttgtattcgccagctgtatatggtgcgcatttattgagtaaacattctgcgttttattgtcaggcccaaaaagaacaattccaattggaagagtcagcgactatactcccacacacacacgaacccagagattctccgattggcgtaccttgactaaaaacacaatttctcggcagcttcctcgcccaccagatgacacatttcccgctttatcacttgtttgcccacagatattgccactatttggattcttggcttgtttcgcgacaaaacaaatacgcagcgcggccgaaattccgagtccgcttatcaacaaaaattgcgaccaaccgcggcgagcagtgtgactgttatatcgagaattcgaaaaaccaacaagaaatagctgctagggatgggagaatgtagcgatatcttgggatcatatatatcgcttgaatatttacttcgttcgtaatatatttatactgcaatttattttctaaccttaaagatttagtgcttatattttattcattatatatctcggttaagtaatacgtacaccgttaatttaaaagaaaaaatttaaaaaaaaatgggatagagttaatggggccgagtcagaccaacgctatggactgcatattaaaacggatttggtattgttttgtttgttaaattattgaatacattgaatgaatgtgcctccaaaactgtaactgcgaattggttcgggtcttagctagaccataaataccggtgtgaccgtcaccgctaaaatgaaaattccctcaaaaatgcaatagtaaataatccatcgcttagcaactggccacactgcaacgtatataagccgacgaatcccgaattttgttgttgttcttcaaacagctgagcggcggacggatatttgttgttgctgcgcccgggaagctgcgcagcggagaacgcgaaaaataataaaacgcaaaaaatagcgaaaattaaacgcgttgcaagtgcagcagaaaacaacggtaataattcgcgaagccaagggacaagcaatttaaattgcgcacagtgtagaaatccaattggaagttcggctgggagtcccaaattcgtattgattttcttgtttgtgtgtgcgcgggtccgtgaaaaaggcaacaaaagcaaagccaccacttccagacttcccaatcagccacttccttttcttccacctagcggtaatcattgccaattggaaccgcgatcgttgccttccagcgaca

SEQ ID NO: 1169 - DNA, 8354 bp, DROSOPHILA
agtggcaatatctgtgggcaaacaagtgataaagcgggaaatgtgtcatctggtgggcgaggaagctgccgagaaattgtgtttttagtcaaggccatggagcattgacttgcaccactgagaccccgaatccctagtccccgattcccgccaggccatgttggagccaacgctgacgcccgatctggaggagggcatcgccgagctcagtctggaggacgtggatgtggactcggtgccagagcgtaagccgcacttcctcgactacgacgcagtgcccccgccagactatgaagaaggctttggggccagttccggggagcagctaaagatggacaagaagtacgagcgggatggcgaagtgagcgactacgaactggccgccagtggctataccaagaaggagttcacccaggacgacaacacgctgcacttcacccagagcgcagtcggactgggatccggagccgttggtaaaaaaccagcagccaagcattttctggacgagaaccccattccgccggactacatgttggcccaggagctgcgggagatgagagaacatcgcagcctggacaggaacttcgagcgacagtcggcgcagcagcagcagctggatgaattgcctccgaggaatggaggcggctctccagccagcgcaggtcgtccatcgcgcagcaaggaaccatcttacacgctctcccgatttctggacggagatgcacctgcccctgctccaaggctgcccaagggagctgcctggacgaccagcttcgatgagcgatacacctcctcggcagtggaagccaccttgggatccaaggtggagtgtgtttactcactgctctccatgttgggctcaaatgatcctctcgaaatggccaaaaagttcctggagctgtccggaaatgctcaaagttgtgcaactcttagacgctctggttgcatgccgcttctggtgcagatgatgcatgcaccggacaacgaccaggaggtgaggaagtgtgctggacaggcgctgcacaatgtggtgcacagccatccggacgagaaggctggcagaagggaagccaaggtgctccgactgcttgaccagatcgttgactactgctccttcctgaagacgctgctccagagtggcggagaggctattgcagatgactccgaccgtcatccgctggccgccatctcttcactgatgaaggtgagcttcgatgaggagcaccgacacgctatgtgcgagctgggggcattgcacgcgatccccaatctggttcatttggatcacgccgttcatggacccaaaccggaggatcagtgctgcaattctctgcgaagatacgctttgatggccctgaccaatctgacctttggggatgagaacaacaaggcgctgctgtgtggtcaaaagcagttcatggaggccctggtggcccaattggactcggccccggacgatctgctccaggtgacggccagcgtgctgcgcaatctctcctggcgagcggacagcaacatgaaggcagtgctgaatgagattggaacagtgacagctctggccctggcggccatgcggaataggagtgagaacaccctgaaggccatactctcggccctgtggaatctctcggcgcactgcagcaccaacaaggcggagttctgtgccgtagatggggccttggcattcctagtaggaatgctaagttacgaaggtcccagcaaaacattgaagatcattgagaatgcgggagggatcctgcggaacgtgtccagccacattgctgtttgtgaaccttatcggcagatcctgcgccagcacaactgcctggctattctgctgcagcaattgaagtccgaaagccttaccgtggtcagcaactcctgtggaactctatggaacctgtcagctcgctctgccgaggatcagaagttcctgtgggacaatggagcagtgcccatgctccgttcgttgatccactccaaacacgccatgatctcagagggcagctcttcggccttgaagaaccttttgaacttccgaccagctgttcaaaatcatcaccagctggatccaattgcccgctccatgggcctcaaagcattgcccactctggaggcacgaaaagccaaggcattgcaacaggagctgggtgagcgtcacacggccgagacgtgcgataacttggacacgggcggaaaactggataaagaacgagcctccagttcatccagacgtcatcctgcgccacgcttaacccgatcggcaatgctaacgaagagcgagagcagggattcggtgtactcggccaaatccgattgcgcttacgatcatctaattcgctcagcctctgcttcagatgcccatcgaaaggtgaagcccaagatcacggacttcgatctggaaatggagcaggacacggaggcaaccgaggaacaacccattgactactcggtgaagtacagcgagaatgccaccaagacctcaacatatcaggaaacggacctggatcagcccacggacttcagccttcgctacgctgagaaccaaattgaatccgacctggacatatcaggaccagcaggcggacaaaagagcactatcactcctcctgctgaaacagttcccgagaaatccgagggccaggaaatattgttgatcctagacgacagtgttaagtgctaccagacggaggataccccttatgttatatccaatgcggcttcagtcacagatttacgagtcgctgctaaagcggatgcagaagcggaagtcaagccagaagttcgcgaggtgacttccaaagaaggagctcccaaaaagcttcccaagctttcgcagtgtggctccggttcgtacactccagagaaacccattaactactgcgaggagggaactcctgggtactttagtcgctacgattcactgagcagcttggatgaatccggtaaggctaaccaggcaatagtaggaacggatgcggatatcaagcccaaattagagaagcaggaggaacaggaatcccagccagcagagcaggtcctgaccaaacctcccacccaggcaaactcggcattggaaaccccgttgatgttctcgcgacgcagttccatggactccctagtccacgatccggatgtcgatgtggccaactgcgatgacaagagctcggtggttagtgacttcagtcgcttggccagtggggtaatatccccatccgagatcccagattcccccacacaaagtatgccccaatctccacgacgaaatagtgtcgctggttcggggcagaatgtcgattctccaccggttgtaatcccggccagcctacaaccattacgcagcgttttcgaggacgacctgagtagcttcaacgtggagcatacacctgctcagttctccacggccaccagtttgagcaacctgagcatagtggacgatgaaaaggcaccggccagtgtggccgaggaagacaacgaagatgagctccttttggccaactgcatcaacatgggtatgcagcggaagccaactgaggctgtgaaatcgacagttgtgaactcagaagtggacgtggctgaggagaccattcgtagctactgcaccgaagatacgccagcattgctctccaaagtaccaagtaacactaacctttcggttatctccatgagctccaccgatcccaaggatgccacggctggtcaggcacagatgtacgctcatcagctatccgacgatgtatcttccaatgcatcggactgcggtggagcctctggtcacctgctacagcagtgcatccgggatggcatgaagaaacccctcggtgaagccacttcagatcctatagccatgcttcgacgaggcggaaacgaattgcctggctatctgccctctgccgatgaaatgaacaagtttttggtggaggacagtccctgtaacttctcagtggtctctggtttatctaatctcaccgtgggatccagtctggttgggccagccgtacagctcaaggagaccgaaccatccagtgcggatcagaatcctgagatgaaggcgaagcctggcaaacaggagcaagtccgaagaccgccgcattggcaagatgattcgctgagttctctatccattgactcggaagatgacaccaacttactgagtcaggctattgccgctggttgcaatagaccgaaatcgaatcttggcttcagctcgaacggcaagcgctccagctcgctgagctcctcgcagccaatagccatcaatgcggccacctcggccagctccctgaattcggcgatgacagtacgcaagagccaacagcaggagtcctacagttccgtggactctagcgattctaacgacaaccagtcaaagtcgctcttcgagctgtgcatcctcaagggcatgtacaagacgaaggaacccggcgcccgggcccagcagatgcaggagcaacctatagtgggttcatcctccgtccagtcgaatcccagtctaaagcagttcgattcgctgccggtgcagctgccatctagtggacaggtcaagcggcagcgccatcatcatcatcaccatcatcatagggagcgagagcgagaacgcaaggacgagaagctgctgcaggagtgcatcaatacgggcatctcgaagaagatcaacgccgtgccaaaaaacgtcctggctacgtctgcggctgcattggaaccgtgtcacccaatggcagctactacatcagcaagtgccctcagcacagcagctccagacgtagagcagaaagcgcacgccaccagcaatccgcagcagcagtcgtccacgcacccgagcagccacatcctcccgaatcctatcgacgccatcgccaccgtcaccgacacagtaagaagtccagcagctccaaatcaagggaacgggaacgcgagtcagaacggtctcgagaccgctactgggtctaaggacttggattcggaagatcgatccagcgatgaatcaaatcagtccttcatcatggaaaccatggtcaggttggacagtgctctcaacgaaacgtgcatctccggagcaagcgagaagcacaaggatcccgacctgatgctgaagtctgtggagagactgaccatggagtttgttacgtcggcggagcagttgcgcagcagcagccacaaccacagcagcagcaacagccacaagaacaacagtagcaacaacacctggaacgagagcacctgtcccaatgatgtgagtttccccagcgtcagtcaaacggcaccggttctggcctccttgagcttggatgaagatgccacggaggcgagatccctgcacgagttgattgagataacgcccacgaatgaacagcaaccggaatcgctcgaaggggaaactgataccctggttaatggtcatgctgatagctactcaggatcgtctggaggtcttaacttccagttgggtgggcaggtgcagaatgctggcgttagattggagccgcaaagactattatttaatggaactagtgcctccattatgacaaactcgaccatgattgcgttcgaagcgcgagctctggcggaaaatctactccagcccgctgccactgacgatgacaccacggagatgaccttcagcttgaacagtttggatctggataatattcgtccgccgtcgggaatggaatcgctgaacagctgctaccaggatcactcccagcctagttctctgcgccaggcgatgcccagcaagagtccacgcttcgcgcgaaaaatgtttccagccaatttggtagccagacgagcactgggtcacttagctggcagtgcggagagcgtgaactccagctgcaacctgctggacaacatcaagcctccgtcactgatggatgagctgctggactcgatgatcagtgtggacagcattcaatctgaggtggccgatggcgagcaggactgcagcatggccaccaccatttccgtgtccaactatgagacggctgcttgcgatgatcagacgatgaccgtgctccaaagttgtttcgacgaggatgaggatgccacaatgaatgactacagctcggccgagtccacacccaagcacggatctactccatcacccaatcgtcgttccctcacaccgaaagacaagcgacgtctcacaaaggatcgcttcaagacctacaccatagccaccagctgcgagatggaagcaccagaggccaatgaaactttgcagatagaaattgtggaagctgccgttcctgtggccacgccatcgccacgcgccaatggaaggagaaggggcagtgcggagcggtacaagacccaactgattgaatgtcccctggctttgatacaaccccaacccgatgattgcccaagcgaacagctctcctcaattcgagcaatgatgcaacagttcactttcatcacggacattaacattggacacagtcaggagacttgcgagagtactgatcatccagaagacgcaggggaatccccggagtgcgatcagaactctgagacggagtcgtgcgatggtcaggaaccggatcagctgcctcctcctccgtcaattgtggaccttagaacatcagtcgttaagcccacaaccttggagcccgccacggccgtaaaactggtgcgaggtcgcaagaaaccagcctatgtctcaccctacagcatgcaaagtcaacggaatagcaacaatgccgccccgtccaagaagaaaaccctatctccaacaattgccaaacgaagtctggtgcccggcggttcaggagttaggttaccagcgaaaaagaagccgacgccgccgcctgagccggcacccgcacgcttggaacgccagggaacctttgtcaaggacgagcccactaactccaatgttcaagtgcccgtggtggagacaaaaccggctcaaaccagtcccactcaccgcgcctcgaagttacccacaaagaaaggcacggccagcggtgggtcaccatcgaaagcgggctctcccaagaggattcccttggcgccggcccgccgaatgacgcctcaaagggcaaacaccagtctgcgactagctgcgggcaaatctcacgctgcctcacgtgtggtctccggccgcgtgtcgtccactactccaccatcccgcagcaactccaacctaaatggaagcagtgcagccgcagcagctgcggccaagatcaaccatgcgcaaagtcgtatcgccaacatctggaagagagtggacgaggccaaaaccaagcaatcgtcatccaacctgaggacgcagaaaaccaaatcttccaacatgctcaacgcaaatggaaccaagccgacgctcctgcgcagctccacgtttgacaatacccccagcaccgctggaggagtcaagtccaagctgccagtggtgggcgcgcggaaatagagggttaatttgttcaggatagtatggatcacaaattagccaagttaaagcgaaaacggaagtggagattgtaagaggaacaggactgtatttgtcaagcattttttaggaaccgaacacgcacaggtccacatccacaagccgagctagagtcagagtcaaaatcaaagagtttttaggataggagttaatatacatacgctatgtaatccatattttactctccttttactttatacattatacgtagaccctaaaactttgtaagcaaccagtttagcatagagttagcgcaaactcctagtaacttcaacttatccaaatcacagtcagagaaggaagctcccgatgctcccgatcgtgtgtagccaaatgtattgcatatatatacacaaaatcaggcctttcaacatgtgtacaactacccaatatatacaaaatgtatactggcatatatataaatgctatatattcgattgtcgcattaactaggaaaggtttaccaagtcgaatgtctgttctgatttaacttttttaacacttagttagatgagctgtcctccaactggtgagctactgaaatcaattacaatcatatagttgcacatctttattgagaatatactctaagtttaaaatatgcccctggcttccttatgcaaacaccaaatatctgaagagagaagaaattcacattttttagtcactgctttttaagtattcttttatataatttagcaagttaagggtaactgttttaggaaacagcttatgcattaagctcatcatttgcgacttagtttttaccgattcaatgcgattaaccattttcaatatgaataaatcgaaatatgctttttgtcagcaaaaaattaaaccaatgtgaatttactcgattataatttatatcaaaataaaacatattttgaaagccagatgaaca

SEQ ID NO: 1170 - protein, 2417 aa, DROSOPHILA
MLEPTLTPDLEEGIAELSLEDVDVDSVPERKPHFLDYDAVPPPDYEEGFGASSGEQLKMDKKYERDGEVSDYELAASGYTKKEFTQDDNTLHFTQSAVGLGSGAVGKKPAAKHFLDENPIPPDYMLAQELREMREHRSLDRNFERQSAQQQQLDELPPRNGGGSPASAGRPSRSKEPSYTLSRFLDGDAPAPAPRLPKGAAWTTSFDERYTSSAVEATLGSKVECVYSLLSMLGSNDPLEMAKKFLELSGNAQSCATLRRSGCMPLLVQMMHAPDNDQEVRKCAGQALHNVVHSHPDEKAGRREAKVLRLLDQIVDYCSFLKTLLQSGGEAIADDSDRHPLAAISSLMKVSFDEEHRHAMCELGALHAIPNLVHLDHAVHGPKPEDQCCNSLRRYALMALTNLTFGDENNKALLCGQKQFMEALVAQLDSAPDDLLQVTASVLRNLSWRADSNMKAVLNEIGTVTALALAAMRNRSENTLKAILSALWNLSAHCSTNKAEFCAVDGALAFLVGMLSYEGPSKTLKIIENAGGILRNVSSHIAVCEPYRQILRQHNCLAILLQQLKSESLTVVSNSCGTLWNLSARSAEDQKFLWDNGAVPMLRSLIHSKHAMISEGSSSALKNLLNFRPAVQNHHQLDPIARSMGLKALPTLEARKAKALQQELGERHTAETCDNLDTGGKLDKERASSSSRRHPAPRLTRSAMLTKSESRDSVYSAKSDCAYDHLIRSASASDAHRKVKPKITDFDLEMEQDTEATEEQPIDYSVKYSENATKTSTYQETDLDQPTDFSLRYAENQIESDLDISGPAGGQKSTITPPAETVPEKSEGQEILLILDDSVKCYQTEDTPYVISNAASVTDLRVAAKADAEAEVKPEVREVTSKEGAPKKLPKLSQCGSGSYTPEKPINYCEEGTPGYFSRYDSLSSLDESGKANQAIVGTDADIKPKLEKQEEQESQPAEQVLTKPPTQANSALETPLMFSRRSSMDSLVHDPDVDVANCDDKSSVVSDFSRLASGVISPSEIPDSPTQSMPQSPRRNSVAGSGQNVDSPPVVIPASLQPLRSVFEDDLSSFNVEHTPAQFSTATSLSNLSIVDDEKAPASVAEEDNEDELLLANCINMGMQRKPTEAVKSTVVNSEVDVAEETIRSYCTEDTPALLSKVPSNTNLSVISMSSTDPKDATAGQAQMYAHQLSDDVSSNASDCGGASGHLLQQCIRDGMKKPLGEATSDPIAMLRRGGNELPGYLPSADEMNKFLVEDSPCNFSVVSGLSNLTVGSSLVGPAVQLKETEPSSADQNPEMKAKPGKQEQVRRPPHWQDDSLSSLSIDSEDDTNLLSQAIAAGCNRPKSNLGFSSNGKRSSSLSSSQPIAINAATSASSLNSAMTVRKSQQQESYSSVDSSDSNDNQSKSLFELCILKGMYKTKEPGARAQQMQEQPIVGSSSVQSNPSLKQFDSLPVQLPSSGQVKRQRHHHHHHHHRERERERKDEKLLQECINTGISKKINAVPKNVLATSAAALEPCHPMAATTSASALSTAAPDVEQKAHATSNPQQQSSTHPSSHILPNPIDAIATVTDTVRSPAAPNQGNGNASQNGLETATGSKDLDSEDRSSDESNQSFIMETMVRLDSALNETCISGASEKHKDPDLMLKSVERLTMEFVTSAEQLRSSSHNHSSSNSHKNNSSNNTWNESTCPNDVSFPSVSQTAPVLASLSLDEDATEARSLHELIEITPTNEQQPESLEGETDTLVNGHADSYSGSSGGLNFQLGGQVQNAGVRLEPQRLLFNGTSASIMTNSTMIAFEARALAENLLQPAATDDDTTEMTFSLNSLDLDNIRPPSGMESLNSCYQDHSQPSSLRQAMPSKSPRFARKMFPANLVARRALGHLAGSAESVNSSCNLLDNIKPPSLMDELLDSMISVDSIQSEVADGEQDCSMATTISVSNYETAACDDQTMTVLQSCFDEDEDATMNDYSSAESTPKHGSTPSPNRRSLTPKDKRRLTKDRFKTYTIATSCEMEAPEANETLQIEIVEAAVPVATPSPRANGRRRGSAERYKTQLIECPLALIQPQPDDCPSEQLSSIRAMMQQFTFITDINIGHSQETCESTDHPEDAGESPECDQNSETESCDGQEPDQLPPPPSIVDLRTSVVKPTTLEPATAVKLVRGRKKPAYVSPYSMQSQRNSNNAAPSKKKTLSPTIAKRSLVPGGSGVRLPAKKKPTPPPEPAPARLERQGTFVKDEPTNSNVQVPVVETKPAQTSPTHRASKLPTKKGTASGGSPSKAGSPKRIPLAPARRMTPQRANTSLRLAAGKSHAASRVVSGRVSSTTPPSRSNSNLNGSSAAAAAAAKINHAQSRIANIWKRVDEAKTKQSSSNLRTQKTKSSNMLNANGTKPTLLRSSTFDNTPSTAGGVKSKLPVVGARK

SEQ ID NO: 1171 - DNA, 4220 bp, DROSOPHILA
cgggctccatagttctgttacttttgatacttttgataaggctgccggtgcaggcactttggggaggctcttagagggtgggtttcgcacagtagccgttgcccaaacgaattaagtacatttggtcgtagactactttgaatttaattgtggcttgtaccaaaattgattgttcaagaaaaaccaaaaaaacttttcgtgttctagttattactcgtagagtaaaatggtatactactacaagagtgtgtaacaagtagaaataagcgtttccgaccatataaagtatacattattgatcagaatgattataaggccatattgctttaattgataaacccgaattgtagttttgaagcaaggatgttcaccgacttccttcgtacctgtccaaaatttgtgtgtaaccttataaacctaattttgtcttggacgctattattcaagcgatttacgctttacgccttctttcaggacaattattgaatcttatccaatttcaaatattaaaacatttcagtgttgatttataattaattttgatgaaactaaagagacaatactaggtttgttgtcaattgttcctccgggaaacttattaattatttgtttaccttatcggaaaggctttatattaagtaaatgcatgcaataatgtttcagaaattcgtaagtacatgaataaatcgtgtctttgaatggacgtattttattatttgaaattaatctgtccaaattgcataactatttgactaaaaattaatataataatattttgtaaatcatctcatcatttaaaatgctaccgctaatggtccagctagaattaaatttgtaaactgttgccttgaattcaatagccttacttatttcccaatttttttattctgcccattttctaaataaaattaatcttgagatcaatctttgaacatattcgagatgcgccgttccactttgtaataatggtaaatattttttccacattttattcccgttctcagaggaggtcgcttggcgacaactgtgattctccctccgccagatagatgtgcatggccttgaaaagcagcgctattcccagttgctttttctgtttcatggtccaagactgagccggcccatagtagtcgccgcgctttatattggtaaggtgattcaagcccagagcgtctataatggaagcttcgcgtgtgtatgcatcaattggcaagatgttgtgaaagacatgaagacatacgactccactgccatgttgccaaatgtccaggatgcgctccagcttacggcttcccatctttccatctcccggtggaggggagcggaaaacatctggctgtagggtgcggaatccgccgccgcgttccctatttgtcttatctttttcgcgcttctggtgaaggcgtgtgtgctgccgcatggcatcgtaaaggtgagcgtacggtcgcgaacatttacccttgcctatgtaaaaaatggagtccagaaaacgctgccaaaccccgaacttttcgagaaaagcgctctccccaggcagattccgagaaatgcgtggatcaatcaacatgtagatgaagctctgtttaaggtgcccctctcgcatgttcttttttgtcaccccacactgtgcgaaatgcgctgcagaggttgcttcatgcggcaagtaatcattgatcctcgcaaagtcctctggcgaccgcagcgtgcgatgaagctctaccgagtatcggatctgcgcatcctgggcgtgtttttgggcggccagcagcgcctccgtattgcgcttgtatttgattagctgcttgatgtacagccgcttagttgttttggtaatgggacccaccggagcccctagctgtgtcaactcccggcgcagggcgtccgtttcgtagtcaagtggcagggtataattagtgctcacggagctttccaaatcgtgcttcctctctttgggagtttgctcgactggctcccgcctgtccctgttttgtaggtatctcgcttcgtagaaaactaacccattctcgtcgtcggtgtgaacgtaggcctccttgatttgcagaaagtactcatcctggcgtgctgagctctccgccacgtccacctcgtcgccctgagctgtaaagaaactgtgctccggttccggctccacgacgacagcctgagagacttgctccactagcatctcgaacacctgacgacccgagttgggtgcatcctctgtcagattcttcgaattgtcctcgtctctgagctttttctgcaggtgctccttatagttgaagtcctcctgactaatagcatcatccaccatcgcttccacatgctcatcgtactgatggaacagggactggcgggcgcgcgagcgttccaccttctcacgccagctttcaataagagttcgccgctttggctgacaaggatcttccggctggttctgccgttggctctggatgagttgggtaaggtgagcttcagtgagggcaaacaggttcacagactcctcatcgggcaggggtggaatgtcggcgcactccacctccgttggctccggaaacttcggctgcggtcgatgccgcctgtgagtgatattaatatagtacggggaagttacatcgtgattgtacctaggctgattgggggttagagcgtcaaccacctggactcgctgttgctgctttttctggatctgcctctcgcggaagatgtgatcccggagcagctgcagcacctcaaagtggcactcttcaatggcgtagtgaactggcagcttattatcctcatcagccaggtccgcgcaagctccgcgctccagcagcatcctaaccagttccgtccgcccataaatgctagcgatgtgcagcgccgtggtctggccgtcgcacaaggcattcacgtcgaggtcggggcactcgagaaaccgctccaggattcgctgggccagtcccccgtttcgcatgccgcacacgtagtgcaagggagccagtcctcgatcgcagggcacgatgccagcatttatgctgttcctctccagcatcgacattatatcagcctcgttctcgtcctccagggcgtccaggagggtcagagccagaaagttggcgcgctgctccatcggcgtgctccctgtattgatttttacccatgcactctctcgctcctatttcaaactgcaatcaattatcgcttaattctcgccttttcaatgtcagcggtgccgcatttccaagtgtggccaaactcgcagacctggcgaggctgccagatgttcgcagtcctagttggacattggtggtggcccgtattttgagcgccacatttcaaacctgttttttgtcttcgcaagctgagctctgccaattattgcgattgatttttggcacatagttggcttggagcgcacgctccacgcgataagcttaccacagtaatgtgatcagtgagcgcaacacgtgttgttgctatttctgactatttgttctcttggatcccaaactagttcccgccaaaggcgtaacgacgctaaaatgggcccaaggttaccccttgttatgcgatagcgcattgaggtctcttgcttgttgttactctctcagttgtttttgttttcgcgttgttagtaaacaaacgcagtgtttaagtaaaataaacgcacacgttgtcattctcttacatggggcatcgaaaataaatttactgatcagacaaaagtgcacttacggtcgtttgcattaaaattaaagcttatgagcaattgcgctggcttatcaaataaataacaacaaactcaagaatcttgatgacacacacaaaaacaaaccttatccgaccgcaagtcttaagtataagtctgaagtcttaaacaatataactttaaatgcctgatcttaagattttattagttgatgtagcagtcctatgacgaaggcttaattatttcctttgatcaaaattcgcatataatatattaaatctgtgcgtacaatctaaattcctagtcagctaacagcaatttgatagtaattacataacaaaataaaaaattttggaataatgctgtttacattttaaatttgtacattgctgatagacttgagacttgagtttttttttttaaaactacagagtatcgtaggaaaacccccaaaagataatagccaattgtttgacttgcgttttcgcgtacattcacccgtgcttgatttgttactgattggaaa

SEQ ID NO: 1172 - DNA, 2220 bp, DROSOPHILA
cggcaccgctgacattgaaaaggcgagaattaagcgataattgattgcagtttgaaataggagcgagagagtgcatgggtaaaaatcaatacagggagcacgccgatggagcagcgcgccaactttctggctctgaccctcctggacgccctggaggacgagaacgaggctgatataatgtcgatgctggagaggaacagcataaatgctggcatcgtgccctgcgatcgaggactggctcccttgcactacgtgtgcggcatgcgaaacgggggactggcccagcgaatcctggagcggtttctcgagtgccccgacctcgacgtgaatgccttgtgcgacggccagaccacggcgctgcacatcgctagcatttatgggcggacggaactggttaggatgctgctggagcgcggagcttgcgcggacctggctgatgaggataataagctgccagttcactacgccattgaagagtgccactttgaggtgctgcagctgctccgggatcacatcttccgcgagaggcagatccagaaaaagcagcaacagcgagtccaggtggttgacgctctaacccccaatcagcctaggtacaatcacgatgtaacttccccgtactatattaatatcactcacaggcggcatcgaccgcagccgaagtttccggagccaacggaggtggagtgcgccgacattccacccctgcccgatgaggagtctgtgaacctgtttgccctcactgaagctcaccttacccaactcatccagagccaacggcagaaccagccggaagatccttgtcagccaaagcggcgaactcttattgaaagctggcgtgagaaggtggaacgctcgcgcgcccgccagtccctgttccatcagtacgatgagcatgtggaagcgatggtggatgatgctattagtcaggaggacttcaactataaggagcacctgcagaaaaagctcagagacgaggacaattcgaagaatctgacagaggatgcacccaactcgggtcgtcaggtgttcgagatgctagtggagcaagtctctcaggctgtcgtcgtggagccggaaccggagcacagtttctttacagctcagggcgacgaggtggacgtggcggagagctcagcacgccaggatgagtactttctgcaaatcaaggaggcctacgttcacaccgacgacgagaatgggttagttttctacgaagcgagatacctacaaaacagggacaggcgggagccagtcgagcaaactcccaaagagaggaagcacgatttggaaagctccgtgagcactaattataccctgccacttgactacgaaacggacgccctgcgccgggagttgacacagctaggggctccggtgggtcccattaccaaaacaactaagcggctgtacatcaagcagctaatcaaatacaagcgcaatacggaggcgctgctggccgcccaaaaacacgcccaggatgcgcagatccgatactcggtagagcttcatcgcacgctgcggtcgccagaggactttgcgaggatcaatgattacttgccgcatgaagcaacctctgcagcgcatttcgcacagtgtggggtgacaaaaaagaacatgcgagaggggcaccttaaacagagcttcatctacatgttgattgatccacgcatttctcggaatctgcctggggagagcgcttttctcgaaaagttcggggtttggcagcgttttctggactccattttttacataggcaagggtaaatgttcgcgaccgtacgctcacctttacgatgccatgcggcagcacacacgccttcaccagaagcgcgaaaaagataagacaaatagggaacgcggcggcggattccgcaccctacagccagatgttttccgctcccctccaccgggagatggaaagatgggaagccgtaagctggagcgcatcctggacatttggcaacatggcagtggagtcgtatgtcttcatgtctttcacaacatcttgccaattgatgcatacacacgcgaagcttccattatagacgctctgggcttgaatcaccttaccaatataaagcgcggcgactactatgggccggctcagtcttggaccatgaaacagaaaaagcaactgggaatagcgctgcttttcaaggccatgcacatctatctggcggagggagaatcacagttgtcgccaagcgacctcctctga

SEQ ID NO: 1173 - protein, 704 aa, DROSOPHILA
MEQRANFLALTLLDALEDENEADIMSMLERNSINAGIVPCDRGLAPLHYVCGMRNGGLAQRILERFLECPDLDVNALCDGQTTALHIASIYGRTELVRMLLERGACADLADEDNKLPVHYAIEECHFEVLQLLRDHIFRERQIQKKQQQRVQVVDALTPNQPRYNHDVTSPYYINITHRRHRPQPKFPEPTEVECADIPPLPDEESVNLFALTEAHLTQLIQSQRQNQPEDPCQPKRRTLIESWREKVERSRARQSLFHQYDEHVEAMVDDAISQEDFNYKEHLQKKLRDEDNSKNLTEDAPNSGRQVFEMLVEQVSQAVVVEPEPEHSFFTAQGDEVDVAESSARQDEYFLQIKEAYVHTDDENGLVFYEARYLQNRDRREPVEQTPKERKHDLESSVSTNYTLPLDYETDALRRELTQLGAPVGPITKTTKRLYIKQLIKYKRNTEALLAAQKHAQDAQIRYSVELHRTLRSPEDFARINDYLPHEATSAAHFAQCGVTKKNMREGHLKQSFIYMLIDPRISRNLPGESAFLEKFGVWQRFLDSIFYIGKGKCSRPYAHLYDAMRQHTRLHQKREKDKTNRERGGGFRTLQPDVFRSPPPGDGKMGSRKLERILDIWQHGSGVVCLHVFHNILPIDAYTREASIIDALGLNHLTNIKRGDYYGPAQSWTMKQKKQLGIALLFKAMHIYLAEGESQLSPSDLL

SEQ ID NO: 1174 - DNA, 7261 bp, DROSOPHILA
ccctctaaatgtcaaaatgcttttgctgcttagtaaattagaagtttatatctgacgtgcttaccaccagcttcacttacatatacaatatggggacatgtcgttggactttcataaatgtttagctttattcagagaatggttatgtgaaacgcccaatttcacgcttttgttgtatgtaaatatgtatgtatgtagaacaagtattaatctattttagttgtgatgtgattcaaaaattttcagacaaatacgacgcggccgatttgatttctaaactgattgaaacacattatcatgtatctaaataaaagccgcattgagatccgtgattttgcggctaaaagccgcattgctttctttttaaaaactatattttcgaaaataaaaataaaatgtattcatacagttgcgcaaaataaaatagcaccacttgcccgcccaatcaaggttttaataagtgccgtactttagagcttaaaatgatttaaaaatacctttatggaaagagtaaaccgttaacttattaattccaaaaatacttgtaatatctttgaagtcgcttttgacatacatacatacatatatttcattttccatttataataagttcctaaaaagtgacgagtcataaacttgaaccactgtacctgaatgctgccgctgtggctactgcaacgagttgttgttgctctggccgctttaagctgcgcgaaagttgagtgagctcagcttgagagtcaaaatagcctagcgccaaaacaacaaaatcacagaaaccaaaagtcgggctcgtgagcaaaagggcagcattgccaagccaaaaaagtcggagaagagcgcctgcgcagcaaaagcaacaattacaagttgccaacagtctgattgtgagagcagcagcagccacagaggccgcgccgttgacgtttcagtttcagagtttctcgagtaaaacaaaatacatcgcgcgcagttgtcggtgaaaaaatgcagaaaaatcgaaaataaactcggaggccgcgctagaaaacggaaggcaacggaaaaagtgcattcgagttcgcattgcaattctgtatgtgcttaaacagagcttcagtgttgataaaccctatttaaagaaaacatttgaattcactcaaatttcaaagcaaaaaaagttacttaagccagaaaaactgtgccgaactgggtatccaacgttgtttttgctgcttttgtggcgagagacacatccccctttttgctccctccccgtcgaccaacattccatgcagttggcgcttgtttactcgttaagcgagagagagtggcagagggagagttttcacggagagaatgaagaacagaaaaaacagactatggcggctctttagataatgtttatggaacaaaatgaaaagcagcttctatccgaaacgtacatattacagcgattttgtgccaattataagttcattcaaactttttgctgagtcttgggttttacaatttaattgcgacaacatctgaaacgtcgaaaaatgcacgtgtctgggcgctgctaatgcacttcttactctctttctccctctctctcgtctttcgcagctttctctcacccacactctttttgattctcttttcctttctgtagacgatgcacttgcactgtggggcaaaactgtgtttaaaaaaccaattatatttgttaaatatgcaacgaaataaagtttcccccgttaacaattatgcaaactaaatatttcggttataagtagcagaaaacaataaaagctataaagacagggagaactacatgtaaacaatcattacaacgcattattttgggaatataactaaactgggtaagtgagtaaccctttatttccctaaagtattgatgcaaggtcgggtgtaatttttaaaacaaattgtttgtgccatattccaatttatctagccaagggtcgagctattatggaaatacatatgttattaaaataaaatacttaatttcaagaacccatttcgggtataaactaaaaaaaaaaacagaaacaataacttcacgcaaaaacgcgagcctgaaatatacgaaggtcttaagtaaaatgcatagtatatttttattacaaatgtagatatcaaaaaatatgtgtgttgctatcattatcaaaatgtatgtacatgtattataatacttttttcttttatagatggtaaatgttgtaacttttcggtttttttcgcaacacaaagtttatgcgatttgtttccggccatgttattgaaatatacgtaattaaacgatcaatggttaaatattcgtaacaaaagagaacgctacagtcaagtttctcgactatcaattaccattaacattcttggagtattgacatgaaaataaatcaaaagtttctaaattttgtgggcattagagtaggcctggtcaatgtttttggaatgtcgatagaaattggaaacaaaaataatgaaaataaaaaaatgcaacgaatttctcaaaagtgggcctggcagtttgtggaatggcgaaatagtttactttacacctaccactttttcctgaacaattatacatttcgagctaagttaagttacttatgacagtttttccactctgagaaattgagaacgaaaatacccgagatcggttatgctcagtactctgcatcaatcattctcatgagaagaaaccttcttgatttcgagacgaaaactatctcagtgtaatattttcagacggaagcagtatcgggttaaagattgtggaaaagccatgtcatttgcaatctgagaatgttttgatctcgatctgatgctgagcttgattcgacctcatatagattttgagatcgaaatactccgctaaatcaacaaacgcatcatacatcaagcagattaacatgaaaaaacttattcctaatatagcgatttggaatgcaagaatttaacagatcgcacttcagcgaatgatgcgtaattttgaggttttagtaaatcgtaataaaaattaaaaaccaagtctcaattttgacttttaattttttacatttcttgtttgtgatattctataaaaaattgtaaaaggtattgactactttgcactttagttcctgtgatctcgacattgaacagatagacaaacagacggatggacaaccggatatggctagatcgactcggcttgtgatcttgatctcttgaagaatagggtcggaaacgcttccttctacgtgtcacatatttttcaacgaaactagtataccttttactctacgaataacgggtataaatattaaggaaactctgtggttaatacccaagtgaaaatctctctgttaattgttatgcacataaattccagctgctatgttctcggcagcgttgggaattggaaatgcagatgagttgtggtcggctcaataagttctcccgttgattttagaaaaatactacccaaaccgaattctcctgttttttatgcagcggaaatgcatcatttgcagtgcccgccatctaccgcctctttccctctttggtcgtccgcaatgcttttgtcggtccgattgtctacccacacacacacaagacagcgtgagttaaaaaccagccggtccgagaaattagtgcaagtgcatgccaaaagtaagtcgaaacaaaccaaaaggcgaataaactctgccgattgcataggcactaggggttgaggtggaggaacagctgctgcaattttgaaatagaaaatgagcataactaccgcaaaaatgttaagttcgtagttgcattctctggactgttattgataattttgatttgcgtcatggttaattaaaatttaataatcattctctttgaaaccagatttcagaagggttaaataagcatgaatcaaaattgggtcaaaatgctcggttctagtcggtataggacggcgaagttcggaagtgctcctgcccatcgtgaaacgaccttatcaaggattctgggtcaatatgcttacgccattttgtcggcgctctgcttacgtgcttttcgtgtgtggattttgagagggcttatgcatagggtcattcgctttgtgggaggtacacttgagaattcaattttgcttaagcgaacgcattgatgaatcccttcgctatagttgtagttcaccagtttcatgtaacacataatgtacattaagctactgtgttggcctcgtgataccgttggtaatagatataaataatataaatattgaaataaatgtcaaagggcataaaattatattggtgaaacaaattgtttaagtccataagcgtgggccaattacttctttaaggagcttataagtcaacgacggcagtgatttattggaaattaggcactaaaatgcattggcgttcgtgaaagcagccacttgacggaggcagcgcaacagcctccgtggcgcaattggttagcgcgttcggctgttaaccgaaaggttggtggttcgagtccacccgggggcgaatatttctattttacctgtggaatctctttgttttttgcctactaagcttgacccctttttttaactaaatttttttatagagcgtcgctaaaaaggtatcaatgactgaggttattgttttcttcaacggatcatgaatatgagatttccaataattaataaataattttaaattacaattttttattttaattattgctgttaagaatataaataatgaaagaacatgaaaaataataaataccgcccccgggtggactcgaaccaccaacctttcggttaacagccgaacgcgctaaccaattgcgccacggaggctatggaaccagttcgatattccatatctagttacataccttgttatatcaataagtaaaattgatcagtttttaagaattttatcgataaatacaaaaacaattttcgaagacaattttcttattaaatttctattcaaacgtaaacgatttgctatatttaccggctaaactaagaatatgttctgttcaatttgagaaacaaagaactgtgggagtgcagggtataaagaaacgacgcctatcgtgtatgtttattcatatttaggtaaaacgtggcttgagaacttcgcacggcttattatgcacagatatttttgacacgtacggcgaactaaaatgtttctttcctaagcctatactgatatggatcaatgagttttttctgttttattactaagaataacttgaacacttctttaaatcagatttacgtaaaatttaacttgttttgaaaacaaaagcttttggcttggctgacaatcgacattagtccatcaaaatgtagaagcctccgtggcgcaattggttagcgcgttcggctgttaaccgaaaggttggtggttcgagtccacccgggggcgacttttttattttgatgcaattttactgaattttttactgaatttttttcagctcagttgctaggaaatgatgtgattttaagcgagtgggcatcatgaaggcgcggccatgttgacgacgagtggacaacaacagtcaaagcaaaagctgtcgaccttacctagccatattttgctacaacaacaattagctgcctctgcaggcccatcttcctcagtatccctatccccatcttcttctgccgccctgaccctgcatgtagccagtgctaatggcggtgcaagagaaacaacttctgcagccgcagtcaaggataaactaaggccgacacccacagccattaaaattgagcccatgccggacgtcatttccgtaggcacggtggccggaggatctagcgtagctactgttgttgctcccgcagcaaccacaacttccaataagccaaattctacagcggcgccctcgacgtcggctgcagctgcaaatggtcatttggtgcttgtgccgaacaaaagaccgcgacttgatgtgtaagacaactgaagaaaatgtgaaaaacaaaggcagcatattaataaagtacatattccatctacccgcagtaccgaggactggatgtccactcctagtccaggcagcgtgcccagctctgcgccgccactttcgccttcccccggctcgcagaatcacagctacaacatgtccaacggctatgcatcccccatgtccgccggaagctatgatccttacagtcctaccggcaaaacaggtgagttgaagaatacatttttaagtacaatcggtttaaattttacagtgcagtttttagcgattaatgtagttcaacctacttaaaaatgcttcttaaaatgggttaaattaaataaaatgcttcttatttttccaaacaaaaaaacaaaaaaccgaataagaaagtcaaacaaatgttgccccgtaaaaaaaaactaaacgtttcctttgaatgaaataaataattttttttttaaatagaagatttagaaaataaagaataaagtaagacctcagttttacttcaaaagtgaagaccaaagagcgaaaaaaatgtgtggccaaacaagtgtttgcttcacttactgtcacgtatttgtccagagggcgatttccgccaccgaacatggatgtgagctaaaagactagtgcaatctagatggcgctttaccatcaacatggtcgatatttgttttgttaaaatataacagtttcgggccgagtgccaaaaccaaaaagtagatggtgctgtacaacggatgtgcgagtagaacgaacttcgcttcactgttttgcgtatttgtccagatggcgcttttactccgccaccgtaaaagagctaaaagactcttgcaatctagttggcgcttttcaatcaacatggtcgatttttgctttaaccgtttcaggccgagtgccaaaatcaaaaagtaggtggcgctgtacaacggatgtgcttgtatagcgaacttcatacagtaaattctttcaacaatttatcgacgagcccaagtaataatctactgttaaatagttataacgggggttattaataactataatgtttatatttgttaaaggattgttaaatatattaattttattatatttataatgtttattcacaaaaagaagttcatcaagcttatgttcatcattcatataaaatttgtatataaatatataaaaattacaaatatacaaatatttttttagatttccacgcaagataaattataagagataattaaaaaaaatcaaaagatttttgcaacaaaagtctacaacatttcaataaatggcatcgccaagacaaaagaacttt

SEQ ID NO: 1175 - DNA, 762 bp, DROSOPHILA
gaaaataaactcggaggccgcgctagaaaacggaaggcaacggaaaaagtgcattcgagttcgcattgcaattctctcagttgctaggaaatgatgtgattttaagcgagtgggcatcatgaaggcgcggccatgttgacgacgagtggacaacaacagtcaaagcaaaagctgtcgaccttacctagccatattttgctacaacaacaattagctgcctctgcaggcccatcttcctcagtatccctatccccatcttcttctgccgccctgaccctgcatgtagccagtgctaatggcggtgcaagagaaacaacttctgcagccgcagtcaaggataaactaaggccgacacccacagccattaaaattgagcccatgccggacgtcatttccgtaggcacggtggccggaggatctagcgtagctactgttgttgctcccgcagcaaccacaacttccaataagccaaattctacagcggcgccctcgacgtcggctgcagctgcaaatggtcatttggtgcttgtgccgaacaaaagaccgcgacttgatgttaccgaggactggatgtccactcctagtccaggcagcgtgcccagctctgcgccgccactttcgccttcccccggctcgcagaatcacagctacaacatgtccaacggctatgcatcccccatgtccgccggaagctatgatccttacagtcctaccggcaaaacagtgcagtttttagcgattaatgtagttcaacctacttaa

SEQ ID NO: 1176 - protein, 209 aa, DROSOPHILA
MLTTSGQQQSKQKLSTLPSHILLQQQLAASAGPSSSVSLSPSSSAALTLHVASANGGARETTSAAAVKDKLRPTPTAIKIEPMPDVISVGTVAGGSSVATVVAPAATTTSNKPNSTAAPSTSAAAANGHLVLVPNKRPRLDVTEDWMSTPSPGSVPSSAPPLSPSPGSQNHSYNMSNGYASPMSAGSYDPYSPTGKTVQFLAINVVQPT

SEQ ID NO: 1177 - DNA, 5023 bp, DROSOPHILA
accgtcccacttcgtgaaggacgctacaagaccaccattaaatttcgagcgttcgactctaagggaactgagagacccaccagcatttgttgcgaagtaataggagatgtttttaagattaggaactaacgtgtagctgatggtttcatacacatttcaacaactgatggaagtaacgttaataaattaaataaaacaacgtacaacaaggtggcttcaagtattaaagcttttggggttgccctgataggattcatttagattagaactacgatcagattgagtacgtatatatattagaaacgtggaggttaattactacaatcaaaacatacagtgctcggtacggggagttcatattcgttttaacaatacttacaatccaggctttgctcaccattttgagccacccaaaccaattcgtgattgcgattgagtaggtattcagcccttgtgagtatctcttcggaacagataacttaagtcttttatacctggcttatcccacatcttctccagctacttttaaaactcttctacttggacagtgaatgatcttcttagatagatggtaaacctaagcccatttgcatcgaattacagcgcgacctatttaaattacgccctttgcaaagaagggaacggttccaatttgcaagaaatgatgggatgtttactaaaatatgtacgaaatttattattggtgtgaagcgtacaaattaaagatctatcattatgtatctatatataatcgtttatatgtacactcaattacacttacgggctatgcagaaatcagcttacgtcaattacttaaacaaatgtagcgtcatactcttaattacctacgggaaacaattccgtattcttttaatcgattgccatcggtccgcgaccgcccaattgcgctggtgcaacatggtcgacactgctaacttaactaagacacaggagatcgttgaggcgttgatgttggcaggcagcagattccgccgcccgatcatgtcagatgcggcgtggccgcagtcgccgatttccccgcaaagaatcgacttccgcctgtctggttggtgaagagtagcgtgtcaactgagggcagcatctgattggatctcaccagaagaggcacattcaccatggacacagagggtgtctgggccaagctcgtggtcacagactgaacaccattgcccgtactactaagctttccgtgtgcattcagcgtaaaggcgggtagatagtagttcccagatcgcactggtagagcattcgtcgatatggcgacactggaggcgcatgagacagcggtcagctccatggaggcgggtgacgaaaacggcgaggactccagtgaggggcaaggtagtcggtcgctgggcttacaaggcactacaaatataaaattttaaattaatataaagtttttaaaaggaatactattttatacgaataactaggtaaatcaattcataaaacaggacattttcattagaaacttacagaagtcatcgtctggcaacagctcgtccggtaattcattctttatctggaagtgcagggcagcggccgaatcggaaatggcgttgtccgacgtccccatttcagtgtttgcattaggagcatcgtacagaccgcactcctccatctccagggcctgctccatgatcagctcttcggctgaagtcagactaagaccgtgtaagtcaaggaacggaccctgagtctgcactggctccttcttgatttgcggcacagcaggaatgggctctaagctggactgctggggttggccctgttgcagcagctgcggtttttgctgcagttgcttcggtgctagctgctttcgttctcgcttggctttggtctgcttaggagccggcggggccagcggcaccagcacagtggtaagttcctgctgatgctgttgcgccagcggcacaggatgcacttgctgcagagcagtaccggcaggtagagttattcccaatgcagcaagagtggcctgctgcggctgcttctttttccgcgcttgttttgcaggagccggtgcagcagtagacgtaagattagccttggctttaagttcactagaagcggagagttcgttgggattcacagctgaagatgctgccgccgctgctgctgctgccgcggctgccttttgggccttgtttgtagtggactttttagagcagtaggagggaatgttctcgaggtgttcgcccgttttgtggtccaccttgtgtcggcgtctcgtgtgcttcaaccaattggggaagttggtgaagtctcgcggacaataattgcatttgaacgggcgcattcctgtgtgtatgttggagtgctgcttaagcttcgaattgctgatgaagctcttgtcgcacactgtgcacgcgaatggtcgctgctcaagatgcaccaagttgtggaccttgagacagcgctccgttttgtacatcttgccgcacttttcgcaacgataggaacgcgtttgcgcatggtacttctggtggcgctgcagatgtgagcgctcctggaatcgcttctgacactcgggacactcgtacggcttctccgatgagtgaatccgtgcgtggtgcgtgaggtttattttttgcacaaacttttggccgcagatgtcgcactggtacttcttgttatcgctgtgaatcttccgatgcatccacatgcttcccaatttgaggctaaagttagagtaaaatggtcaataggaataactatttttagtttgcagtaacacttaccacttgccgcagtcaggacacttcttccaggtgtccttgcggccctcggtgcggtgcgtctttaggtgcttcttcaaaccagccaacaactcgaattcccgctggcactcgctgcaacgataggtgagcctcagcctgtgagcggccgcctcatgcttggccacctcatcgggcgtctccagcagcagtccgttgcagtcgagacacttgtgtagaggtgccgggtccacctccaacggcttcgtttccgaagcagccggaggcggcatgctagccgcatccgccaccgattcagccgatttggcctgctggaatatggtaaacgatggcggcagcagctcagactcgcacacctctaccttggtgaccacttgctccggcggatgcttctcctcgggcggctcctccttaaagaccttcagacgcaccgccgtcgccgccggcagctttggcttgcgttgcagcagctgagactggggcatttggagctgatgctgctggtggagctgctcgggcgatagctttacgggtgtggaggtgccgctggacgaagtcttcttaaacggggaattagtgaaagcattcgggggctcgggccgcaggaaagtcacactaaactccgagctggagtggttatcactggtcagagtgctgggcacggttgacgagctggtggcagccaagtcatcgcggcagacgtccgaggatagattcagctcggtgttgttctgggcactctcgtccaaaacgcgccaaaagtcggtggaggagagactgttaccattgaccaggctggcggagctgatggtcacgcacgccgacagatcgatgtccagcgactcgtccttgatgctcgatatcgagtcgaagttgttgatccgcagcagagagctgagtatctcgtcgtgggccgccttcgtgggggtgcccgcatcgccgccgtagattttaggcggcaacttcttgcttggcgcctcctctttcattctcttgccctcgcccttgccgccttccattcgccttgccttgcttacacgtacaggttatgcggtcggcgttttcgctcgccgtattttgtctttgttcgccgcgccgctgacgctttgcgttcactggtcgccgttgcccggtcactgggtccccaattcactcatcgcgatcgctttcgttgtattaaacgcgccgcaattgatcgaaaaacatttaattattgtgaaatgcgccttggctttgttgtttttgtcacgcttacaattctcgagtcgccattttgagaacagtgttagaagacgcgcacgagtggcagtcccgctaagagtgatgctcgccaggcgggttattagctatatttaattcacgactggattcaccattctaaataacatttaaagagatttcttgactcaaaaagaaatcttgtccgacaaggaaacattttacttaccaattccatttacatgtttgtatttacttgatataattcacgattatgttgtatagaaactataacaattttttgggcttttaaaatcctatgcattgaacattcaaaccctaaatattaaaggaagtaggcccaatgattgtgttatttgtttatgttttttatgttaacttaataacccactaatttataatatgtgtaacattaaacaaattttatcttctttcattaagaattatttatggtgatatttaaagtcctcttaccataaaatatttaaattatatttctagctggaacatgtaatttctgctagaatttgtatgttgagataggttctgcatgcgcacgccaaaaaatgaactagttcgccgaactggaaaaacactgagcacttaggctattttcgttattaaattatattttttgatagattgtatataattcattcatcaatgctaaaaaatgataaatatcgaaattcgaaaaacctctgaaaaatattcaaaatatagctatgagtcagtcgtcagtcttgaccaaacaaagagatatcgatattggcgggacatgtatatcgataccacgttgcaatgttaatatggcgtcagagggcgaaaacgttgttatggaaagtccaggtaaattgatgaaaaattacaaatacgtgcattccttcgaccggacctagtgaccgttgattaaaaattcagtccttactagcccatttcggtagctgacactgacagttagctggagcagcccattaaagcatttggaaaaaagtgaacatcacgaggcagcgaacaaccca

SEQ ID NO: 1178 - DNA, 2852 bp, DROSOPHILA
agaattgtaagcgtgacaaaaacaacaaagccaaggcgcatttcacaataattaaatgtttttcgatcaattgcggcgcgtttaatacaacgaaagcgatcgcgatgagtgaattggggacccagtgaccgggcaacggcgaccagtgaacgcaaagcgtcagcggcgcggcgaacaaagacaaaatacggcgagcgaaaacgccgaccgcataacctgtacgtgtaagcaaggcaaggcgaatggaaggcggcaagggcgagggcaagagaatgaaagaggaggcgccaagcaagaagttgccgcctaaaatctacggcggcgatgcgggcacccccacgaaggcggcccacgacgagatactcagctctctgctgcggatcaacaacttcgactcgatatcgagcatcaaggacgagtcgctggacatcgatctgtcggcgtgcgtgaccatcagctccgccagcctggtcaatggtaacagtctctcctccaccgacttttggcgcgttttggacgagagtgcccagaacaacaccgagctgaatctatcctcggacgtctgccgcgatgacttggctgccaccagctcgtcaaccgtgcccagcactctgaccagtgataaccactccagctcggagtttagtgtgactttcctgcggcccgagcccccgaatgctttcactaattccccgtttaagaagacttcgtccagcggcacctccacacccgtaaagctatcgcccgagcagctccaccagcagcatcagctccaaatgccccagtctcagctgctgcaacgcaagccaaagctgccggcggcgacggcggtgcgtctgaaggtctttaaggaggagccgcccgaggagaagcatccgccggagcaagtggtcaccaaggtagaggtgtgcgagtctgagctgctgccgccatcgtttaccatattccagcaggccaaatcggctgaatcggtggcggatgcggctagcatgccgcctccggctgcttcggaaacgaagccgttggaggtggacccggcacctctacacaagtgtctcgactgcaacggactgctgctggagacgcccgatgaggtggccaagcatgaggcggccgctcacaggctgaggctcacctatcgttgcagcgagtgccagcgggaattcgagttgttggctggtttgaagaagcacctaaagacgcaccgcaccgagggccgcaaggacacctggaagaagtgtcctgactgcggcaagtgcctcaaattgggaagcatgtggatgcatcggaagattcacagcgataacaagaagtaccagtgcgacatctgcggccaaaagtttgtgcaaaaaataaacctcacgcaccacgcacggattcactcatcggagaagccgtacgagtgtcccgagtgtcagaagcgattccaggagcgctcacatctgcagcgccaccagaagtaccatgcgcaaacgcgttcctatcgttgcgaaaagtgcggcaagatgtacaaaacggagcgctgtctcaaggtccacaacttggtgcatcttgagcagcgaccattcgcgtgcacagtgtgcgacaagagcttcatcagcaattcgaagcttaagcagcactccaacatacacacaggaatgcgcccgttcaaatgcaattattgtccgcgagacttcaccaacttccccaattggttgaagcacacgagacgccgacacaaggtggaccacaaaacgggcgaacacctcgagaacattccctcctactgctctaaaaagtccactacaaacaaggcccaaaaggcagccgcggcagcagcagcagcggcggcagcatcttcagctgtgaatcccaacgaactctccgcttctagtgaacttaaagccaaggctaatcttacgtctactgctgcaccggctcctgcaaaacaagcgcggaaaaagaagcagccgcagcaggccactcttgctgcattgggaataactctacctgccggtactgctctgcagcaagtgcatcctgtgccgctggcgcaacagcatcagcaggaacttaccactgtgctggtgccgctggccccgccggctcctaagcagaccaaagccaagcgagaacgaaagcagctagcaccgaagcaactgcagcaaaaaccgcagctgctgcaacagggccaaccccagcagtccagcttagagcccattcctgctgtgccgcaaatcaagaaggagccagtgcagactcagggtccgttccttgacttacacggtcttagtctgacttcagccgaagagctgatcatggagcaggccctggagatggaggagtgcggtctgtacgatgctcctaatgcaaacactgaaatggggacgtcggacaacgccatttccgattcggccgctgccctgcacttccagataaagaatgaattaccggacgagctgttgccagacgatgacttcttgccttgtaagcccagcgaccgactaccttgcccctcactggagtcctcgccgttttcgtcacccgcctccatggagctgaccgctgtctcatgcgcctccagtgtcgccatatcgacgaatgctctaccagtgcgatctgggaactactatctacccgcctttacgctgaatgcacacggaaagcttagtagtacgggcaatggtgttcagtctgtgaccacgagcttggcccagacaccctctgtgtccatggtgaatgtgcctcttctggtgagatccaatcagatgctgccctcagttgacacgctactcttcaccaaccagacaggcggaagtcgattctttgcggggaaatcggcgactgcggccacgccgcatctgacatga

SEQ ID NO: 1179 - protein, 869 aa, DROSOPHILA
MEGGKGEGKRMKEEAPSKKLPPKIYGGDAGTPTKAAHDEILSSLLRINNFDSISSIKDESLDIDLSACVTISSASLVNGNSLSSTDFWRVLDESAQNNTELNLSSDVCRDDLAATSSSTVPSTLTSDNHSSSEFSVTFLRPEPPNAFTNSPFKKTSSSGTSTPVKLSPEQLHQQHQLQMPQSQLLQRKPKLPAATAVRLKVFKEEPPEEKHPPEQVVTKVEVCESELLPPSFTIFQQAKSAESVADAASMPPPAASETKPLEVDPAPLHKCLDCNGLLLETPDEVAKHEAAAHRLRLTYRCSECQREFELLAGLKKHLKTHRTEGRKDTWKKCPDCGKCLKLGSMWMHRKIHSDNKKYQCDICGQKFVQKINLTHHARIHSSEKPYECPECQKRFQERSHLQRHQKYHAQTRSYRCEKCGKMYKTERCLKVHNLVHLEQRPFACTVCDKSFISNSKLKQHSNIHTGMRPFKCNYCPRDFTNFPNWLKHTRRRHKVDHKTGEHLENIPSYCSKKSTTNKAQKAAAAAAAAAAASSAVNPNELSASSELKAKANLTSTAAPAPAKQARKKKQPQQATLAALGITLPAGTALQQVHPVPLAQQHQQELTTVLVPLAPPAPKQTKAKRERKQLAPKQLQQKPQLLQQGQPQQSSLEPIPAVPQIKKEPVQTQGPFLDLHGLSLTSAEELIMEQALEMEECGLYDAPNANTEMGTSDNAISDSAAALHFQIKNELPDELLPDDDFLPCKPSDRLPCPSLESSPFSSPASMELTAVSCASSVAISTNALPVRSGNYYLPAFTLNAHGKLSSTGNGVQSVTTSLAQTPSVSMVNVPLLVRSNQMLPSVDTLLFTNQTGGSRFFAGKSATAATPHLT

SEQ ID NO: 1180 - DNA, 3868 bp, DROSOPHILA
tccctctacctccagctttttgccccagtggaaggtggaggtgagattggagtccccgaacgggttgtcttcgttggagtacgtctggtactcgttgtcccagcccattcgttcgcgacgccgctgctccttggcctgcttttcgcgcaggcgacgggcgcgcttctcctcgggcgtttcatgggccttcagctcctcctttttacgctgacgatccttctgctcgacgaggcgacgggcttccagcgtctggagaagcttcatcgggctttttaccagcggcgaacgaggggcaccgggcaccgagctggacgtcgaactcgacggggatgagctggaggaagaggaccggcgtctccggcttttgtgctcccgcttcttgtccctgcttttgtccttttccctttccctgcgctggtcacgttccttgtctctgtgatctctgtggtcacgatccttttcccgctcgcgttcacgatcccgatccctgttcctgctgctcctcggatccggactgcgatgatcccgcctctcccgactgcggctgcgatgccggtgcttggatttctccttgggcatcttttttaatgagtttttcgggataaaacttgtgaaataaaatataaacaatgctagcgttgccagatggagaaaaccaacccagatagccactaataattgcaaaagtgctatcgatataagcattataacattaacacatctccctcttgccgataagtcgatttatttttccaagggttagtttttacaaactttaaattttaaaatttcggctgcagcgtattataaatacacaaaaataaataatttatcgatggaatccttggtgcagtgtaaaaggctttttagggtcttcgtggtaatgcccactatcgaaactgaagactcgatgtgtcattgcaagtgccattactcaatatatcgatacaaacgcaagtagccaatccagctcttcgcagaaacccggttggcaaaaacgtttatgtgcattttttgtattcaatcgccaacacgagagccgagctaccagcaaaaggattgtccagatagcccgccactgcgctgagtaagtagtgattctggaaaagtgtcggggaagacaggaaaaacacggcagacggtgaaaatcgcgcgcggcaaaaaggccagcgacaagccagacgcacacacacacgcgagcatccgcacaaagccgacgcacacagacgcatgcaggcgaactcaaaaaccgaaacacaaacaaaaggatggttattagtcgactattagttaccttacttccagttcagcagcaactgaaaatctgaactaatctctaatccagaaattctggatttaaaacaaatccaaccctatccactgtcaaatacacgtttcgtatttgaaagaaatgtgtatgcattcacttaaaacacagccatctaaaacagctaaaagaagttatatcgagaatatagcctcttttctcgttggttggcttttcattgcgaaatagcctcatggactatctcaacaagtggaatagctgggaacgcgaatgtgtgtgtttatattatttgcccaatccgtaaatatagttgaatcgtcttgattcttagatgtgggggatgcagctatacagatgcactttatggcctctaaaacgctagacttgctgtgcacgactagagtagtaccctatcctatcactcaagcgaccaaaaatttatagtatttctcttatgcaaccttgtggctacctgaaaaccacccgcgccagtttggtgaacgactaacaacgctgtccccgccctgtcaacgcctgcagtccgattcaccgcttccccgtcgcctcggctgccgccatcctccgggtgaagatgtccgactacagcgacctggaccgacagatcgagcaactgaagcgctgcgagatcatcaaggagaacgaggtgaaggccctgtgcgccaaagcccgcgagatcctggtggaggagggcaacgtgcagcgtgtggactcgccagtgaccgtgtgcggcgacatccacggtcagttctacgacctgaaggagctgttcaaggttggcggcgatgtgcccgagaagaactacctgtttatgggcgatttcgtggaccgcggctactatagtgtggagacgtttctgctgctgttggcgctgaaggtgcgctatccggaccgaatcacgctgatccggggcaaccatgagtcgcgccaaatcacacaggtctacggcttttacgatgagtgcctgcgcaagtacggatcgacggccgtgtggcggtactgcacggagatctttgactacctcagcctttcggcgatcatcgacggcaaaatattctgcgtgcacggcgggctgtcgccgtccatccagtacctcgaccagattcgcagcatcgaccggaagcaggaggtgccgcacgacgggcccatgtgcgacctgctttggagcgatccggaggaccagactggctggggcgtgtcgccgcgcggcgctggctatctctttggctcggacgtggtctcccagttcaaccgcacgaacgatatcgacatgatttgccgtgcacaccagttggtaatggagggcttcaagtggcacttcaacgaaaccgtcctgaccgtctggtcggcacccaattactgctatcggtgagtcagcctcctgtgcaatttcgaacttgtgttgttaactctggaatctctccacatgcagctgcggcaatgtagctgccatcctggagctgaatgagtacctgcaccgcgacttcgtcatctttgaggcagctccgcaagagagtcgcggcattccctcgaagaagcctcaggcggactactttctctaagacgcttccgttcctgacaatccggtggaacggagtcggcacaggatgcgggtgccgactggtagcttacataaatcatctagggaatagaaatagaaactgccagcctgcaaaagcgaagcgaacgcgaatagcaactgatggtgtaaaacaaaaaatatgtaacataaacgtaagctagggtagagctgccggacacaggtccacgttcagttagacttatttgcttttttggttcaactaagatatttaaattttttttaccatctgtttacctctacctgtgtttaatcaggctatttgcgcgatcttttaatggctgttttcaaaacatgtagagatcagccatgcagatcgcgtatgacctgtgcacctcatctagctactaactaataggtttaatgaccatagcccaagaccctgagaattcgccttgcgtagacggaccgcaatcggagccgccgtcttctcgacacgaattccctgggcttgggcagcatactatactaggagcccaagttgagcaaatagatatttttaccgacagattgcgttaagtcggctaagctaggacatatttaggggagccgagagcgaacgcgcatccctggctgggtcccttctccgcaggatatcacctggagaaacccaggtacgaagaacatcgtgcattaataaatagtgagtaagaatcttttaaatatgccccagattgggagatgatatacaaaaaaatgtacttgtatttataataataaagattgtaatataatcgtcgaaattgagcaagaattttttattagtaaattatgggtcccgaggagtcttggaggataaccacacccatacgaatcccccttcacaatccaacaaacaatcaagcctgcagtttctcagtttatcaagtacttaattcatagtatacacataaaaaaaaaagatggttatattccagaagggcgcttgtgatacagtaacggggggtcgtcatgggtctcaa

SEQ ID NO: 1181 - DNA, 835 bp, DROSOPHILA
tttatgtgcattttttgtattcaatcgccaacacgagagccgagctaccagcaaaaggattgtccagatagcccgccacggtcagttctacgacctgaaggagctgttcaaggttggcggcgatgtgcccgagaagaactacctgtttatgggcgatttcgtggaccgcggctactatagtgtggagacgtttctgctgctgttggcgctgaaggtgcgctatccggaccgaatcacgctgatccggggcaaccatgagtcgcgccaaatcacacaggtctacggcttttacgatgagtgcctgcgcaagtacggatcgacggccgtgtggcggtactgcacggagatctttgactacctcagcctttcggcgatcatcgacggcaaaatattctgcgtgcacggcgggctgtcgccgtccatccagtacctcgaccagattcgcagcatcgaccggaagcaggaggtgccgcacgacgggcccatgtgcgacctgctttggagcgatccggaggaccagactggctggggcgtgtcgccgcgcggcgctggctatctctttggctcggacgtggtctcccagttcaaccgcacgaacgatatcgacatgatttgccgtgcacaccagttggtaatggagggcttcaagtggcacttcaacgaaaccgtcctgaccgtctggtcggcacccaattactgctatcgctgcggcaatgtagctgccatcctggagctgaatgagtacctgcaccgcgacttcgtcatctttgaggcagctccgcaagagagtcgcggcattccctcgaagaagcctcaggcggactactttctctaa

SEQ ID NO: 1182 - protein, 228 aa, DROSOPHILA
MGDFVDRGYYSVETFLLLLALKVRYPDRITLIRGNHESRQITQVYGFYDECLRKYGSTAVWRYCTEIFDYLSLSAIIDGKIFCVHGGLSPSIQYLDQIRSIDRKQEVPHDGPMCDLLWSDPEDQTGWGVSPRGAGYLFGSDVVSQFNRTNDIDMICRAHQLVMEGFKWHFNETVLTVWSAPNYCYRCGNVAAILELNEYLHRDFVIFEAAPQESRGIPSKKPQADYFL

SEQ ID NO: 1183 - DNA, 8425 bp, DROSOPHILA
agagcgtggtgtattcttatttatattttcattttcggcggagagtgggagtcaagggcgtgagatcggccgatcacagccgatcttcttcgggctttcaaattgggtcttctgaatgccaaacgatgccagcgaatttcgctcagtttcgaggaaaatcgcgtcgcgccaacttgggaaatgcgttgcgtcgtgtcccgtgaaaatcatcgcgactaaggccccgagaatccccaaaggattagcccgaaaataataacaataatcgcaagcggcaaacggcgaactgcaaacaaagtgtgaccaaagtgatatatgtgtgtgcctgtctggccgtctcttcgcaaatccattgctattttcgttgtcgctcgctttgtgggcaattagcacaaagtgtcgagcaattttccgtctcaattgaagtgctgcttaccctttgccaaaagcatccgttaaacaatgtgatgacttaatgaaaagttaatacgtctctgaataattgcagcaaattgaaatattaattgttcaacatttgtttcgtgtgcgctgcgggcgaaagttgtctctatctcgctatattggcattgcctggctaaaaatacaagaaagtccacagctatacaaattataacaacaagttttatttattgcctaaatatatttgtgtgttttgtgcgcttctgtgttggtgtctcgtcgtccataaagacgctaggcaaaggcgtataattatctaaattcctgtgttagtaacactttcagcaccagcaaacagtcaagccattaaaaaatatatatcgagctaaggcatcgcaaaaatcagcaccaacagaacgcagaaaaattaataaaaaaaaataaaaaatttaacaaaaagcaggggccgaataaataatcaagcatcatgtcggcgacctccacgcgaagttcggtgacgaggaaatcatcgctatcaaaaagttctagttcagacaaatcggcaaagtcctcgtcgaattcctcgaaatctccgacagccgccagtggaaacaaacagaaaatgcagtacacaaaaaccagggagcgcatggtcgatggtaatgatctctactctctataagcactacggaccccaatcaagcattatcccaagcacgattccctactgcgattgtatctttaatgacatgcgatcatgcttcaatggcattccaatgtgctgaccgccgtcattaatgtcaaaactgagggtttcacaaattatttcctttgaacatttcagtcggcggaggcaagcgtttcgaaaagtgtgttttgagaattgggaagtcatgcttgtaattttcaaaacaatagcatggctgcaccttctcgaggagcagtacatcgatcgttaagttttcatgtttaaaaactaataaatggacttttgaaatggaaacaaacatagaaaggaaaacattttatagctcatgtaaatttatctaatttcaaaaaatgttctttgagcaagtttcaatcgatttattttacagaccattttacaatgcataattgcttattatgcgcattatttatacataaataatttacagatttttaataacccatatattccgatgcaactgccataaatgtgcttttattaatcaattattcggcatcgtaacttaaaacccttaactgaaaatgcggtactcgcttttgttctttggtttattgagtccataaaaattaatttaattatcttcgagcacccataacaagcaacaactgcagtacattggcattttattggccattgcgtcaaaattcaagacatttacccaaattatgacaattaaaaatggcgttcgccctgacgtttcgatgtgtgtgtgtgttcgattacgtttgtttgttttgtgtgtgccaatcaattttcgacttttatattcactcagtcaaattttgtaattagcgtacgaatctcatgtggctgcatctggcggaatttcggttttctttatagccgggccaagaaaagcggccaaaccgaatgaatattggcgctaagttgcagcacctcgttaacccacatcgccgtcggacagcgatgtttattataattctatcaatgcaagactacaccgaaaaaaattcaggggaactgtaacaatacgagaaaccccattttcaaagagatgttccattcacgtcatataagatacaagatacaatatataattaacaattgaatccaggggcttcttcttctggaaatgggtgataacaatttacttaataatctttacttaataatttgattaatttctttgttactcccctagatgttccacttccgcccacccacaagctgaccatgtcggaggtatacgacgatccgaagaccggaaaacccaacttcgacgccctgcgccagcactttctgctggaggggcggatcgaggaggcggtggccctgaggatcatcaccgaaggagccgccctgctgcgcgaggagaagaacatgatcgacgtggaggcacccattaccgtgtgcggtgacatccacgggcagttcttcgatctcgtaaagctcttcgaagtgggcggcccgccggccaccactaggtacctttttctaggcgactacgtggacaggggatacttcagtattgaggtgggtccatatgaaaattgtatcttaacttatcaggaatatatactgcgttttccatttttgtattaaacggtccacttaatttcagtgcgttctctacctgtggtccctgaaaataacctaccccaccacgctttccctgctgcgaggaaatcacgagtgcaggcatctcacagagtactttaccttcaagcaggaatgtaagttggacttaactgaagttaatgccagaatttgctagttatgagaaagttgatttgtttcccgttgatatagataaactacaaaatgagcaaacctgcatgcctcagtcactttacgaacttaatgcgcttttaagtgcgaatatgcatgctataaatctccttccgtcgctaattcattaatttttctctgttgaaggcatcatcaagtattcggaaagtatttacgacgcctgcatggaagcgttcgactgcctgcccctcgccgccctcctcaaccagcagttcctctgtattcacggcggtctgtcgcccgagattttcacactcgacgacatcaagacggtaataaagcagcgctgaaatgtttacaatataatgcatctgtgcggattttctcagctgaatcgcttcagggaaccaccggcctacgggcccatgtgcgacctgctctggtccgatcctctggaggactttggcaacgagaagaccaacgagttcttctcgcacaactcggtgcgcgggtgctcctacttcttcagctactcggcctgctgtgagtttctgcagaagaacaacctgctgtcgatagtcagggcgcacgaggcgcaggatgcggggtaggatcggaagtaccatggtgtaatatccatatgattatcgaactccttccgcttcaggtatcgcatgtatcggaagaaccaggttacgggcttcccctcgctgatcaccatattctccgcccccaattatctggatgtttacaataacaaggtatgagatagttccacctctctccctctgctcaccctgctcaccctatctctttctgggttgtttatttatcttgctgttgttgttcctgactttgctatttttaaataacgaaatctttttttggctgcattgcgagctggtgcgagtttaaatcgcgctgcgttcgcaataccctctcttccatctctttctccggcactcgccccgtctctttctccgctcgcgctgattttgtcaaccatcgaacccatttgacaaaaggcagctgtgctcaagtacgagaacaacgtgatgaatatccgccagttcaactgctcgccacatccctactggctacccaacttcatggacgtcttcacatggtcgctgcccttcgtgggcgaaaaggtgggttcgcacccaatcgggtgggattatctatgtattttgagttcagtgatggaactaagccataatactcgaactagaactttcaaaagtgtctgaaatctttatacgtgattttaatatccaatttaccatgccattcaaaggtaaccgagatgctagtcaacatcctgaacatttgctcagacgatgaactggtggccggacccgatgacgagctcgaggaaggtaagtttggggatccacagagcgattctgtccgtactagactgtgtgtcaatgtcgcagtgctttggatgttgtggggccaatacggatacacgtgaattacaaactaatcttctattaaaaatattttccgaaaccaaatatcgaaatacgacaactgcaatctactaccaacacccataataatttctgtaccaacaccaccaccaactttccactcaaaacacgtccaaaacacgaccaaaagagctacgcaagaaaattgtgctcgtgccggcgaacgcgagcaataataacaataacaataatacgcccagtaagccaggtaagccaggtattaaacgcaggcccaaagtgaagccaaacagtaccgccaatgcaaatgccactgccattgccactcccactgccaaaaataaaaatgcctgagccaacgaaaatcgcctgagcgaagatagcgaaaagcttagttattgccttgcgccctgctttgatcggcttttcagcgagttttccagctgattaccattacatttaccccgtgaccccgcgagattccgtctaatcgagccctcaattcgcagcttccatgtcggcgctgcgcaaagagataattcggaataagattcgggccattggcaagatgtcgcgcgtcttctccatcctcaggtgcataatgcctcctataatcccgtggattcagctaaataattcaatattcccacatcccgcagggaggaatccgagagcgtgctccagctgaagggtctgacgcccacgggcgccctgccagtgggcgctttgtccggcggaagggattccctcaaggagggtaagtcaacacacataggtattctcaggatcaaattgatgtaatgcgtgtagggactttgaattataacatatgccttataaattaatcaggatatagttccgtacactttgaccacagccctccttatgtcgtaggccatccaatttgtttcgtataggtaatccccttcaggaacgggaaggacctttgtcacctggtgattaacgaagtgtatgggtagtttttcgatcacgagatcgtgctgtatagaaaaccagaaacataagcacagatcggatttaattagggatatacgcacatcgtaggggcagttgtgattcatgttggtgaagggcctaatgaaatcataaaggtaactggctatcgggttcgactttgtgttgttcatgaatctacatgcatccaatgtgatattgaacatgaaaggtctatagccattatatccattaaatcgtttgagaattactccgttgatctgagaagagtaattgtagaagagaaaatgttgttaaccaaattatttaaataccttgactttggtaattggcgttttaaataattttgctttgatcgacacatacttgtagctacgattaaccgactttatgtagcaatactcaaagtcggaaaactgtttatccaaagaattgcacatgatatttgtgaactcaaatttcgatgatatctgaggaagattttgaattgattcgtattatacctaatattttaataactcttacctcaactattgaaattgaaagagccaaaagcgccactaaaccacaatgatttacacccatctttcgatatcgactaaccagtgtaagttgtttacagaaccctattaatattctattgaatcagcaacataaaaacaatttacaaagcaattaatagctccaccaagccagaaaatcataatgaacccacattataatgagtttagtatagtttttgttatcaaaaaaaatagtttttagtgtctactaaaatactttcaccacaactcagtcgatgtcgtaggcaatccagtgggttaccagttggtaggctccttcggaaaagggcaactcctttgttccttaatggtttacaaagccaatttccagtttctccacaatcaaatcgtgctagaatcgatcaatttcgagttagccaacacaaagtgttaggacctactcacacctgcaggcatccactgtgacattgaacatgaatggcttatagccgttgtagcgcttgaaaagaatggctcgattaaatctaaaaggaagactagttaaaagccattacaattcgatttgtagcgagttttaatctagatgtttgcttgaatatggtttaattatttgcctatcgcggccaattaaacagtgctgatcgcagaccagccatcgtttttatacccgttactcatagagtgaaagtgtttctctggcaggagataatataaattcttgatcaggatcaatagccgagtcgatctgaccctgtccgtatgtccgtccgtccgtatgaacgttaatatctcaggaactataaaggaaggttgagattaagcataatctaaaaaccgaatataacccgtccacaacatggcatataatcggggtagtcggctatagcatgctgtcttgttactagataactaagtaataaaccttcctgattagtttaatcgaaactttttgccaagacactgccacgccgattattaattgagctgtttcccatccccgtccgactctatgaaccctcagctctgcaaggactgaccgcatcctcgcacatccactcctttgcggaggccaagggcctggatgcggtcaacgaacggatgccgccccgtcgtcctcttttgatgagtgccagcagcagcagcatcaccacggtcacaaggagcagcagcagcagcagcaacaacaacaacaataacagcaacaccagcagcaccacgacgacaaaggacatcagcaacaccagcagtaatgataccgcaaccgtaaccaaaacgagcaggacgactgtgaaatcggccaccaccagtaatgtgcgggcaggattcaccgccaagaagttcccatagggggtgaagcacttgcctgctcaacactgatttctatcattttcgtttcgaccttctgttacccatttaagtttacacctcgttagggtaaggtcagacgtggccataaattaacgcaaactgttgccacattctaatttcgacacaaagttctgataacttctcatatgagatagataaacatgatactaggacactagcttgcgccaatttatttcagtgcctgaccttagctgtagttaaaattttatacaacaactttctctaatgctagtcataaaccaacaaattgcaccctgcgattgctgagctttcgattgcaggtgcatacttatagaatctctccgcaaaaactcccgggcgatattagcaaaaatttataagtgacatgaaaaacagtttaataaaaggtggctacaaatagctaaacaaatgagtgcttgatacttcttttgtctatctagtttttgagaagggaaaaaataaaataacttaaagcagagactatgtgttttaccttggcttgaacggataagtatgggtttaatctaaaaattgctgtacccagctatgtactttaggtgcacttcaacttcacatcgcttgagctctctagtcaagcgtaaaaatcagcacgacccgatgtaataataattaactaaatgcaaacagaggggaatgaacgggtccaaaaagcgcgtcacttgcagtggaagtttccccattccccatattctattccaatttatctgtttgggcataaagatagcccggcggagcagattaagatttacaacgctctgtatgtcgaccatctatcatcaccatccccaatgcttttctattaccacgtttatggtgtacgatttcacgattaatggaaagcgttaagtacactgattatacgacactatttaaactttgctaatatcatttaattatttacttgtaagatgctatgcgaaaccggaaaataacgatttctccgactggcagacctcttattcaccacactcattcatatgcagtcaacagtaaaaaaaactcaattcaaattcaagcaattaaagtttgtctaatttgtatttcttatgcgaacgacttggctttccaagttatacagcctttttgtctgaatacaaagttaactttcatggtttagagaatccgtgaaaagtgcatcgtataaacacagtttaaaacagtatcttggtagcctactatgacattaactgtcaagattaatattgactttgatctcaccc

SEQ ID NO: 1184 - DNA, 2041 bp, DROSOPHILA
tcctcgaaatctccgacagccgccagtggaaacaaacagaaaatgcagtacacaaaaaccagggagcgcatggtcgatgatgttccacttccgcccacccacaagctgaccatgtcggaggtatacgacgatccgaagaccggaaaacccaacttcgacgccctgcgccagcactttctgctggaggggcggatcgaggaggcggtggccctgaggatcatcaccgaaggagccgccctgctgcgcgaggagaagaacatgatcgacgtggaggcacccattaccgtgtgcggtgacatccacgggcagttcttcgatctcgtaaagctcttcgaagtgggcggcccgccggccaccactaggtacctttttctaggcgactacgtggacaggggatacttcagtattgagtgcgttctctacctgtggtccctgaaaataacctaccccaccacgctttccctgctgcgaggaaatcacgagtgcaggcatctcacagagtactttaccttcaagcaggaatgcatcatcaagtattcggaaagtatttacgacgcctgcatggaagcgttcgactgcctgcccctcgccgccctcctcaaccagcagttcctctgtattcacggcggtctgtcgcccgagattttcacactcgacgacatcaagacgctgaatcgcttcagggaaccaccggcctacgggcccatgtgcgacctgctctggtccgatcctctggaggactttggcaacgagaagaccaacgagttcttctcgcacaactcggtgcgcgggtgctcctacttcttcagctactcggcctgctgtgagtttctgcagaagaacaacctgctgtcgatagtcagggcgcacgaggcgcaggatgcggggtatcgcatgtatcggaagaaccaggttacgggcttcccctcgctgatcaccatattctccgcccccaattatctggatgtttacaataacaaggcagctgtgctcaagtacgagaacaacgtgatgaatatccgccagttcaactgctcgccacatccctactggctacccaacttcatggacgtcttcacatggtcgctgcccttcgtgggcgaaaaggtaaccgagatgctagtcaacatcctgaacatttgctcagacgatgaactggtggccggacccgatgacgagctcgaggaagagctacgcaagaaaattgtgctcgtgccggcgaacgcgagcaataataacaataacaataatacgcccagtaagccagcttccatgtcggcgctgcgcaaagagataattcggaataagattcgggccattggcaagatgtcgcgcgtcttctccatcctcagggaggaatccgagagcgtgctccagctgaagggtctgacgcccacgggcgccctgccagtgggcgctttgtccggcggaagggattccctcaaggaggctctgcaaggactgaccgcatcctcgcacatccactcctttgcggaggccaagggcctggatgcggtcaacgaacggatgccgccccgtcgtcctcttttgatgagtgccagcagcagcagcatcaccacggtcacaaggagcagcagcagcagcagcaacaacaacaacaataacagcaacaccagcagcaccacgacgacaaaggacatcagcaacaccagcagtaatgataccgcaaccgtaaccaaaacgagcaggacgactgtgaaatcggccaccaccagtaatgtgcgggcaggattcaccgccaagaagttcccatagggggtgaagcacttgcctgctcaacactgatttctatcattttcgtttcgaccttctgttacccatttaagtttacacctcgttagggtaaggtcagacgtggccataaattaacgcaaactgttgccacattctaatttcgacacaaagttctgataacttctcatatgagatagataaacatgatactaggacactagcttgcgccaatttatttcagtgcctgaccttagctgtagttaaaattttatacaacaactttctc

SEQ ID NO: 1185 - protein, 568 aa, DROSOPHILA
MVDDVPLPPTHKLTMSEVYDDPKTGKPNFDALRQHFLLEGRIEEAVALRIITEGAALLREEKNMIDVEAPITVCGDIHGQFFDLVKLFEVGGPPATTRYLFLGDYVDRGYFSIECVLYLWSLKITYPTTLSLLRGNHECRHLTEYFTFKQECIIKYSESIYDACMEAFDCLPLAALLNQQFLCIHGGLSPEIFTLDDIKTLNRFREPPAYGPMCDLLWSDPLEDFGNEKTNEFFSHNSVRGCSYFFSYSACCEFLQKNNLLSIVRAHEAQDAGYRMYRKNQVTGFPSLITIFSAPNYLDVYNNKAAVLKYENNVMNIRQFNCSPHPYWLPNFMDVFTWSLPFVGEKVTEMLVNILNICSDDELVAGPDDELEEELRKKIVLVPANASNNNNNNNTPSKPASMSALRKEIIRNKIRAIGKMSRVFSILREESESVLQLKGLTPTGALPVGALSGGRDSLKEALQGLTASSHIHSFAEAKGLDAVNERMPPRRPLLMSASSSSITTVTRSSSSSSNNNNNNSNTSSTTTTKDISNTSSNDTATVTKTSRTTVKSATTSNVRAGFTAKKFP

SEQ ID NO: 1186 - DNA, 18085 bp, DROSOPHILA
atgtaaaaacaagtaacgaatgtgttacaaacgttatcgaaaataatttcactatttaaaattcttgttcgggatgttttatcaaagtatttactgttccaaccattttatattaaccttgcctttggtgtatccgttgatagattccgacagtcaaaatgttcattggttcgtgtccaaataaataaatattgtaattaatgtcatttcacttcagtagtgttggataatgttttcttgtttctgtgtatttcgttagttttatcaaaatgtgtgagaaatctttctcaacgttttctgggcaatactaataacttcaaaacggagagatatttagataagatacttagttaatattttttttgcagcgacgtaaatcacaaaaagtatgacccttatttttaatatactaattttcgtatagtctttcttaattacgtatttatgatttttctaaccttggcaaaaaccaactgatttaatgatatttgtattaaattattttaagaagttaacaacaataataataagaagagagtaacccttgtgaccccagataaagtatctgctcgtttttaatccttgtccttgtaaaaatttgtagatgtaatttgaatttaaaagatgtcgtaaaaactttttgatcagataattcatatatttcattttaatttgtagaacagttcctgtttaaaattttagattttgtaaaggaacattaaagcttaccactgaaaagggtaacaagtgctgggatggattgtttcttaaagagattatattcgaaaatgtcttccctggaatcttaaattgccagatttaccattgaagtcactgcattaatatcaggtttgcgaaggaaccactaaatacaataaaattattaagccctcttaagaaaatttttaacagatcaagcatttttaaattgaaaaacaaactatgcacttactttttgaagactccaaggaaaagaataaggaaatttaaggaaacaacattttgttctttttatttgtcaaaattatatcatttaatttacaccaattattctacactatagattggatttaatgggcggaactatataatttatacatacaaatgtatttttctacaacctccattatttttcaagagatatgtaaattcgatttattatggcctcctttagatatacattcaactatgtaaatagtcctttcgcagtgcttctctgctcaaatcgccagtctgttcctagacccacggtgagtagaaacaggaggcgaagaactgttgttttcccggggccacgtgtgctgatgtgccgctggcggaggaaggcgtcatggtgttagcggacgacgcgtaattgtagctcatatgtgcatacgaagatacagccggtgaaatcgggtcggacgaaaacccagaactgtgagcaactccaaagtggctcgcgcttgaacacggagaggggcatgattcttgggctatggtgtgatgtggggtcacattagcgctggcactggacgcggctgagaagcttgaatcagcagcagagctcgacgccatagggggcggtggcaacgcgtaggcagatagcacttcgtatcccgatccgctgcagcttgctcccaaattcgcagattggccactgcctaggccaacgcccgcaggtctgccaccgtcacccggcacgatgtgatggtgagcgggagccatcggagggggtcgtagggtcatgtggcacggatataacgaggaaggggtaagatcgccctgttgcggtattggcgatggcggagccagcggaccgacagctgagtggttaaagctcggaatcggcgtaaccgccctgaaaaataaagccatttaggtattgactttcacatggttatagactatgagatatacatataagtattaatgtacctatgcatacctagtgagtttgatattttagaggctagaggttattagcaataaaaaaaagagagactcattacttaaatagtgggagtgcgagggtgaagcttcagaatttttttggcatttagataaaaatttgaaagaaaaggaataaaatgaaaaaataatatgttttaaaaagtgagcggctcacttttttacatttttaaactgcgtgccttgtctatgcctaccatcttttatagattccgtgatatcgtgaataccgacgtacattgctaatccttgctcgatctaagcaaggatatataaactatatacggttcaaaactcttcctaattgagtggagctttagaagtaaaagttcttaatgtgacttaagtccatatcaacgaactaatacagattcaatttctaattcctaatatataatgacaaatgtatcagtcagtatgttgacatatctcttgtgttgttttcttttgagtttttattctaccgtctaaatatattaccagcaatagcatcaacgagttttttcagtattatgcaagctaatatactgtataagtgggatgactgaaaaatttgaaaactgtagttgctgaatatgcttacccatatgaatcgctcatggataacgccgtatgatgcatgttggagtacatcgcgccgaaactaccactattaaaattgagtcgtggcgaaatggcaggaacaagtgcatgaccttgggcgtgaccattgctctggatatgatgagtattttgatgcccgccaacgccaagtgggcatggagaacaaactcttctgcaatcttcactttgacgaccattgtcattgtcagaggtgcagctaggccgaatgtgcgggattggtgttgggctttcagagctatcgatcccagcgccaagcgttggagcattgacattagtagacaatgtgcttggagacgataagccattaatggtacctaaatatggaataggaaaattaatttatctatctgcattttacggtcattcttaaattgccgtcacacatttaaaatcagatgtcatacttagtacaataaattatagattattcaagaactggcagagggcttggttttgtaaatagatctgacgaataattttaagcatataaagccagttcaaattaaaaacgagagcgaatgctatgctgtttgcggcaaatatttggaatctgcttaaagcgagcatttgtattattgtattattattattgtattattcgatcagttatgcataaattaaacctcgacacaacgaaaagcgcaccaagttgggttaaccaaacccaaaaacctcgtatgccgaacgtaggatctcaattaagattactatctatactccgggaagcaacaaagagaacttggcgccctctatcgtcgatttctctgcaagatatggaacgccaacccaagcagcttgtacgccctggaatggatgtggcaacgttctgaaacaatctggctcacctttagcgttactgaaatactcaatcctcctccagtcccaccgatcccagctacaaaacaaatgacgcaaaaagcctaacacctttagagagcttttgagcaaaatccttacaacacggataacaatatgattacttactcctgccgagcacattcatggatcattccagaatacctaaatttgacctcatcgaggaaatctacaaacaaatatttaatcttttcatttaaacgccacacttggaataaaacaataaaagaccagaaaactggatgtgcctaaaaatataaataagagctctcgacggcataaagccttttgcaaatatcactggtaataatggggcagcggcagtaacagaaacatagatctgattcagagggcagagttaaaagtgccaaaaactaaatatatatagccgcaacattctgatgcagtgatgaattgcaaattgccgaagccctcgaatctttaaccagcaaccttacccgcctaagaataaatgattaaccggccacagaaccaattgatgtgtcaaaaactttggatttaaaatataatacctaatgcacggttaaaaatgtataagcaaaatactcccgagaaaagagtcaacatcaatttgttgtggattgattaagactaacaacaaaaggaagttgttttaaataatatttatagcgtaaactatatagcaaactgtataaaaatattttatgcaatgtaacgaccatgttgtaatctctttcataagagcgactttgaagagtgtcacgacaaggtcctttgatttcaaaattatttatacttactgactgagggacccccagctgatccggacagcagcgaggaacaagcacttaggctgttagggctgtcagtcaaagaggcggttgccgatgtagaggaagaagttgcactagctcctgtggaatttggtgttcttcgctggtttcgcagcttctcctcgcgacgccattttgctcgacggtttgagaaccaaacctgaattcttgcctctggcaacccaatctttccagccaaacgttcgcgggcaaaaacatctggatagtgtgttcgttcaaactctaaaataaatattttaataattatgaaaggtatacttagtattagtttttacagtgtaatatttaggtttttataattttaattaaggcacaaggcaatccaaaagtgtaatgccctaacaaaaaattaatagaagagtaaccgttacctttaatttgttataaataaaaatttatggtggtaaggtttccatagtatataatcgtttgatacgcacacgaacaaatccgtatattagaaatgtgtgtaattgttttgaatattaaggcgtacagctagaattttgatatatgcaatgttttataaacctacaatttttaataattggtggattattgctaaacgtttttacctttttcaagactgtctatctggtcgttcgtgaaagatgttcgattgcgttgcaactttctttttagtatgagccgagcttgatcatcctcagtgtttcctatatttgaagcgccaccattggagttttcaccttcaccggagcccgtttcatcggactgatgaccatcaagttctggcaaaatacagttttaaagtgtaaacaacataaccaattcgtcggttgaaatttcaaatttccatgcaccatgccgaagataacataccaatgcagaattatacatattaaagaaaattcatgtgtatacactttatgatcgaaagcatcgaacgtcgagatctcagaaactataaaagctagaaggttgagattcagcatacagattctagagacccgtatttgttgacccacgcccacaattcgcacaaaactgtcacgcccacacttttgcaaattgctttgatattttttcataattttattagacgtgtaaatttctatcgattttgcaacgccccaaaaccgcccaaatctgccacgcccacacttttgaacaatttttaaattttttctcattttatttcccaatatctgtcgatatcccagaaaaattatgaaatttctcgatcgcattcacactagctgagtaacgggtatctgatagccagggaactatactatcgcattctctcttgttttaatttcaaatagggaattaaaagaattaaacaaatatttcattaatatgagtgcattgaaataagataacgaactttgttttctctcctttgaacatgttttaatattgtcttacaatattttatatatattatatatgcagttattaataaatattataaagttacacttcaaatttataatttaatctgctatttagtagtatagttgttcttctatagttgggataacatgcagctggacgacctgcatcagcggccacattaaagaaaaatgcaaatcatttgtatgtcagctgaggtcagcttggaccggtagacgaaagccgttccacattgtggaaatgacgttgattgttagtgaatgtgacaaagcaaatagatggtgatagcccaaagatatgccgcgggatagacatagactccgtccagagcctttaaagcacatgtcactagctggcaaatcgcaatgttctgacagcggcaacagcgttacaatgacagacggcgtcagatgccgagcaacaaaatcgacgctatctgaacacagagactaggtctgccgagatggtgagttggaggtggaatcgaatacggagattgaaccggaggaagggacgggctgcgaaactgtcacatttttatgcgctaagacaaaccctgataaggtcagagctctagcatggggatttgaaaaataattttataaatatgtatttctgtaatctatttatgcacccctaagactcccagcatccaatctagcatccaaccattctaggcctgtccgtgaacccatccctaaccacaaccaccctcacggtttgtcgtttaatgaagtgtcatcgcctgtaaaatgagtctctaaatcgcattaaagcaaactacacggttaagggtaaacctgtcaaccacggcggtggtaacggcagtggttgccccacagctatgctcgatcaaaagtggaagctttgggaagtggttcgggggaggtcgagcattgactgttttgacacacatgctcttgggcaagctttgggcgagaatatgtactgttattgaaatgatacctgtttagccaatttactagtaccacatcgagattcaattatatatgcactgacctgattgacctgaataaaaaaaacaagtatcaatgttttcgtcagttttaaatgtatttaatttgatttaaatatgaatacattcactcaagcaaaaacacctctttatgaaggaaaaactctattgttgataccaccttaaacatacaaaacatctgatatcatcttttctgacaaaaaacaatatggcactgactgtaaaagctggaaagctcagacctaaaacgcagactctattgaccgcagcgcagaataaatttaaggtttgcttagcctctatgcggtcaaatgtcgtcaatgcttaaaaaatatttcgtttggctataggaattggtttaaatcggacttttagaatcctaataatcctaatactacatgctctttacaacactcatcgcagtaacgggtatttaataatcgcagtactcggctttagcgttctcttatgtttctttgtgaaatccttataagacttgcggtgttgacacaatcagaacaagtgtattgctcgttggtcacgtgtctgtcggatttacgcacgacgcgacaaccttttggtgtagctgtagacttttataactgaaaaaaataaaaaacggcctatcagcaaacgaaaatttgcaaatgccaagttcgctcgtgcgtaatttgacaaaaattatttcgtgatatctgtgatgattgcgaaattgcaagtcgagaagatacggctgtgatatatgttttatgtttttccgctttttatttcaaatgatttttttaatttctttgcttcggtgcctgtcactaatgaccaaaatatttaggcaagtaaaacaccacaacaaccattttattgatcggcgacatatataggacaatttaattatgtatatttatatatgaatcggctcttcggaacgaatatgttatgtaacaattgcattaaggcacacgaaattttagaattccaggttttcacctcacctttttttaaatgtatgtcctccgttgcaacggggcagtttctctggtgaccgatactggccaggctttcgatgtcgttgggtggactcagtgagtgagcaagtgaaggtcctgatgcatacgccgtaacggatgcgatattgggagccgatgagatgggtatttcgctaagagaggtggggtaccaagatccggaatagtgacggggcggccagctctgctgttgatgctgctgtagtgcctgatggttaccgtgcaccagctgggggtggctggatcgggttcctaggtggttgggtgattgacctaccaagggcgctgctctggcaggctccagtggtcctggtcctgcagcgtgctgagtatttaacagccgaagcttctcgtaaatcgcctcctgttcactaccctccccggagttgcttgcgccaccgctttccgaagagttaagaggagtggctgtctgcataagatcggtggaagagctcaacgtgcctctcgatccgcttgccacattgctcacgttgccaccgatgctgacagacacttttgcgctgattgagttgccggcggatgtgctggagctcccggatcccgtgctttgctgctccttttgcgcagccaagtttctcaatacacggtttattgaggacacctagaacgtaaagttgtgttgatatagttagcgctgtaaatttactaatggcattgtgattcgtaaagaattctaaatcggcaaggcaagtaaaatctaacatcaaaaagcaaattttctgctacttctggtagcactcagaaaagacgcacgtttgtttgctttgaattgcaatttattcagtttcttattgtattaatgctgtgcctgcgcttgacaacgcttttcaaccgaattcaaaaggaaagaaggaaagaaaacgaaaaagaataaccgggcaaacatataaatgagcgagtgagcgaggatgaacaacagagaaaagtgcatttgagtggaaaaattaggcggaatgtcctttgccagggggccacacagaaactcatttcttctaaaataagcacatccggttcctaactagtgtacaggcaggcgcactcgaccaatccggcaccagttcccgctttcctggattgcattcgtttcctttggggacaacaagtgcatgcgcaagctgtacgccaaaggatacctttagtatgtgcaatcatcgaaagtatcacaagcttagtcgcatgtaagaggtcagtgcgtagatattttccgcattgtacccgacggccatcgtgtggacttgaacccgagtggtcgattctcacccttagttcagaaccgacccgaatacgatttcagatgtaaacgtgattcagcagttccccctagcactggcgcgtgaatttcaacgcttaacggtttgtggtggcggcgggccgtatttatttaatattgtattttttcatacatttttctagcactgatttcccttttagtcgtttaatgtgcataaaagattttcccttccatttgaacgagcacattttccacacaactgtcaataggagtagaacaaggcgagcaggcagggccacatcggccatggggcggctattggcatgagcatcgctgtcacaattcatttggctggcatcttttttggcatacttaataaataatatgataaaaaaaaaggaaaggaaaggaaaatgttgatgcgtggctaagaaaatggctgcgtcgaatagagacaaaaagagtcgcacgcaactgcaataatttgattcgggtggcgtaactaagtatttaaacaaaatgaatgctttcttattcagaactgagtgacttacacttggtatattatcgttagtacaaacgttctcctgaagtaatctatcccgaatttcccaagcaaatatgctaggacactcgcgtttgtactgcgaaattttgctaacgacttcggctgtggccacacgtggcttggatcctccgatagcacgtggtcgtatgcttcctgtttcataatacctaaaaataaatccatcattataatttttatttcaacaaataaacttgatatataatgaaacattaagttcctttgcaatttgcaatctacttggtatatattcgtaggaaagctggaagtagatcttacgtctagcgaaggcatgctatctgtttaatattattagtccttgcccatttaattcttggactccagacaataagatgtagaatcttctgaatggtgcgtcgggtgtttttttagttctgataaataggccccatcctatactcagtctttgcttcggacatgcctactcacacaccagtcacaggagtagagaaagaaaatgtccccatagccacctaagctgacgatgctactgtgcgaaaaacacaagtataatgtctgctcccttggtctaataactggatgaatgggctgagaaccggaactggagctgaaaagtgtgccaatgtgacaggtagttgtccgggtatctgccttaatggtaaaacgatccacaaccaccaggcgaataaataccttggtataaccctctataggaaggtagctcgaatggcctggcttattgctccacacaacaaactgtcgcttgactgcaagtccacattggccccagcctgttctacgggattcagatatactcgcacgccattgctgcaaaaagtcgcctaaataagatccgggctctacagacgaagaccctaagaagaatttctcgaacgcgatctcaagacccccaaactcggagagaagctccagaacatccccgaaaaatatatggaacgacttaatgcgcacccaaacagcctggccagtcagtgcagaactatcagtgctgcccctcgaactagagtcaaaaggagacttaagcgccaccaccaccgtgaccaccccgactgggtttcggcatggtaggacatcaataattaaaaaaaactaaaattgcaaaaattaaatgttgcacattaaaaacctagaatttacaatcataatcggttagaattcaccctaggataaaaactataaggataaaacttcgtctagtcttaacgtaacaagcccacaataaaaactgaaataatttaagaagatcagttttagttgccgcatacataggtatcagtgtcttgatcaacaatagcttcattatattgttaaaataaattataatcttaaatttaataaataaatttataatcttcgagagcttaagcttatgaccaatatttttgcgttgttgtacttcttagagagagtatgactagttagaacatttttgagaaatagtagaaaataaaatctaaacaatatgaatgtttaaaccctgtacaccattgtctacaccaagacatatcattttcaaaacgtattaagaattaagaaatatacggaaatggtcctacctcccgagaattttgctcacacatccatttgatacttgcagaattcgagaaatatcacatggccgagctccagaatgtgccagttcgacaattttttgccgtgttgaatctggcaaaggccttcctccaacaaaaacgccacccagctgatttactccactgtgacctgcaatcaaagcagaataaaaagtatagaaataaatacgctctcttttactatcggtgttatatctaagttgaatagttgctgtttcatttttcatcatacattttactatttttgctcacacgcactacgcactaggatgcatgactatgtgtgttcacttccatacacacacacaagattgcgccaatgaggcggataatttagtttgtcacgctttaaaagacgtcaaaatatattcgtcgacccaaattcgagatggatattctgaaggggagaacaacttcgttggtatctgtctttgtgcctttgcgtcgggacttagcatctcaatttgtatacaatgaccgttcctggttagtctcaacaatttagtaacaataagcacacacccttgcacccatgatacactgaaatagtactgtaccttaaaaataactaaaataaaaataaaaagtttgactaagttttgctgcattttaatacatttattttactctggacaataagtcatcttgtagattttcttgatattttaagggacaaatatgtcatgtattcgtcaaccaattcgaaagttcgaaaaagttccaaccattttattgttttcgattccaaagatagcaaacatctttaatgtgtatttaataaaagtacgaagaagagcacaaagggaaaagctaaaaggctaaatgggcacactcgtcgctcaggtcgagcataaaaatggaagggttttatacaaatttccgagtatttggacttatagaaataaaatcctaaagtctccgtatcaatttaccgctttattggaaagaaaatcatcggagcagcagaaaaacatagatacatgtacatacatacttatacgttcatatacttatacccgttactcatagaataaaagggtatactagattcgttgaacagtatgtaacagcaaaaataaaatataaccgagtcaagttagcgatgtccgtccgtccgtatgaacgccccgatctcggtgagtatgaaagctagagatgtgacatacatattagtccttggcattttccgtgtacacgattgtggccaaatattcccacaatatttacggatgtcacggtaacttaaacacacaaaaaaaacatacagatgcaagagaactttgcgacgaccactctaatgcccactcttatattttcctattttttcgttttattattagttttgcatatttatatcggtttaacaaaatcgttttgttttgaaatttcttgttagctgaagcagcaaagtagcgggtatctgatagtcgagaatttcgactattgctattccttgtcttaatccgttcatgtaagccatcatctgacttagttataatccaaatgatctttctgtattcagaatcaaagcggaaaacctctggcgagcccttttaccttgatttcaaacaagttaagattcctacacagataattccaaacactgtgttttggattcaattgagcgccccaacaagtcatctttaacgtgagatcggcctgaacacgttcatattattcaggaaagcggccatggcgagagtatttgcggtattagtgcagggactccgaaattggattgcttttcaaaaatgtgatttgcagtgtgacaggatacacaatttacaaaaacatcttgccagtgggattaataatgtaattgctgcacaaatccgatgggaagaaagacaaagccctggaaacgggaactggagatggaccctctaggggactggtccatccattcaggggcagggactgattttcctcgcatgcgaaaatggacagaacagcggggtgagtctacaaagaccacggatacaatgccaatatgcgtcggttcccggcagccgctaaagaggctcatttggcatttttgagtgcattgtgtgtgtttgtatttactcgacttcggctttcagagccattaattgtttccatttgtagcgactttacacgaaacggtcgtcgacaacgaacacacacttcaagatcattaaagctggaaaattattgtattgattcacgggcactacaatagggtgacctgacagagagtacttaacagctcgacgggcccgggatgaggttacgtttagaaaagggatttgaggaatgcctataatctactccgcaattcgtaaattattgtttgactcatcaccgtcttgaaagtctatgccgatcccaattgtcaccgatgatcacctctacccattgtgccactataattggcagcatgtgcgagatttggagtcagctactgaacaatgccattccattcagctgtatgctttgggcttacccagacattgagctgttttcacaccaataacaaatcttcgtgacacatgtttagcaatacaaaaaaattagcgcgatgtcttcatacaagtattttgaaatgtttccttaatcttctcgggtcgagctatgaaataggtatacctagtgattttgcagtggaaaattataataaattggaaatactataattattcacctcatcctatatcagtaaaagagctgttctttaagtcttaatataactggataaaacatttaggttttttagtttccgatatctaatcgcgtatacggacgaacattctgatcaagaatgtaaatactttattggttcggaaaatccaccttcttcgtgttacacactttttctctaaaagtgaattgtatatctataaactaaggttcgtcgtacggtaaaaccatttctgttgttattaaaaagcttttgataatataacgaataacaagctcttaatttataatacttgcggtgtattaatagatgttagaaataaataaagtgaactatgaatacaaaaatgtccttggacattttctgaacgccaaactactctcggtaatgtttttagaaacagaacaccaaagtcgatttgaagtttatagtagcccccaacatagggcagaatcaaaatacatatctgttatctatcctaactggtatttagtgcaagaaactgcgattacacactaaatttgcaaagcttatggatcggttagactcaataaaatctattaatggtgtattcatatttagtttatgtaaagacggtctgtgtgtataaattttaatctattggtgaatgtgatataatagtattataatcggggctatctgaaatcgagtgaaagcgggaggggtttagctatgcgttatttattaaaacgtacattcatcatcggttaaatggtagtaagttgtggcgaagtatgaagatgtcgaatggggatgtgacgctgtgctggcttccacggcttccatagtaggggaaggtttcccagcaataccgcctagtccgctaccaccagcggtacccaaacagggtaaatttctcattgcaatcacattgtctataaaaaagaaaatcaaaggagtaaaattcgtatcaagaagtcagtttgtacttggaattcatttataataatagtggaatagatctttaaatttgaaccaactttgaacttgcttaagtgtttataaaaatgtaacatattttaagtactagtacttgtagagtaaaagggtatactagattcgttcaaaagtgtgtaacaggtagaaggaagcgtttcgaccacataaagtatatatatttttgatcaggatcaaagctaagtcattctggccatgtccgtccgtatgaacgtccagatctcatacagaggcatacagaatacagaatacccactcaaacgcactaaaaccgccctaaactgccacacccacactttcaaaccatttttaaatattttctcattttattcccgcatatatatttgcattccgtttgcattcccactagcgaagtgaagggtatctgatagtcggaactcgactaaagcattctcttttgttttatttattctctttgtaatctatctataatctgaaatctactgcaaaagttgccgaacactctgcagattttttgtcctagtctctaaagaacatgcattattaaacactctgaattcgggaactaaaatactgcaaattttaaattagacctgtgtttgatcgagaaactctactataacattttctcttatttcagttaagaagttgagccagattgcataggaattagaattatttcattacattgttagttacatattttcttacatatatcagttatatgtattaattaaattcggtatactctactttttttggcaatataaaatttcaggtcatagttcgattcgaattattttttgtaatatattatacctgcaacgaattgaaaaatcaggattacctaattgttttaattaaactgaaacccaaaaacataagctatgtatttgggttatcattttattgcgagataaaagtgcaaaaaaatgtattaaaagtaatcaaactaatttcgatttcagcagtaagccgcatagttttaaaccttgcaggaaaagacttcgcaacttgcgtgcagaaggtagtcgtgaagaatacaaacggataaatcatagctaggtatacaaccaaatggttaaagaattcaactagaatatcacttttgacctaagctattacttaaaagaactagtttaaaaagttcccagtatgaacgaatatataccatagactacttgggccgtttatggggcttttagaaggaggcgcttaatctttttcagttagcgttatgagctaaaacaggagaaagagagctatagtccggtttattgactatcaaatacccgtaattgggctgcatgtgtgaacgagaaattgcaatcttttggctcttatagttcctaagaactcgacgtccatgcagacggacatggctagacggacatggctagattgaccgattgaccatgatcaagaatatatatactttaaatttaaaaaatctaataaccctttaatctatgagtaacgagtatacaaatttgtataaaacgaaagagtcagctagtatgaagtactcaataatcatatacgcgcgggatagcatgagatacgcccgtaggaacgccattgatcattaaacgcctttgcgttgtaatttacaatgtgagtgagtgacaatggtttaatataaaattaagctgcgtatgcattactggaatttgcataattcctacttatttcgcttccaaaggtctcgacgtcaatactgacggacagacatgccaacggtcatcggaaaatcgactagccgggaactcttccttccactaactactttaaatacaaattagcaacaagctacgggtataatacaaatataggtttttcgaattataagagtcacggcgaagatttgaatatctttgatttggacaatttatacggagtataaagccgtcttactctcgggagtttgagtttgagagaagagttcgcaaacgattcagttcagaagctttttatctattggtaaactgcgccaaaagagaccaacagccgaacgaaactgcactcgcctagtaggaccggatcaactgcccatgggcagcattaacatatgtgttggctaagactcatatatatttataagagggtcggataaagacgatgatgccaatcaagaaatttaaaaaattcacttacccttgtgagccatgtcttctaaagacggcaggcgctctatcaatgttcccgctgaccatgggggaaccacggtgcctatagcagttggagttggttgcaatgtaaacatagttggatctcagtttttattacatgcactgctcatgaaagctttagccaagagactgctgtgttcagccaaacgcacgccgtgcgaactcttgcagggcgagtcaagcaagagttaagagtaaatttgcgcagatggtgagaatgacgtcctgcagtgatcaaaaaacctattgttgatcgcgccgtgaggacctaagagttacgaattcggaaacacaaatataactgagcagccgcttttgttttagttcacttgttcatttttcgaacgccacttttgattgcactcatgttagcatcatatttgtactgcacgtaacacgtattattcccgggtctaccgattgctaacttagccggtaatttcatttgatataaagattaatacgcacggtgaatcgaacaacctttcttaaacttcgcgacacggcggcggaacagtatttaccttagaagcgcaacacgaaataataatgtcacgacctgcctacccggatccgtttcagaaacagactaggccgaccctcggctggccagcacccccctgcgcaaaaggctgggtttgttgccacggaaccgcgtgcgattggcaaagaccagcatggctggtccactcaccaccatttgctataggctagccccatgattggttgttgaagcacaccagttgtccctctcgcacccgtgtaaggttagttggcggaagatgaaagcgattcggcacggtgcagttctgcagctgcgttgtgtcgttaagcatatcgtggcaacggaatctgaaaataaaggaagaaccaactctagacggaccagcagcacataatggaatggtttggtcctgaacagacatgaaagtgctggtctggaactggatgttgttccttccagcaagaaactgtgtgtaaacggtgcagcgcctgccgctttcaccgcctttcgagaagtcgcccagtgccacaccccccccccccccagcaattacacacatgttgcattccatttgaattcaagctggccagacaagttgccagcagcacactcgtccaatggaattgtttcattccgatacaataagcgcttcacatt

SEQ ID NO: 1187 - DNA, 2844 bp, DROSOPHILA
ttcgcacggcgtgcgtttggctgaacacagcagtctcttggctaaagctttcatgagcagtgcatgtaataaaaactgagatccaactatgtttacattgcaaccaactccaactgctataggcaccgtggttcccccatggtcagcgggaacattgatagagcgcctgccgtctttagaagacatggctcacaagggtcacagtggagtaaatcagctgggtggcgtttttgttggaggaaggcctttgccagattcaacacggcaaaaaattgtcgaactggcacattctggagctcggccatgtgatatttctcgaattctgcaagtatcaaatggatgtgtgagcaaaattctcgggaggtattatgaaacaggaagcatacgaccacgtgctatcggaggatccaagccacgtgtggccacagccgaagtcgttagcaaaatttcgcagtacaaacgcgagtgtcctagcatatttgcttgggaaattcgggatagattacttcaggagaacgtttgtactaacgataatataccaagtgtgtcctcaataaaccgtgtattgagaaacttggctgcgcaaaaggagcagcaaagcacgggatccgggagctccagcacatccgccggcaactcaatcagcgcaaaagtgtctgtcagcatcggtggcaacgtgagcaatgtggcaagcggatcgagaggcacgttgagctcttccaccgatcttatgcagacagccactcctcttaactcttcggaaagcggtggcgcaagcaactccggggagggtagtgaacaggaggcgatttacgagaagcttcggctgttaaatactcagcacgctgcaggaccaggaccactggagcctgccagagcagcgcccttggtaggtcaatcacccaaccacctaggaacccgatccagccacccccagctggtgcacggtaaccatcaggcactacagcagcatcaacagcagagctggccgccccgtcactattccggatcttggtaccccacctctcttagcgaaatacccatctcatcggctcccaatatcgcatccgttacggcgtatgcatcaggaccttcacttgctcactcactgagtccacccaacgacatcgaaagcctggccagtatcggtcaccagagaaactgccccgttgcaacggaggacatacatttaaaaaaagaacttgatggtcatcagtccgatgaaacgggctccggtgaaggtgaaaactccaatggtggcgcttcaaatataggaaacactgaggatgatcaagctcggctcatactaaaaagaaagttgcaacgcaatcgaacatctttcacgaacgaccagatagacagtcttgaaaaagagtttgaacgaacacactatccagatgtttttgcccgcgaacgtttggctggaaagattgggttgccagaggcaagaattcaggtttggttctcaaaccgtcgagcaaaatggcgtcgcgaggagaagctgcgaaaccagcgaagaacaccaaattccacaggagctagtgcaacttcttcctctacatcggcaaccgcctctttgactgacagccctaacagcctaagtgcttgttcctcgctgctgtccggatcagctgggggtccctcagtcagtaccattaatggcttatcgtctccaagcacattgtctactaatgtcaatgctccaacgcttggcgctgggatcgatagctctgaaagcccaacaccaatcccgcacattcggcctagctgcacctctgacaatgacaatggtcgtcaaagtgaagattgcagaagagtttgttctccatgcccacttggcgttggcgggcatcaaaatactcatcatatccagagcaatggtcacgcccaaggtcatgcacttgttcctgccatttcgccacgactcaattttaatagtggtagtttcggcgcgatgtactccaacatgcatcatacggcgttatccatgagcgattcatatggggcggttacgccgattccgagctttaaccactcagctgtcggtccgctggctccgccatcgccaataccgcaacagggcgatcttaccccttcctcgttatatccgtgccacatgaccctacgaccccctccgatggctcccgctcaccatcacatcgtgccgggtgacggtggcagacctgcgggcgttggcctaggcagtggccaatctgcgaatttgggagcaagctgcagcggatcgggatacgaagtgctatctgcctacgcgttgccaccgccccctatggcgtcgagctctgctgctgattcaagcttctcagccgcgtccagtgccagcgctaatgtgaccccacatcacaccatagcccaagaatcatgcccctctccgtgttcaagcgcgagccactttggagttgctcacagttctgggttttcgtccgacccgatttcaccggctgtatcttcgtatgcacatatgagctacaattacgcgtcgtccgctaacaccatgacgccttcctccgccagcggcacatcagcacacgtggccccgggaaaacaacagttcttcgcctcctgtttctactcaccgtgggtctaggaacagactggcgatttgagcagagaagcactgcgaaaggactatttacatagttgaatgtatatctaaaggaggccataataaatcgaatttacatatctcttgaaaaataatggaggttgtagaaaaatacatttgtatgtataaattatatagttccgcccattaaatccaatctatagtgtagaataattggtgtaaattaaatgatataattttgacaaataaaaagaacaaaa

SEQ ID NO: 1188 - protein, 838 aa, DROSOPHILA
MFTLQPTPTAIGTVVPPWSAGTLIERLPSLEDMAHKGHSGVNQLGGVFVGGRPLPDSTRQKIVELAHSGARPCDISRILQVSNGCVSKILGRYYETGSIRPRAIGGSKPRVATAEVVSKISQYKRECPSIFAWEIRDRLLQENVCTNDNIPSVSSINRVLRNLAAQKEQQSTGSGSSSTSAGNSISAKVSVSIGGNVSNVASGSRGTLSSSTDLMQTATPLNSSESGGASNSGEGSEQEAIYEKLRLLNTQHAAGPGPLEPARAAPLVGQSPNHLGTRSSHPQLVHGNHQALQQHQQQSWPPRHYSGSWYPTSLSEIPISSAPNIASVTAYASGPSLAHSLSPPNDIESLASIGHQRNCPVATEDIHLKKELDGHQSDETGSGEGENSNGGASNIGNTEDDQARLILKRKLQRNRTSFTNDQIDSLEKEFERTHYPDVFARERLAGKIGLPEARIQVWFSNRRAKWRREEKLRNQRRTPNSTGASATSSSTSATASLTDSPNSLSACSSLLSGSAGGPSVSTINGLSSPSTLSTNVNAPTLGAGIDSSESPTPIPHIRPSCTSDNDNGRQSEDCRRVCSPCPLGVGGHQNTHHIQSNGHAQGHALVPAISPRLNFNSGSFGAMYSNMHHTALSMSDSYGAVTPIPSFNHSAVGPLAPPSPIPQQGDLTPSSLYPCHMTLRPPPMAPAHHHIVPGDGGRPAGVGLGSGQSANLGASCSGSGYEVLSAYALPPPPMASSSAADSSFSAASSASANVTPHHTIAQESCPSPCSSASHFGVAHSSGFSSDPISPAVSSYAHMSYNYASSANTMTPSSASGTSAHVAPGKQQFFASCFYSPWV

SEQ ID NO: 1189 - DNA, 4945 bp, DROSOPHILA
attatttacattatatttttttttgtcattttaagcgacttcggtgaagaatttaaaatgcaaactgtttttgctatacgattattatgatttagagatgatttgcatttcattttgtactaatatttattgcatatatttaattatgtttacacgactaaaaactaaactatcgaaagcaaatcaaacgaaacttaaccaaatcatggatttccacacactgctgtttgtgctgcgataaaaacgaaacaacaaagcaaaatacactgagaaaaaacacacacacaaatctgttccaaatagcggagaacctagtatcgtagccttaaaaagaaaagtaaaaaagaaagcaaacaaagcaaactaaactaaatcgaaaatgtgaacgaaacatactcacgtgcttctcctaaagtatttatccaatcaagacgtttaatctttttgttatggcatttcctcagagcactttaaaaatgaaaatactaaacaaaacccaaggcaggcgaatgataatgataaaccattttttaatccaccaaatgcgagtttttaaaacaatgttaatatggcaaaaccaactgaatgagtgcttcgatattatgcggtataaataatgaaagtgttaggacttggactctaataatgtattattaaatataaataataaattatattgtaatgaaacgtgaacatacacaactaaatttaacattaaagatgtgtaaagcaaaaacaaaggactcttcatttattttcgaatgggaactagtttttaatcataaaaacagggaatcctctaactgctgccctacatttgaaatgtataagttagcttggaactactgtatttgcatttcatatgaataatagacttctagtgaaattaatattgcttattgtttttttttttttcaaattgaactatttgtatttaacggtttttcggctttcaaaagtgacagctttcgatatcgataacgcgcgtagctatcgagcgcgctgccatcgctaggcaagtgacgtggaacgtgtggcaacttttgatttgatgcaaatgcaatgcgagtagagtgcgttgttgttgaaagtgacgacggatcggaagcgtagctaaaatgttggactttgtggtgatattcaccaagggcggagtggtgctgtggcactcgaacgcgtccggtaacagtttcgcctcctgcatcaacagcctgatacgtggcgtcattctggaggtaagtgcatgcacggatttggttgtgaatgcaccaatggacactaatgtgcttttgtgcggctgcaggagcgcaacacagaggccaagtactacgaggaggaccacctggccgtgcagtttaagctggacaacgaactggacctggtctatgcggccattttccagaaggtgatcaaactgaactacctagatggattcctggccgacatgcaggcggccttcaaggaaaagtacggcgacatacgtctgggcgatgactacgacttcgatcgcgaatatcgacgcgtgctcagcgccgcggaggaggcgtccgccaagcaagtgaaagcacctaaaaccatgcgctcctacaacgagtcacagaaatcgaaaaagaccgtcgcctcgatgatacaggacgacaagaagccggtggagaagcgggtgaacatccaggaggccccgccaccatccaaatcacagccgtcgtcgccaccgacgggctccccaatggacaagatcatcatggagaaacggcgcaagctgcgcgaaaagctcacgcccaccaagaagacctcgcccagtgattccaagtccagcaagcccgagaaggccggcaagaagccacgcgtctgggatctgggcggtaattccaaggatgccgctctgctcgatcgctccagggattcgcccgatgatgtgcagtaccagaacatcaacagcgaggtgagtactaactttcactttccccgaacgcgactcgcattcaaagtgaaatcacgaactcattattatcatttttcatactcgcagctggtgggcacaatgcagggcgtcatccgcgacttggatgtggagagcgaggacgaggctgacaacgaggatgcatcctctgagggggaggccgaggagcaggtgcagtcaaagaagggcaagcgcggtggcctgctatcctacttcaagggcattgtaggcgccaagaccatgtcgctggcagatttgcagccggcgctggagaagatgcgcgaccatctgatatcgaagaacgtggcctctgagatagcagctaagctgtgcgactcggtggccgccagtttggatggcaagcaaatgggcacattcgacagcatcgccagccaggtgaaggaggcgctcacggaatcgctggtgaggatactatcgcccaaacggcgcatcgacatcatacgcgatgccctcgaatcgaagcgcaacggccgcccgtacacgataatcttctgcggtgtcaatggtgtcggcaagtccaccaatttggccaagatctgcttttggctgatcgagaacgatttcaacgttctgatcgccgcctgcgatacgttccgagccggtgccgtcgagcagttgcgcacacacacacgccatctgaacgcactgcatccggcggccaagcacgatggacgcaacatggtgcagttgtacgagaagggttacggcaaggatgccgccggcattgccatggaggccatcaagtttgcccacgatacgcgagtggatgtggtgcttgtggacaccgccggacgcatgcaggataacgagccgctgatgcgttccctgtccaagctaatcaaagtgaacaatccggatctggtgctattcgtgggcgaggcactggtgggcaacgaagccgtcgaccagctggtcaagttcaatcagtcgctggccgactactcatccaacgagaacccgcacatcatcgacggcatagtgttgaccaagttcgataccatcgatgacaaggtgggcgccgccatctccatgacctacataaccggccagccaattgtgttcgtgggcacgggtcagacgtatgccgacctaaaggccatcaatgtgaacgccgtggtcaattccctgatgaagtaagccagccgtcgatccggctatccttccaatgctccttgtttgcatccactcttttcaccgaatcaaatatatggcttttgtctagtttgttgttgcgtaaatggaatgctttgcccactgttggctgttggttcgtttaggattaaggatcgcttggcacttcgattacaagttgttttgtttttttttatttttttattaatgtttataactttatgcgtacaaagaagagtttagtgtgttgggggaaaaaatggggcgggagtagtgtgtatgaattaatataatctatttgtagaactcgtgctcctgctcgtccttcttgatattgttcttgtagcccttctcgaagtccttggccaaaacgatgtagcgattctcacgcaccgcgtgcatgcccgcctcttggcaaatggcgttgatatcggcaccggagatcttgtccggccgcgccacaaactcctccaaatcgacatcctcgcttaggttcatcttcgaggtgatggtggagaagacgagtcgcttctgccggcgatcgggcagcgggaactcaatcttacgatccaatcgaccaggtcgcagcaatgccggatcgagtgtgtccgccctgttggtagccatgatcaccttaacgttcgtggtctgatcgaacccgtccatctggttgagcagctcgagcagaatgcgctgcacctcgcgatcggcgccagtctgcgcatcgaaacgcttcgtggcaatcgcatcgatctcgtcaatgaagatgatggccggcgcgttctccttggccagcctgaaaacgtcgcgcaccatgcgcggtccctcgccgaggtacttctgcacgaactccgagccgacgacgcgtatgaacgacgccgtcgtatgatgggccaccgccttggccaacatggtcttgccgcaaccgggcggaccgtacataagcacgccgcgcggcggatcgatgccaatctgcttgtacagctcgaagtgggtcagcggcagttcgactgcctcgcggatctcctgcttctgcatgtccatgccaccaatgtccgcatagctaacgtcgggcttctcatccggctgcagcatcgaaatggagctatccgcctctggtggcagcacgtccaccagcgcgttgctgtgcttgtgcagggccaccgaggcggagggcttcagcagctcgcgatcgatggtggacaggatgcgcacatagtaattggagccggtggtggagcccacaatgcccgtgttctgatcgacggcctccaggaactggccaatcaccagcggcaccgactggatgcgcttcacctcctcctgggcgtgcagatactcctttttcaggtttcgctgctcgtccttgatgtactcctcctgcacttcaatgaactccagtgtcttttgcagtttctacaacacaatggccgcttagatgggtgatcaaatggaagaccagtggacgactcaccttgtaacgcacgtagagatcctccatgtccagttcgtccagggaactgtgcgcatcttttagcttcaagtcggagagctcgtcctggtggaaaaagtggaattgggaaagaggtaattagtacgcatgccaggcggcgcagagaggcaactacgcaccttttccggtatcagtacgtccatgttgtacggcattcttttcgttcagcaatgagtctcgttttattagtttgcgttttctgcgaggcgaccaaaatgactcgtcaaaaacaagccagcagtgcgttgtggtggcaaccctgtccgcaatcgattgtgatctatcgatggggccatttatctatcaaattgtgctgctct

SEQ ID NO: 1190 - DNA, 2639 bp, DROSOPHILA
cgctgccatcgctaggcaagtgacgtggaacgtgtggcaacttttgatttgatgcaaatgcaatgcgagtagagtgcgttgttgttgaaagtgacgacggatcggaagcgtagctaaaatgttggactttgtggtgatattcaccaagggcggagtggtgctgtggcactcgaacgcgtccggtaacagtttcgcctcctgcatcaacagcctgatacgtggcgtcattctggaggagcgcaacacagaggccaagtactacgaggaggaccacctggccgtgcagtttaagctggacaacgaactggacctggtctatgcggccattttccagaaggtgatcaaactgaactacctagatggattcctggccgacatgcaggcggccttcaaggaaaagtacggcgacatacgtctgggcgatgactacgacttcgatcgcgaatatcgacgcgtgctcagcgccgcggaggaggcgtccgccaagcaagtgaaagcacctaaaaccatgcgctcctacaacgagtcacagaaatcgaaaaagaccgtcgcctcgatgatacaggacgacaagaagccggtggagaagcgggtgaacatccaggaggccccgccaccatccaaatcacagccgtcgtcgccaccgacgggctccccaatggacaagatcatcatggagaaacggcgcaagctgcgcgaaaagctcacgcccaccaagaagacctcgcccagtgattccaagtccagcaagcccgagaaggccggcaagaagccacgcgtctgggatctgggcggtaattccaaggatgccgctctgctcgatcgctccagggattcgcccgatgatgtgcagtaccagaacatcaacagcgagctggtgggcacaatgcagggcgtcatccgcgacttggatgtggagagcgaggacgaggctgacaacgaggatgcatcctctgagggggaggccgaggagcaggtgcagtcaaagaagggcaagcgcggtggcctgctatcctacttcaagggcattgtaggcgccaagaccatgtcgctggcagatttgcagccggcgctggagaagatgcgcgaccatctgatatcgaagaacgtggcctctgagatagcagctaagctgtgcgactcggtggccgccagtttggatggcaagcaaatgggcacattcgacagcatcgccagccaggtgaaggaggcgctcacggaatcgctggtgaggatactatcgcccaaacggcgcatcgacatcatacgcgatgccctcgaatcgaagcgcaacggccgcccgtacacgataatcttctgcggtgtcaatggtgtcggcaagtccaccaatttggccaagatctgcttttggctgatcgagaacgatttcaacgttctgatcgccgcctgcgatacgttccgagccggtgccgtcgagcagttgcgcacacacacacgccatctgaacgcactgcatccggcggccaagcacgatggacgcaacatggtgcagttgtacgagaagggttacggcaaggatgccgccggcattgccatggaggccatcaagtttgcccacgatacgcgagtggatgtggtgcttgtggacaccgccggacgcatgcaggataacgagccgctgatgcgttccctgtccaagctaatcaaagtgaacaatccggatctggtgctattcgtgggcgaggcactggtgggcaacgaagccgtcgaccagctggtcaagttcaatcagtcgctggccgactactcatccaacgagaacccgcacatcatcgacggcatagtgttgaccaagttcgataccatcgatgacaaggtgggcgccgccatctccatgacctacataaccggccagccaattgtgttcgtgggcacgggtcagacgtatgccgacctaaaggccatcaatgtgaacgccgtggtcaattccctgatgaagatcgcttggcacttcgattacaagttgttttgtttttttttatttttttattaatgtttataactttatgcgtacaaagaagagtttagtgtgttgggggaaaaaatggggcgggagtagtgtgtatgaattaatataatctatttgtagaactcgtgctcctgctcgtccttcttgatattgttcttgtagcccttctcgaagtccttggccaaaacgatgtagcgattctcacgcaccgcgtgcatgcccgcctcttggcaaatggcgttgatatcggcaccggagatcttgtccggccgcgccacaaactcctccaaatcgacatcctcgcttaggttcatcttcgaggtgatggtggagaagacgagtcgcttctgccggcgatcgggcagcgggaactcaatcttacgatccaatcgaccaggtcgcagcaatgccggatcgagtgtgtccgccctgttggtagccatgatcaccttaacgttcgtggtctgatcgaacccgtccatctggttgagcagctcgagcagaatgcgctgcacctcgcgatcggcgccagtctgcgcatcgaaacgcttcgtggcaatcgcatcgatctcgtcaatgaagatgatggccggcgcgttctccttggccagcctgaaaacgtcgcgcaccatgcgcggtccctcgccga

SEQ ID NO: 1191 - protein, 631 aa, DROSOPHILA
MLDFVVIFTKGGVVLWHSNASGNSFASCINSLIRGVILEERNTEAKYYEEDHLAVQFKLDNELDLVYAAIFQKVIKLNYLDGFLADMQAAFKEKYGDIRLGDDYDFDREYRRVLSAAEEASAKQVKAPKTMRSYNESQKSKKTVASMIQDDKKPVEKRVNIQEAPPPSKSQPSSPPTGSPMDKIIMEKRRKLREKLTPTKKTSPSDSKSSKPEKAGKKPRVWDLGGNSKDAALLDRSRDSPDDVQYQNINSELVGTMQGVIRDLDVESEDEADNEDASSEGEAEEQVQSKKGKRGGLLSYFKGIVGAKTMSLADLQPALEKMRDHLISKNVASEIAAKLCDSVAASLDGKQMGTFDSIASQVKEALTESLVRILSPKRRIDIIRDALESKRNGRPYTIIFCGVNGVGKSTNLAKICFWLIENDFNVLIAACDTFRAGAVEQLRTHTRHLNALHPAAKHDGRNMVQLYEKGYGKDAAGIAMEAIKFAHDTRVDVVLVDTAGRMQDNEPLMRSLSKLIKVNNPDLVLFVGEALVGNEAVDQLVKFNQSLADYSSNENPHIIDGIVLTKFDTIDDKVGAAISMTYITGQPIVFVGTGQTYADLKAINVNAVVNSLMKIAWHFDYKLFCFFLFFY

SEQ ID NO: 1192 - DNA, 3153 bp, DROSOPHILA
gagcccgccgaggagttggacgccgccgatgaggccctggccgccgagcccaagtccaaggaccccttcgatgcgctgcccaagggcaccttcaacttcgatgacttcaagcgcgtgtactccaacgaggacgaggccaagtccattccctacttcttcgataagttcgatgccgagaactactcgatctggtttggcgagtacaaatacaacgaggagctgtccaaggtgttcatgtcgtgcaatctcatcaccggcatgttccagcgtctggacaagatgcgcaaggcggccttcgcctccgtttgcctgttcggcgaggacggcaacagcaccatctccggtatctgggtgtggcgcggacaggatctggccttcacgctctcccccgactggcagatcgactacgaggtctacgactggaagaagctcgacgccaagagcgaggagaccaagaagctggtcacccagtacttctcctggtccggcaccgacaaggacggtcgcaagttcaaccagggcaagatcttcaagtaatcatctctgcctagcccagctccgctcaaagcagcagccgccctcatttagaccaacaacaacaacagcagcagtaacaataaagtttgagatttaaaatgcaggaagagcacaatgcccatttcttaagttccaactgataagtacactaaagatatccaatatctgtcgtgctgcctcccacgtttggcggaatcgtgtgtctcgcctcctgcattttgtactggagaatttgtttgtaaccgcctaagcataacacagcatgatattgtcaacggaacagccgcctgcagtcagaaaatatttataaaaaataaaaggttttctattaataacagcacggttttctctcacacgtgtgtgtatgtgtgtgtgtggtttatttggttgttggtaaaggttaggtctggcatttattagtaattagaattaagcatatcgatttgaatttatgtttgggcaattttattggctccttttaacttaatccatcaatatcatcaattattgcttacaattacaagggttcaaacagcttcggccactactattggttttaaaagcaaactggagctcagcgagaggaaatgctagaacgtttgtgtatcgatgcaccgccgcaatctacttcttgatgacaattggtccgacgttgtctccagtctgcttgttgtgctcgccatgactgccatcgcagtagggccactgcgaatagaggattcaattgaaaattttgttcacaatatttcagaggttagaatgcactcacgttcttggtcttccagcagcgacagaaggccgccttctccgcaatatcctccacgtcgatcatgtccaccaccttgggctcgttcttgcggatgtggttgttgcagcgtccgctgtttttggccgcgcagctggcccgtgccgccggacagtaggccaggtaggcggtgtagccgagtccggccaccaccacggtgggtgggatcagggccaaccaatccttgactgcaaacgaaaccaggttaatacggaatgcagtgcattttaagctttataactagatattttggtcgatcagccgtaaccggcacaaggtcgttccctacacacatattgggttataaacgcaccaagatatgcgcatatatgtttataggtatacccatgttggtatgcctgtattatgcgtctatctagttgcctatctgcgagacaaacttgctccaattataaatttcttggcgagctcagcagttgttgcataatcgctgcaacttttttgcctggaagtgcacacactgcacttccaattcccgttagcagctccgcaatatcacgccacatttgcaccttagtagtccatttagttggcccccctagatgctgcgtcattatcgtggatttgggtttatgtggggcgccctttgaaggcaaatcaaattccaatgggcaaaaccacgctcattgcccaaacttacaggagagcttaaaccagccgccgatgctgtcgggaaccggcagacttgacaagtaattgggcagcgaggacttcaccagatgtgatatgggctccatttcgaaacgccttttttatttaactggctattaaattcggaaaacttgtttttgtgttgctatcggttagcggtgctagcaaatcgataagccagtcctatcggtatcgcagtgctagggtcacactgcattttcgacgataggcagtattacagattcgtgtgtagtcatcgatagcattctgttttgtttacgaattattgattgaaatcaataaattgcagtttagaatgtctgccggggtacaagagcgcctgcaactgagccgcatgccgctggacacgtggtcgaagcgggagcagctcatcctggcgtcggcggtctcctgcagcggcgaccagaactggatcacggtgagccgcacgctgaagacgatctgcggcaatggcagcagtaaccgaccggcggactggttctcgcagaagaactgtgccatgcagtacggcaatctgctggagagcgtggaggccaccaagcgcaagaagcgcagcagcgaaagcagtgccggcgtctcctcgccggccaccgtggagacgcccacagaattgctgctccgtcggctcacggaggagcgtcaggcggagatcaaggcgcagatgcgtcaggatcaggagacttaccgacgcatccagcgggagattgagtcgctgcaatcggacgcggtgaccgagcaggagctgcaggacatgtggctggagatcgagaaggagcaggaggcgcgccgcatcgaggagatgaagctggagaatcgcatgcgggagcgcgagcagcgcaagaaggacctggccagcaactggcgaaacagcagtctagccgtcaagcgttccaaccaagctgccgacacgacttccgtcgatatggacgtggaggacataaacaccagtggcaatggcaaacagcagacgggtccttcgcctctactcacatctctcctgaaatcgcccacaggcaatgcacctgcaacgcccaccccaggaggagctgcaccagcagccggaggaactggcagcgtggccagggctacggcgccaaccatcacctcgctgctgacca

SEQ ID NO: 1193 - DNA, 616 bp, DROSOPHILA
aaaaacaagttttccgaatttaatagccagttaaataaaaaaggcgtttcgaaatggagcccatatcacatctggtgaagtcctcgctgcccaattacttgtcaagtctgccggttcccgacagcatcggcggctggtttaagctctccttcaaggattggttggccctgatcccacccaccgtggtggtggccggactcggctacaccgcctacctggcctactgtccggcggcacgggccagctgcgcggccaaaaacagcggacgctgcaacaaccacatccgcaagaacgagcccaaggtggtggacatgatcgacgtggaggatattgcggagaaggcggccttctgtcgctgctggaagaccaagaactggccctactgcgatggcagtcatggcgagcacaacaagcagactggagacaacgtcggaccaattgtcatcaagaagtagattgcggcggtgcatcgatacacaaacgttctagcatttcctctcgctgagctccagtttgcttttaaaaccaatagtagtggccgaagctgtttgaacccttgtaattgtaagcaataattgatgatattgatggattaagttaaaaggagccaataaaa

SEQ ID NO: 1194 - protein, 133 aa, DROSOPHILA
MEPISHLVKSSLPNYLSSLPVPDSIGGWFKLSFKDWLALIPPTVVVAGLGYTAYLAYCPAARASCAAKNSGRCNNHIRKNEPKVVDMIDVEDIAEKAAFCRCWKTKNWPYCDGSHGEHNKQTGDNVGPIVIKK

SEQ ID NO: 1195 - DNA, 9613 bp, DROSOPHILA
caatcccgccatgtttcccgttccggaaccagacgatggggatatgctggcgggattgatggcgatttgcgaacacgtcgactgcgtggaggactgactagaggtggagtgcgttgatggcggcggcggcacatagttgctgtgaaacggattcgtgctggtcactccaacgggcggctgctggcgctgctgctgataccgctcagccgcctccttctcgcgcagctgattctgctggtggtagaagcgctgcagcactgcatattgaaatttatatgttagtttcatacatagcccagcaaatgactagatcattatacctatggggctctgattgcccggctgcaatcgctgtggctgctgctgctgctgactcgtgagttgcagggtcggcgattctgtggggaattgcttgcgcggcaacgagggggagggtgaggagaggcccaaattcaaggtcgtcgtggtcgcattactactactatcacagctgtcgtaggcttgggaattttccgttggcaggcgccaagtgggcgtggtcgttggcgttgtcgtgagcactgtagctgcaatatttggcggtgttgttgctgttgccgccgctgctgctgctgttgctgcatccgtgatcaatgtttggttgttgtgcggcagtggtattgttgttgcagttgaattgtgtttcttttggctgaagggcgatgttgtcagattgcgtagaatcgattgacctgcaagtgatgagttggtagagtattctttttttttttctaaatctaaatctatagagccaaacccaccgatgctactaaacatggactccttcttggggctctcgtcgttatatttgtagtgcggatgatgggatccgttgctcagttttcgctgcatgaacggcgatttgcgataaagccggttaagatcgccgataccggcgcttggtggcgatagaggactggcactgctgctgcttccgctaccatttccgcttccgccgctgccgtttcctcttccatttccgtttccgctgccgccgaaacagtttgtcgttgccgtcggtgttgtggttgttgtttgaggtagttgtgtggctgattgcatgaaaaactgcgactgttgctgctggtaactcggtatctgagtgggttttattgtcttctgcggatttgtgggactctgccccgcatacgttgtcgccctaccatattttacagctccacctgcggatcctgatcctgatcctgcgagagatccggccccagaaccgatcgcacttccagtcgccgttgccctgcaaattgacgattgattcgtttaagattagtgcattcttaatggctagatgaccagtaatgagagcacactcaaatgtacgccagtggcagaaagaaggtttgtgtttggaggggatacatcgggctatttaggggacatatatcggggattttgaggaagcatcaggatatccgggatgtgatgggtttgtagggtacatttaaatagattgacggcgcaatggcaacatatctaagacatttaaatgagctgtaatcgcatttggaatgtgtgttggtgatcgatcgatgtgtgtgttttgtatatatacaagttgatgagtgagttttgcgtgtgagttgtgtgttcttttgtgtaagcgacaggtgggaaacacaggtaaatgccaaagggagcgaaagcgaaagatggccgcgcagaattaaagaatctttgctcatgatggctttccaaaataacactttcctaaaaaaaacaaatgtgaattgtagaaaaagatcgcagaatgtttaagaaaacacctttccacaaattgcaaaccaaattgaaagttccaaaaaacaaaagctgatcaattggttgtatgctcaaactaactaaactacaaaatttcaaatatactttactttgattcagttaataatgtttttgttttcttaagcataaatttacaagcaattctattcgtttaattatcaacattaaaaaaccatttaattgttattttaataactagcccacattttcgtgaaggaaacgcatgataaatgaaaagggacgcatagccaaatgtaatgatcttaaaaccgataagtaatacaattaagcaaactaagtaaacaatcagtgtcaaattaccttttctggtgtatgagcatttctagatgggtaaataaacaaagtataaattaaataaataaagaaagcgatgccaaaagccaggcccagattcagaaaagaacatgcgaaagtaaatcgaaaccatagtattaacaaaagtccattgatgaatcattaaataatgaacacaataaatgttagcagagcatgtggcgtgtttacaacaattaacgattacacttaactaatgaaaacataattagaaggctaataataagaataataaactcgtcgtacttactgaattttacttttttaattgggaggagtttttatcgttttttttttttttttttgagtagttatgtttggttggcattatcattatatataggtaaatatatttttaggtttatatatctgtatatagagttgatggttgcaaggtttacttgaatgcttttgttttgtttttcagtttatgtcgatagtttttaatgtttggtttttgtttatagtttgtcttcttctttttcgtttgcttttattttttgttagattatgtttattggatttcttcattgtttgtcattattgtttaagaaatggtattaggaattaggtaacctacaaaaaatggtaataaaaaagatgaaaaaggaaaataaaaacgtcgcacacacacactcaaataaaaatgtcaattaaacgcaaaacaggagaaagtacatcaaaatgtttataattatttcattatacacttttcggttcgtcctcaaataaatacaggatctaagtgggtaaagatagacagatagttgcgtggatagccagactacaattggactaggggcaacatgctctttccaaagattcccaatcaatttaactataacctagtttaataataattaattaaaatctcattataatgtagattgatcttgagtatattttagggggttcaaagatttagcgtacaacttttttagttatacatttgaattccaatgatctttaagcctgtttagtttgtaatatacctacttaatagctgtggaaagagcatttgttctagcacaacaaactcgtatctaattgctagctaattttctaaaaatgtagttaataagtggacttgctttcttaatgtgtattaaatgaaacaaaaaagctaaacatgccaaaacgggataggaaagaaacggaggagctaagcgtatgtttataatgttaattagcctcaccagagaaaattaaagagattgaaaaaactagagtaaatataaattaggaaaataaaacaagttgaggaacaagcagtttaaattagttggctagcaaaaatatgaatttaggaaatccatcctacggttaggtattcaaaagttgcagcttcccagctatcatcttgaatcctctcctacctgttgaactggagaagcacgttaagcgaagaacaaagaacggaaaatggaaaacggaaacggaaacggaaaggtggggaaaatacaaagcgctccgcactatctcagacacacccactattcacacacatccacaacaggcacaacacatcatcagccgggaatagcggacgggtcgtgggaataatgctgaaggatctggcacagatcaccggatgggctcacctctggagcgttggatcgccattggcgcgcagtcggttatccttgatgctctgaaaccaattgggcacatctactttggctgattcataaatccggatgaagggctgggccaaaagctccggatacttgggtcgatcctgatggttctttgtgaggctgcaaacagataaaagatccatattaactgggctctgtacaagcgacaataatactagaaagtatcactcaccacttgatgacgaaatcgcggaactgctgactaaagttgtaaccctcgccgtatggcaaacacggcggctccgagtcaagcaccttggtgagcacctcgaagtccgtgttgcatccctcgtacggggatcgcgctgtggccagctccaccagcgttatgcccagtgaccacacatctgcgcgaatgtcgtactttggtttcttggggtcgatgcgctccggctgtaaaattgaaattgtagggcattcaaaatagttgtttcaaaaactagatgaatcacataggtcatatgtattctaagtacttattgattaaaagcttagtttacgcttcaattatctcaaatttatggcttgctttgccaagcttggaatttccctacgaacacgttcattatttaaataaactaagtcatgacaccgatcaattaaacaacaaacctatatattttccaagaaatgtaatgagttgtaagcttgtgtagcaaaaaaatttagtactttacaatatacacaattttctcaatcaatctaggatctgtctagtctatttttccctatcatagccctcccgctctttatacccaccgccatataagctgcacagccggcggatcgagtgttggccttggagtccaccaggcgtccgctgatcccgaaatcacagagcttgatgttcccgcgctcatcgatcagaatgttcgagggcttcacatctcgatggatgactccgtgcttgtccttcaagtaggacaatgcgttgaccgtctgcaaatggaataagtattaagaaaagattctaatgaagcgctattccttcagaactaaccgccactgtgaccttgcccaggatctgttccggcaccggcttcttggacagcttgagcagcttgtcaaagcacatggacatcagctccatgcagatccacacatccggatcgcgaacgaagcagccaaggcacttgacaatgtacttgcagtcgtgcgatttgagcacaacatccagatccatcaggatgcgtttgttctcctccgcgttgccagtgcgtcgcatctgcttcacggcgatgatcgtgttgctggacaggtgcatcatcttcaccacattgccgctagtcccattgcccaggtcgcccaggtgcttgaggtcattgatgtccgtcggatactgccgcccgttgatgttcagcttgccggtctgctccatgatgatcttcagcttcatgtccgtttccgaaactggaggatgtggcggcgtgggcagcggaagtatcaccggccgcgtacgattcagtccaccaccgggaccactagaaactataggatatacaatggaaaacagcgatatgttggtatgatgataaaaatgtacgtattaaattcaatctaactaaaaaattaaacaatattttgcatatctattatatacaacaagaatacttccaacacatatctctcaatttctatacgaaaaaaatgccttaaaaacaatcctttgaaatatttgcaataacttccaattgggttaccataggccactaatcaattaacgaatgctgcccactgtgccatcgtgtgcgtgtgtgtgtgtgtgcatgaagaggaagagcgaatgagagcgattttgtttttgtttgcgaagtttttttttccctggcagcaattcaattcaacaattagccactacaacaacagcacgtcataaaaaataacgctatttgtaaacatgcgaaagaggagacacggcacaatgtccgatgaacgaatgtgggcagggtgcggcggaggtgggaatatgtgaggcccaaaaaaaatgacaacaacagtaacgggcatatcaagacattactccggaaatgccaaaaagtaaccaatggcggagagcgagagaggaagagagcaccaaacgcgagtagagagacgcacacatgcaaaaagtaaataaaaagtatgtaagtaaataaataacaacacttgatggcagatgaaaatccaataagaaaaatatacaagacaaatatgcaaaaacttaaatgtataacaaaaggaaggggaaaagaaacgaaaaaaggcggtgggtggtctcacaaccgtgggcacaataacgtcatctcttacatgaaaaatttaaaatttctatcaatttaagcctcataaataatcgaataacgacaacttttgtctttaataaaccaattttgttctgataaattaacatatagaccgttatattttgttagctatttattcatttaacttttgctcgctcattatgtaccacgaacttgaaaatctattcaatagctgattacactgttaaaatttgggtgtgattttaagtacccctgaaattcgcggaaactattaaccactactaatctaatcgaatcgaaatgtatttgattattcaaaaacccattaggcattttctggggttcatgtatcaaacagttatggtaccaggaattgttaatctaatcgaggcgaaaataaattgacgcggttcacagctgttaataccactgtagatttgacttctttttatttttgtttggcccaacaaaaggccgaaaacaagttgggtacgcttttggtgttcgcacttggcctgtcttatctatgcaatcggaaaaacagaacgggaaatcggagggggggaaaagcggcagagctacggggttgacggggcgctgctgaggtgctggaatgggggattatgagcagctgttatgcagtcggggaatcgatagcgtttgccctttgttggcggcatccaaatgctccaaagtaaacccaatggcaatagcaatgggaaaagccaagaaaagagcacttctcttatcacaatttaagcacacatacatgtatgtacacacacacacgcgcacatacacagcttattgggcaatgacaatttattaacaaaatatttacacaaatgcggacaaaagatggttttgtggcttgcggttggcggtacggtatatatagatttttggtgaccatttttggggatcacgatttttctcagcccacttttattaccacttaacaaactgtctacagttgcggtcagagaaatgttggcttaaatccacacctgtcacagaggatcaataaagatttcacctgtctaatgttcgatcgataaaacattgatctttctgcgaattaatatcaaaaatgttgtttgtgcgtttggaaatttacttggaaagttttaccacgtttttggcggccaaaactgtttttcgacaacgatttactttcgaaagtagagaattatcgaatattcgaatcgggaaagtctcgttggaaaattttgagttacagtacgcagtttgataagctatcatttttagatagcggtttagagtattccctggtacatggagtttagttgtgacattatattttgttatatttttcttcaacgattttcaaagattcaggtaactacagtgtttttctagttgatcccaattaattttatatattaaagatttagtaggaagttaacgaaaagaggacttacgcatgggcagtgtgggcgtggctcgcgacactctagttgtcggcggggtgtatgttccaccgaaggtgcccgtcgccggtgctgcggatgcaaatgcggatgcggatgaggatgatgacgaggcgctggcgctgccgaagggcgtcgcatgaggaactggaggtgctggacgctgggctatgctgatacccgatccggaaacggaacctgcgcccaaggaaggtgcgtgggtggcggatgtggctgcggatgcggatgtcgccaggggcgggacgcgggcagatggaacggaaccggaaacgacagggccgcgcgcaccggagaggacgatctggtcgtgggactcattctgcgcctggagctttgcctccaaggattgcagccgactgccgatcgtttcgaactcaatggtggacattatatcgagtcgatttggttcgattttttatagttagttgctagtatcgttggattttggtatttattaaatttttttcgccgttttttggccagcacttcttcgattttcctctcactcactccctctctctcacacacacacaagcgcgcgcaggcgggggagggtgcgtgtgtgtgtgaattgttttgctgtgcgccctgtttgttttgtcgctgatgttgttgttgttcggcggcacacatacactgtaaactttacacttgcaaaaataaaggattgcttggacttttgttgtttgccaagggggggcacaaaaacaaaatcgaaaaaaggaaaacacagtcactgtgcattagagagagacatcctcacccccacacacgcacacacacaggcatacacgcagcgccctctctctctttctttttcagcagcaacggcaacaacaacttgcgattttttcctccttttttgggagaatatttcatcggttgttttcctttcgcggcgctgtttgtcgcacttctgcaatcgattcgtttcgcgaccgcgggcggcggtatcactggcacaatttgatcactcgcttttgtacgtttttgctgcctaaatcgcgtgtacaatagtgatgtaaaaaaacatcgatgcatcagccatcgatggttcttcgccgataattcttaatatcttttttcgtgcctatcgatggtttgcaaaacatcggcacctcagaaacagttttcgaactaggaacggcatctaaaactatgtaggattttattttaccgagatagaataattttcagaggatatttcatacaaatataatataactataatagatttttcaaattcaaattggtcgattcgagagacttcgttgttcttgtacttaaaataataatataaggtctacctatttattaattaataaaataataaattattttagtacaattctaaaacatcgaattctatatgttcagtcaaacttgcaacattacgtatcgaaaacggagtgaccaaagtgctaaaaagaatcataaatataccgaaatgcaacttaagatgggcatcacttggctagaacttattaagttttcccttaaaataaatgtctataaatgtataaataaaaaattaaagaaaataaacaaacattaaaaaataggtatgaagaatatacggaacaactttctagaaggcttacaaagagatatagatataatcgatacctaacttaattatctaaattcgttgcaggtggaagcaaatttattatcgaggcacttcgatttatttgtatgacgatactatagctgcactcgttgggatatatcgataggaccaactgcggctggccagcgctagtggaaaagagagaaaaacgagaagagaagcgaaaagcgatcggtgaacagtgcaaaaagtgcggaaaggaaagcaaaggcaatagcgaaaggttgggcggcaaaacccgggccacacgatccacaccgatccgatccccatatcaccgacccgcatccgaatcctgacctgaccaaatgcggtaaaaatagccgcaccgcatcgcatccgattcgcaccgaaccgccaagtcttgcagaatccgccagaaaacaccaaggaaagtcgtgg

SEQ ID NO: 1196 - DNA, 2724 bp, DROSOPHILA
tgtttttttacatcactattgtacacgcgatttaggcagcaaaaacgtacaaaagcgagtgatcaaattgtgccagtgataccgccgcccgcggtcgcgaaacgaatcgattgcagaagtgcgacaaacagcgccgcgaaaggaaaacaaccgatgaaatattctcccaaaaaaggaggaaaaaatcgcaagttgttgttgccgttgctgctgaaaaagaaagagagagagggcgctgcgtgtatgcctgtgtgtgtgcgtgtgtgggggtgaggatgtctctctctaatgcacagtgactgtgttttccttttttcgattttgtttttgtgcccccccttggcaaacaacaaaagtccaagcaatcctttatttttgcaagtgtaaagtttacagtgtatgtgtgccgccgaacaacaacaacatcagcgacaaaacaaacagggcgcacagcaaaacaattcacacacacacgcaccctcccccgcctgcgcgcgcttgtgtgtgtgtgagagagagggagtgagtgagaggaaaatcgaagaagtgctggccaaaaaacggcgaaaaaaatttaataaataccaaaatccaacgatactagcaactaactataaaaaatcgaaccaaatcgactcgatataatgtccaccattgagttcgaaacgatcggcagtcggctgcaatccttggaggcaaagctccaggcgcagaatgagtcccacgaccagatcgtcctctccggtgcgcgcggccctgtcgtttccggttccgttccatctgcccgcgtcccgcccctggcgacatccgcatccgcagccacatccgccacccacgcaccttccttgggcgcaggttccgtttccggatcgggtatcagcatagcccagcgtccagcacctccagttcctcatgcgacgcccttcggcagcgccagcgcctcgtcatcatcctcatccgcatccgcatttgcatccgcagcaccggcgacgggcaccttcggtggaacatacaccccgccgacaactagagtgtcgcgagccacgcccacactgcccatgctttctagtggtcccggtggtggactgaatcgtacgcggccggtgatacttccgctgcccacgccgccacatcctccagtttcggaaacggacatgaagctgaagatcatcatggagcagaccggcaagctgaacatcaacgggcggcagtatccgacggacatcaatgacctcaagcacctgggcgacctgggcaatgggactagcggcaatgtggtgaagatgatgcacctgtccagcaacacgatcatcgccgtgaagcagatgcgacgcactggcaacgcggaggagaacaaacgcatcctgatggatctggatgttgtgctcaaatcgcacgactgcaagtacattgtcaagtgccttggctgcttcgttcgcgatccggatgtgtggatctgcatggagctgatgtccatgtgctttgacaagctgctcaagctgtccaagaagccggtgccggaacagatcctgggcaaggtcacagtggcgacggtcaacgcattgtcctacttgaaggacaagcacggagtcatccatcgagatgtgaagccctcgaacattctgatcgatgagcgcgggaacatcaagctctgtgatttcgggatcagcggacgcctggtggactccaaggccaacactcgatccgccggctgtgcagcttatatggcgccggagcgcatcgaccccaagaaaccaaagtacgacattcgcgcagatgtgtggtcactgggcataacgctggtggagctggccacagcgcgatccccgtacgagggatgcaacacggacttcgaggtgctcaccaaggtgcttgactcggagccgccgtgtttgccatacggcgagggttacaactttagtcagcagttccgcgatttcgtcatcaagtgcctcacaaagaaccatcaggatcgacccaagtatccggagcttttggcccagcccttcatccggatttatgaatcagccaaagtagatgtgcccaattggtttcagagcatcaaggataaccgactgcgcgccaatggcgatccaacgctccagaggttacctaattcctaataccatttcttaaacaataatgacaaacaatgaagaaatccaataaacataatctaacaaaaaataaaagcaaacgaaaaagaagaagacaaactataaacaaaaaccaaacattaaaaactatcgacataaactgaaaaacaaaacaaaagcattcaagtaaaccttgcaaccatcaactctatatacagatatataaacctaaaaatatatttacctatatataatgataatgccaaccaaacataactactcaaaaaaaaaaaaaaaaaacgataaaaactcctcccaattaaaaaagtaaaattcaggcaacggcgactggaagtgcgatcggttctggggccggatctctcgcaggatcaggatcaggatccgcaggtggagctgtaaaatatggtagggcgacaacgtatgcggggcagagtcccacaaatccgcagaagacaataaaacccactcagataccgagttaccagcagcaacagtcgcagtttttcatgcaatcagccacacaactacctcaaacaacaaccacaacaccgacggcaacgacaaactgtttcggcggcagcggaaacggaaatggaagaggaaacgg

SEQ ID NO: 1197 - protein, 492 aa, DROSOPHILA
MSTIEFETIGSRLQSLEAKLQAQNESHDQIVLSGARGPVVSGSVPSARVPPLATSASAATSATHAPSLGAGSVSGSGISIAQRPAPPVPHATPFGSASASSSSSSASAFASAAPATGTFGGTYTPPTTRVSRATPTLPMLSSGPGGGLNRTRPVILPLPTPPHPPVSETDMKLKIIMEQTGKLNINGRQYPTDINDLKHLGDLGNGTSGNVVKMMHLSSNTIIAVKQMRRTGNAEENKRILMDLDVVLKSHDCKYIVKCLGCFVRDPDVWICMELMSMCFDKLLKLSKKPVPEQILGKVTVATVNALSYLKDKHGVIHRDVKPSNILIDERGNIKLCDFGISGRLVDSKANTRSAGCAAYMAPERIDPKKPKYDIRADVWSLGITLVELATARSPYEGCNTDFEVLTKVLDSEPPCLPYGEGYNFSQQFRDFVIKCLTKNHQDRPKYPELLAQPFIRIYESAKVDVPNWFQSIKDNRLRANGDPTLQRLPNS

SEQ ID NO: 1198 - DNA, 5492 bp, DROSOPHILA
aacgtagcaattatcttgtgcggaaaaatagatttgtttgccatcaaccagatttgcaatttgtttacaagtaacttatatttttaaatttaaatatcatttagctgagtaacgggtatgtgatagtcgttctcttttgttttaaagtagaaatattgcagaaacaaatgaaaataacttatttatttattatcacaaaatgcatgaaattattgaatctataatatgtgtgcaggattgttgtggtaactttctggtattctattgataatttttgtgggaagttgatacaataataggtagcaaatagcaacatttttccgaaagcaatactcgagtttagccagtttattagtgattcggatcgatgaccgctgagatcggagaacaggaaaatcttacagatacattgtgtctctagccaactatattatgggttgattggcacgtggtttagtgggtggaaaggtggtggtcggttggatcggtggatcgaccgaccacacgatatgcattaatggtaatggttttggttggttggttgattggatgctcggttggtgtttcaaattggcccaagattatatattatattatagacaactttggcgcatttaaatgaatatcgatgcgatgcggcggcggcggcgcctgttgttgtttatatcaaatcaaatcaaaacgaatcgtatcgaactaaaatctggttccgagtatgaatatgatttcgaaccggcgggtattcaaatcagtcgacgccccctatgttgttgttatttcagtctttcgatcggccctctcggctcgaaccgaagccaaagtcaggcgcgtgataaccggcgatgttagtgtatgggctatatatacccagatatgcgtatatatgtatatggatgtctatatggagagcctatatagcaatcgactaaacgaagtcggccggaggcgataaaagccccaagatatcgccgaagtagatcagtttagcacagaattcgcaaacgacttgaaagtactagcccatatcaaccatataccgtgtatccaaagggaatccaacgaaaacaagaatcgtctgtccaacacagtgattgaccaaagatcacagctctaatgctcgtctggaacgataaacaggatacaaatttttcattcatttgagcagagtgctccatttgccagaaatcgggaccggagacatcgtcgtaatcaaaaatattagcaatatttgtttgtgctttttttttgtttttgtttattttgattcgatttggtttggtttggtttggctattcgattttctttcgttgaatcgggaaaagggccggcctggtgataatgcccagcagttttgccaacgagagtcagttccgataccagagcagccgcaatcgtgccagctgcacaagccggagtcccagcgagccggaatccccggcgccggtgacgcccaattgcgatgtagtcgatcaggcgctggccgagctgcagctccaatcgcaggacatacgcaagcaacaggacctggtggacaccacagccacgagcagcagcagccgaaagcgttccggatgggagataaagggctccaagctatcccttaacacgcacaatcgcattcggaacattgtcgagtcgctaaagatcaaaccgaatccggagaagcccatgataccgctgtccattggtgagcaccataaatatataaattaactaatatatatctaaagagtaaaagttctaaaaactgtacgtatataatcagttttcttttaaaatatggtacttagtatatttcttgtatagattcattttagatatttaaagttgacatcttaaactttcaagttcttaaaacttatagggctttttatataaaccttataaattattattagtttgtctgcaaattactgattcttgaatttcctttgacgcagaacttacatatgtgtttgaaaaatctatcttaaaagcttttcctcttcagaattctcagaagtatgctatgcatttagcatgtatgtataatgtatatttacattatcaggatttcgccttctatttactatatatgcattaatctgaaaagtacgcctttaatagtggctaaaagcaatgatttgaaatatccaaaatttgcaaattatagaaaaatatttgagcaggtagtgctaactatccagtttcgtgggaaacctgctcctcatttcaccatatccccataacacctctgacgtttttgctacaagtttttgggccaaatttgaatatttctgatgtgcgatctcttttgctcttgccgttttataaatatatatatatatatatttatatcttagttttttttttatttttggcagctgagttgtcccaaacttgataaaactagctttatgaacccaatgaattcggtttcattgtgaactaaagcgatccattggtcatacacacccacaaaatcgggccaatcagagatcggtgcttcggctataatgcttataagtcgttatataagttgggacattggacttccctgaaatgttagagctcaatgggaattcgggcttactggctttctggcttaggaaatttacagagaagctaattttgccgattgtcgcgagtttctaaatttgtgctaaaatatgccagataccagatatataaaatctgtaaagctgttgttgtttcgattgttgttgttcttgttcttgtatataatttaattgttttttttttgttttgtttttagtaatatcgtattatttttgtagcgaggcacgcgcactgtatttgtgttttgtggggcatttgcataaaatgtagttccacctgtttgacaaagtcgagaatccattcgaatcgaatcgaatcgaatggaatggaatcgaactcgggatctgagccagattatactgctgctgcttgcttagccatcggaatcgggaatcgaagttagccggaaacgaacgagttagccattgacccaatgcaatcagagattcggatgcgaagtcgcctgatttttatttttttaacaccattttgcattccgtttccaaaaataaatgcactttattccataaattaggcaattcactgatggaatattttctgtattattttattagcttaaaggttattttatattatagattatatattttaaatgcattttgaaacttgcttttctcaaccaggtgatcccacaacctttggcaatctaaaagccgccgatgagacaatgaaggcggtgctgcattccctggagagcggcaagtacaatgggtatgccagcacccagggtcacgagatagcccgcaaagcggtggccaaatacagtgcccaccagcgtcccgacggagagatcgatgccaacgaggtggtgctgtgcagcggctgctcctccgccttggagtactgcatcctggcgctggcggatcgtggtcagaatgttctggtgccgcgaccgggtttctgtttgtactatacgctggcccagggcttggatatcgaggtgcgctactacgatcttctgcccgatcagcagtggcgcgccgatctcgttcagctagagagcctgatcgatgagaacaccgccgcccttttgatcaacaatccgagcaatccctgtggcagcgtcttcgatgagaagcatctgcgcgagttgatagccatctgcgaacgccactatctgcccatcattgccgatgaggtgagtgacccttaaatcgagcacacatgaaataattgaattgaattgcctttgctttcgttgcagatctatgagcactttgtgttccccggctccaagcacttggccgtgagcagcctgaccacggaggttccagttctctcctgtggcgggttgaccaaacgcttcctggttcccggttggcgaatgggttggatcatagtgcacgatcgcaagaatcgtttgcgcgatgccattgtcggtctaaagaacatgtgtggtcgcattctgggctccaataccatcattcagggtgccctgcccgatatcctgaccaagacaccgcagtcttattttgacggcgtgattgatgtgctccacgtaagtttatcatttgtaattatcagcttaatggataattattatatgattatttttatcccacagtcgaatgccatgctggcctacaagatgctgaaacaggtgcgtggcctcgatcccgtaatgcccaatggagccatgtacatgatgataggcgtgagcatcgaacgcttcccggaattcaaggacgacacccactttgtccaggagatggtgaatgagcagagtgtcttctgtctgccgggcagctgctttgagtacccgggatacgtgcggatcgtacttactgtgcccggggcaatgatcgaggaggcgtgctccaggattgccgagttctgcgatcgccactacaaaaaggagtcgcgcaatttcattgagcacggactgctcgactgcgatgatgtggccttttgagctgggagcaaaacatttattagatattctagactacaatttttatcaagtgtacataagtgtatgtatgtatatatactatatatatatatatatcaatcattttaactatccaatataaggagtattgtctcaaaaaattgctggaaaagtaaagcgcgtcacacacagatagatagagtttagaaagagcgagtaaactgcggctaagtaaatggtcattatggaggacttctgaatataaatatatataatataaatttatatatatatatataggcctatatttgagctatctggcgctgtaggctggctggggttctgtgcaaaaaatgttaaacttggtgaaagtagtgctcctttggaacaggatatgatatgatgatgccttcttgctagttacaattatttctattagtttcaaataaattttctggcagcctttatctaacgtgtgatttcaatttaaaaatgctgaacattttcgcataaattggatttagatgtgtgtaatgaatgatatttgtatgtatattcgttgtaagaaattttaaaatgttgcttaatgggctgtgaaacgtaattagaatgctgttgagtgttgtgaagtgtaattgaatggtccccacatttcagcattcaacagcactgttaatgccaaaaaaaaaaaaatatatattaaattctagctaaggggtcttacaaatttctgaaactctgggacaaatcctgttgattgtggagtgtgtgtgtgtttttgaacgaggacctgagcacgagaacccaatcccacctacaggctaaccgggagaggggcatccttttgcctctacatgtggtgcggatgcattttcttctccatttcggtctccacgcgggcctcatcgattccggcaacagtgggcagaccacctggccagtggagcagctcctgctcgtgttccataatcatgttcgcctccgctacaattgatgtaatcatcggataggtttgtataag

SEQ ID NO: 1199 - DNA, 1844 bp, DROSOPHILA
aacgacttgaaagtactagcccatatcaaccatataccgtgtatccaaagggaatccaacgaaaacaagaatcgtctgtccaacacagtgattgaccaaagatcacagctctaatgctcgtctggaacgataaacaggatacaaatttttcattcatttgagcagagtgctccatttgccagaaatcgggaccggagacatcgtcgtaatcaaaaatattagcaatatttgtttgtgctttttttttgtttttgtttattttgattcgatttggtttggtttggtttggctattcgattttctttcgttgaatcgggaaaagggccggcctggtgataatgcccagcagttttgccaacgagagtcagttccgataccagagcagccgcaatcgtgccagctgcacaagccggagtcccagcgagccggaatccccggcgccggtgacgcccaattgcgatgtagtcgatcaggcgctggccgagctgcagctccaatcgcaggacatacgcaagcaacaggacctggtggacaccacagccacgagcagcagcagccgaaagcgttccggatgggagataaagggctccaagctatcccttaacacgcacaatcgcattcggaacattgtcgagtcgctaaagatcaaaccgaatccggagaagcccatgataccgctgtccattggtgatcccacaacctttggcaatctaaaagccgccgatgagacaatgaaggcggtgctgcattccctggagagcggcaagtacaatgggtatgccagcacccagggtcacgagatagcccgcaaagcggtggccaaatacagtgcccaccagcgtcccgacggagagatcgatgccaacgaggtggtgctgtgcagcggctgctcctccgccttggagtactgcatcctggcgctggcggatcgtggtcagaatgttctggtgccgcgaccgggtttctgtttgtactatacgctggcccagggcttggatatcgaggtgcgctactacgatcttctgcccgatcagcagtggcgcgccgatctcgttcagctagagagcctgatcgatgagaacaccgccgcccttttgatcaacaatccgagcaatccctgtggcagcgtcttcgatgagaagcatctgcgcgagttgatagccatctgcgaacgccactatctgcccatcattgccgatgagatctatgagcactttgtgttccccggctccaagcacttggccgtgagcagcctgaccacggaggttccagttctctcctgtggcgggttgaccaaacgcttcctggttcccggttggcgaatgggttggatcatagtgcacgatcgcaagaatcgtttgcgcgatgccattgtcggtctaaagaacatgtgtggtcgcattctgggctccaataccatcattcagggtgccctgcccgatatcctgaccaagacaccgcagtcttattttgacggcgtgattgatgtgctccactcgaatgccatgctggcctacaagatgctgaaacaggtgcgtggcctcgatcccgtaatgcccaatggagccatgtacatgatgataggcgtgagcatcgaacgcttcccggaattcaaggacgacacccactttgtccaggagatggtgaatgagcagagtgtcttctgtctgccgggcagctgctttgagtacccgggatacgtgcggatcgtacttactgtgcccggggcaatgatcgaggaggcgtgctccaggattgccgagttctgcgatcgccactacaaaaaggagtcgcgcaatttcattgagcacggactgctcgactgcgatgatgtggccttttga

SEQ ID NO: 1200 - protein, 501 aa, DROSOPHILA
MPSSFANESQFRYQSSRNRASCTSRSPSEPESPAPVTPNCDVVDQALAELQLQSQDIRKQQDLVDTTATSSSSRKRSGWEIKGSKLSLNTHNRIRNIVESLKIKPNPEKPMIPLSIGDPTTFGNLKAADETMKAVLHSLESGKYNGYASTQGHEIARKAVAKYSAHQRPDGEIDANEVVLCSGCSSALEYCILALADRGQNVLVPRPGFCLYYTLAQGLDIEVRYYDLLPDQQWRADLVQLESLIDENTAALLINNPSNPCGSVFDEKHLRELIAICERHYLPIIADEIYEHFVFPGSKHLAVSSLTTEVPVLSCGGLTKRFLVPGWRMGWIIVHDRKNRLRDAIVGLKNMCGRILGSNTIIQGALPDILTKTPQSYFDGVIDVLHSNAMLAYKMLKQVRGLDPVMPNGAMYMMIGVSIERFPEFKDDTHFVQEMVNEQSVFCLPGSCFEYPGYVRIVLTVPGAMIEEACSRIAEFCDRHYKKESRNFIEHGLLDCDDVAF

SEQ ID NO: 1201 - DNA, 5993 bp, DROSOPHILA
gagaccgccacggaatcggagtcagagggtgagttggtttagcaatttgaggggaataatcttttcaaactgatgctgatgcctttccagacgaaaactctctgcgcatggactgggaggcggtgcccagcctgacaccgcagccggagctggcggatcccaatctgatgccggcggccaaccagcagtctaccatcgccttcgtgcgaatggcggccacatcggtgctgcgctggatcaaatgatcgcagaccaacagacgtccgatctttcggctatatcatcatgagacacgcgtgttatcttttacaaattagactaagtaatcgtttctgtgacagcacgtcggtgtttatcggcagttgctggttttagcgttatcctttggtttacagaactaattttgtatcaattatatatatacatatatattcgctgtgtgtaaagaaaatgcgccttttggatttatttctattacataacttattcgcctttatttaataaaaatggttctctataaataaatatatataaatttgctttattaatgcttgcatagtacactgacttagtaggtaaacgactcaatgagaaacaataattaaactggtgcaataattggaaaatcggcagacacagctgcgaatgaaacctacctagaatcagcactagaatcttagattagaatcgcaagggaacgagctgagtgaccctagctaaatgaactttgtgggcagttgttgcgtggatgggcgagcagctccagtcgtggtcaccacatcgccgccagcgctgggctgcggcaggctgggtttaacgaatacttgtggcagtgtgttggcagaggctcccacctgggcggcggacatggagacggagccgttggccagcaggtcgtagcgcggcgaggcgtggctcatcgtggagagcacgatggcggcggccatcgcctcctggttgtaaaaggccgtcacagcagccggaaggggctgctgtgcggccgatcccgaatgtcattggcgcgtgggcgtactgggcgctgaggatcccattcctccgcttgcgcccttgacgctgttcggcgagaaagccgcttgaatgaattgcttttccatttccttcagatttgacatagttttcattatatgcggatcggtgagatcgtacactggacccagcgttcttgggctattgtagatatacatgttattcgcgctgtagcccagggatccatttacctgccccaccgcacccaaagacgaccgacctctgttctgagtcttgttcttgggcttagactggactttcttttggggcttagaggcaggaaaaactcccacaatctcaacgccatccgactcgctgctgctttccctggctaccgacgtcgtttgcgcggcctttgagatggcggtgatgacagtggtggtggcagctagctgcttggacgtctgaagtatatcgctggtgcattgatagtcatccaggttgatcacatggggagagggccgagctcccacaatcaccttggcttggccgtctccagaatgcggactgggattcccgctggctgccagggaggcggccgtgatcagattgtagaaattgttgctggtgttaaggtcaattttccggctaggggatgccagatccagaaccgtactggcggctgctacggcggcggcattgagtgctgctgcctgagccgaggtgctcggcatggagagcagcgtgtccaggtggggcaggtggttgttgttattgctaatggctggtatactgacggccgccgtggcagccggcgccagctggaattgcggatgcggagtaagttgcggttgcagcggtacctgcttagccacctttttctttggcggcttgctggtctgcttgggcatctccttcagctttcgcttcagactgttggaggaggcacttgtagctgagtccgtatcggagttacctcgagatcgagggtcctccactgcctttaggtagctgcttgccggcggcatttgctcaggagcagatacaactccaacgggcttgggcgatgcggacgccggcggtgcctttggcttctcctttgctttcagcttggcgttcttgtagcgtgttatttccctttgcaactcatccaaacgcatccagcctggcggccacagttccaccaccttttccttgagataccaattgatgaactcctccaacgattccttgcgcttggctaggaaagcgtaggacgtccaacgcgcttggtacacatcgtacagcagatggcgtagctcgctggtccactggaacttcttacgcggcattttgggcggcagttcggagttcacgtccgcagctctgaaaataataatcataatctaaaggaacctaatcgttatttcgcttaacaacaatcttacgcctgttcagcaaatgtgcgcagttccgtctcatagttggccaccgccttaggcatgaccacagctacagcccgccgcagcttctccagcataatggtggacttcctcttctcctccttcgcccgcacttgtttccctttgcgcagcatgtagtacttgggcagttgcagctgatactcgatgtgggagaagaccatgttgcgctcgttgcggtccgtgcacagcaccgcctcgtacaccctggtgtaggttaatggatataagccttaaatctgtacttgatgtttacatcggctgcaaactcaccgaagcagtagtggcgaaagcttcacatccagattaaacttcttgccgcacatgtctcgactcttcaccgcttctttgaagctgttgactgcggtcacaatgtccgcatccaatgtggtggggagcagagtgtcggcggtgcgaagatcttaaaaatgaacacgtgaaagggtgatttcaaccaactaatactgtatatgtaactcactttcctgcccatccttgccatgctgaccggcctgcctatctgcccggccgtgctcagactccatatcgctgctatcgctgctggacacgtcggtggaaacacacttcagctcgccgttgccgacgcccttgacagctgccgtgccgctctgcgacttcaggaagctgtctcgcttggcctttagcatgtccttgaccgttgtggtcttaaccaccttctttaaagcttgcgcctgggcctgactctgcggcagggactgaagctgacttgatggctgagtctggatagggtcttggccgtcttccgtgtccgaaatctccaccgtgctgggtcgtggcgagtttgaggatgaggaagtggtgatcggcttagtcggcggcttcttgccactcgtcaaagaacttgagcttggtttggacttgcccgtaacgatgaccttggcccgcttagcttgatgattgtctttgtacttgctgctggatttggctgtagcagcagagtcctcgtcctcaagactttcactctcggagtcgtcttcggagtcgctttcatcgttctcctcggagtcgtcctcggaatcgctctcgtcgtcctcctcattgttgccatcatcgttttcgtcatcatcgcccgaggatgacgatgagctttccgagctggacgagaccatgcgcttgcgtgatcgctctggcattttgatgatggcatctgttcgagtggtgtaggacttcttggtgaggttcttgaactccagtgcgccacagttgatgtagaagccgccctccagagtttccgcctcctccggtatgatttcgtcgtactggacagaacatagagtttaaggtaaataatttcagtgcattcgtcggaaatatttcttgttcttacggcttccgtgttgtcgatgaatgagtccgactcatcgtagcccattccaatgtcccggtagtcgtcctttttgctcttccccctgcctgtggcataggagttgccatacttggcctccagctccttgacgatccgtgccacatcgtcatcgttgtcggcaaagggatcagtgcttgcggagccattggtagtgctcacctgcttcagctttttggtctttttctacggattgcaagggtttagaaagcgatcctccaactgagttatacactcttaccttttccaaatacaaaagccgggagtagttaaactcgggatacttgttcgaatcggtctcgaacagatcgagtttgatgcggatgcacttggcagtctttgtcgtgggtttggagctgttgtcgggtgcagcggacgcagcatcaggctccaggatgttgctgccgaagcgcgagaagcccgcatcgccctggatgatcgaggtgagggtgacgcgcttgtgctcgcccccctttgacatttccggcgggcagagttacggatattcagtgggatagggtttcctttgagccgaaagggccttcccgcccttttttttcgaaagagccgcgtgttcttcgttgctctttccctctctctctctcgcagccaaacaaaaacaacagagacgtcgctgctgctgatgctcctcctcctccttttccgctgcttcctcttcttctggggatgtctgttttaggttttctgcacgtacaccaagcaaccacaaccacttaataaccgtggcaatttcactctgagctgcactttcttgttgtcgccccacaaacactgctttatcaacataaacaaatggcgaggacctgcgccggattgcactactttaatcgccgcccgctttgcagctgcatccgccgaccacggccacgaataattgtcacttttctgggggaatgaaaaagtggaaactttttggggggtttcaaattggttggcttgccggcacgaaaacaacacagtctgtaaaagcagcgcaccggggattaaacacacgcaatcgacgctaccaaaggggacatttaaacgattcgaccaggcgcttttcgcacggccaggagcgcgattcttaaattgtttcttgttaaaatcctcaacgctacattctctccgctccaccccgcaccaaagatccgaccctgcttttggctttcgcactcgcgttgcgcagcactggtcgcggttttcgcaaattactccgagccgttcacactgcgcgcagcacaagccgagacttgctgcggctggctgcatttggcaatatttagttgttatgggtgctatgtatttccaaaattccgttagttagaaattcattagcttggcatctagctcatttttaaagtaaagtttcgagctaccaagttgataggttacgtaaaatatataggtggcttatgctgttgtaagcttaattgtttaaaaaggacccaaaatcaaaatataatgtaaacttttttataacttacgcggctctaaaactttccaacaagtaacgagatctggcttgaaagcggccaacactcgcactagcttttgtgcatccctgtgcagtgccacattccacacacatttctgctttgttttgaccagaacgggccgttgtgcagcactgttcggcacagctgttcagagtatggggccgcgggtggtgggcagattttcttggggcgattcagtattatttcgattgtgaaggagtttacttcgtagaaagtcaagtgctcgccgtttaattagcgcaagtgcaagtgagtcgcagtacgtgagcttgggggcttaatttcatgcgcccgctccacaacaaaaacaagcgaaacgaaaagagttgcatgcacagaaattcgaattcggtcgaaactgcaaggtgttattataacgggaatggccagtgctcgttatcgggtgaaaacgattaggattgtgcaattaacaaaagtgtgccgtgctgctcttttcacaatccaatccaacccaatccccaactcccccacccccaatccccaagtggcaccacacaaacactagcacataaacacttatgctgcctttatgcttgcagccccactcgagctcttttatgtatgtatgtacatatttatccaacgaatgcaagtgaccga

SEQ ID NO: 1202 - DNA, 3682 bp, DROSOPHILA
cggggtggagcggagagaatgtagcgttgaggattttaacaagaaacaatttaagaatcgcgctcctggccgtgcgaaaagcgcctggtcgaatcgtttaaatgtcccctttggtagcgtcgattgcgtgtgtttaatccccggtgcgctgcttttacagactgtgttgttttcgtgccggcaagccaaccaatttgaaaccccccaaaaagtttccactttttcattcccccagaaaagtgacaattattcgtggccgtggtcggcggatgcagctgcaaagcgggcggcgattaaagtagtgcaatccggcgcaggtcctcgccatttgtttatgttgataaagcagtgtttgtggggcgacaacaagaaagtgcagctcagagtgaaattgccacggttattaagtggttgtggttgcttggtgtacgtgcagaaaacctaaaacagacatccccagaagaagaggaagcagcggaaaaggaggaggaggagcatcagcagcagcgacgtctctgttgtttttgtttggctgcgagagagagagagggaaagagcaacgaagaacacgcggctctttcgaaaaaaaagggcgggaaggccctttcggctcaaaggaaaccctatcccactgaatatccgtaactctgcccgccggaaatgtcaaaggggggcgagcacaagcgcgtcaccctcacctcgatcatccagggcgatgcgggcttctcgcgcttcggcagcaacatcctggagcctgatgctgcgtccgctgcacccgacaacagctccaaacccacgacaaagactgccaagtgcatccgcatcaaactcgatctgttcgagaccgattcgaacaagtatcccgagtttaactactcccggcttttgtatttggaaaagaaaaagaccaaaaagctgaagcaggtgagcactaccaatggctccgcaagcactgatccctttgccgacaacgatgacgatgtggcacggatcgtcaaggagctggaggccaagtatggcaactcctatgccacaggcagggggaagagcaaaaaggacgactaccgggacattggaatgggctacgatgagtcggactcattcatcgacaacacggaagcctacgacgaaatcataccggaggaggcggaaactctggagggcggcttctacatcaactgtggcgcactggagttcaagaacctcaccaagaagtcctacaccactcgaacagatgccatcatcaaaatgccagagcgatcacgcaagcgcatggtctcgtccagctcggaaagctcatcgtcatcctcgggcgatgatgacgaaaacgatgatggcaacaatgaggaggacgacgagagcgattccgaggacgactccgaggagaacgatgaaagcgactccgaagacgactccgagagtgaaagtcttgaggacgaggactctgctgctacagccaaatccagcagcaagtacaaagacaatcatcaagctaagcgggccaaggtcatcgttacgggcaagtccaaaccaagctcaagttctttgacgagtggcaagaagccgccgactaagccgatcaccacttcctcatcctcaaactcgccacgacccagcacggtggagatttcggacacggaagacggccaagaccctatccagactcagccatcaagtcagcttcagtccctgccgcagagtcaggcccaggcgcaagctttaaagaaggtggttaagaccacaacggtcaaggacatgctaaaggccaagcgagacagcttcctgaagtcgcagagcggcacggcagctgtcaagggcgtcggcaacggcgagctgaagtgtgtttccaccgacgtgtccagcagcgatagcagcgatatggagtctgagcacggccgggcagataggcaggccggtcagcatggcaaggatgggcaggaaaatcttcgcaccgccgacactctgctccccaccacattggatgcggacattgtgaccgcagtcaacagcttcaaagaagcggtgaagagtcgagacatgtgcggcaagaagtttaatctggatgtgaagctttcgccactactgcttcgggtgtacgaggcggtgctgtgcacggaccgcaacgagcgcaacatggtcttctcccacatcgagtatcagctgcaactgcccaagtactacatgctgcgcaaagggaaacaagtgcgggcgaaggaggagaagaggaagtccaccattatgctggagaagctgcggcgggctgtagctgtggtcatgcctaaggcggtggccaactatgagacggaactgcgcacatttgctgaacaggcagctgcggacgtgaactccgaactgccgcccaaaatgccgcgtaagaagttccagtggaccagcgagctacgccatctgctgtacgatgtgtaccaagcgcgttggacgtcctacgctttcctagccaagcgcaaggaatcgttggaggagttcatcaattggtatctcaaggaaaaggtggtggaactgtggccgccaggctggatgcgtttggatgagttgcaaagggaaataacacgctacaagaacgccaagctgaaagcaaaggagaagccaaaggcaccgccggcgtccgcatcgcccaagcccgttggagttgtatctgctcctgagcaaatgccgccggcaagcagctacctaaaggcagtggaggaccctcgatctcgaggtaactccgatacggactcagctacaagtgcctcctccaacagtctgaagcgaaagctgaaggagatgcccaagcagaccagcaagccgccaaagaaaaaggtggctaagcaggtaccgctgcaaccgcaacttactccgcatccgcaattccagctggcgccggctgccacggcggccgtcagtataccagccattagcaataacaacaaccacctgccccacctggacacgctgctctccatgccgagcacctcggctcaggcagcagcactcaatgccgccgccgtagcagccgccagtacggttctggatctggcatcccctagccggaaaattgaccttaacaccagcaacaatttctacaatctgatcacggccgcctccctggcagccagcgggaatcccagtccgcattctggagacggccaagccaaggtgattgtgggagctcggccctctccccatgtgatcaacctggatgactatcaatgcaccagcgatatacttcagacgtccaagcagctagctgccaccaccactgtcatcaccgccatctcaaaggccgcgcaaacgacgtcggtagccagggaaagcagcagcgagtcggatggcgttgagattgtgggagtttttcctgcctctaagccccaaaagaaagtccagtctaagcccaagaacaagactcagaacagaggtcggtcgtctttgggtgcggtggggcaggtaaatggatccctgggctacagcgcgaataacatgtatatctacaatagcccaagaacgctgggtccagtgtacgatctcaccgatccgcatataatgaaaactatgtcaaatctgaaggaaatggaaaagcaattcattcaagcggctttctcgccgaacagcgtcaagggcgcaagcggaggaatgggatcctcagcgcccagtacgcccacgcgccaatgacattcgggatcgg

SEQ ID NO: 1203 - protein, 1002 aa, DROSOPHILA
MSKGGEHKRVTLTSIIQGDAGFSRFGSNILEPDAASAAPDNSSKPTTKTAKCIRIKLDLFETDSNKYPEFNYSRLLYLEKKKTKKLKQVSTTNGSASTDPFADNDDDVARIVKELEAKYGNSYATGRGKSKKDDYRDIGMGYDESDSFIDNTEAYDEIIPEEAETLEGGFYINCGALEFKNLTKKSYTTRTDAIIKMPERSRKRMVSSSSESSSSSSGDDDENDDGNNEEDDESDSEDDSEENDESDSEDDSESESLEDEDSAATAKSSSKYKDNHQAKRAKVIVTGKSKPSSSSLTSGKKPPTKPITTSSSSNSPRPSTVEISDTEDGQDPIQTQPSSQLQSLPQSQAQAQALKKVVKTTTVKDMLKAKRDSFLKSQSGTAAVKGVGNGELKCVSTDVSSSDSSDMESEHGRADRQAGQHGKDGQENLRTADTLLPTTLDADIVTAVNSFKEAVKSRDMCGKKFNLDVKLSPLLLRVYEAVLCTDRNERNMVFSHIEYQLQLPKYYMLRKGKQVRAKEEKRKSTIMLEKLRRAVAVVMPKAVANYETELRTFAEQAAADVNSELPPKMPRKKFQWTSELRHLLYDVYQARWTSYAFLAKRKESLEEFINWYLKEKVVELWPPGWMRLDELQREITRYKNAKLKAKEKPKAPPASASPKPVGVVSAPEQMPPASSYLKAVEDPRSRGNSDTDSATSASSNSLKRKLKEMPKQTSKPPKKKVAKQVPLQPQLTPHPQFQLAPAATAAVSIPAISNNNNHLPHLDTLLSMPSTSAQAAALNAAAVAAASTVLDLASPSRKIDLNTSNNFYNLITAASLAASGNPSPHSGDGQAKVIVGARPSPHVINLDDYQCTSDILQTSKQLAATTTVITAISKAAQTTSVARESSSESDGVEIVGVFPASKPQKKVQSKPKNKTQNRGRSSLGAVGQVNGSLGYSANNMYIYNSPRTLGPVYDLTDPHIMKTMSNLKEMEKQFIQAAFSPNSVKGASGGMGSSAPSTPTRQ

SEQ ID NO: 1204 - DNA, 7829 bp, DROSOPHILA
ctatccgccgagctttgaggcactcgccctcgttcccttcaacatcaatccgcactatctggatccggaggcgggtagtcggcacaagggcgagacgcgagacgagcggctggaggagttcgtcgcataccatggactgcccgtgctgggtcttcgcgagggcaccagtgtccgggttcagggcgagaaggccatcctcctgggcgatcgcaatgccaagctgttcaaggcgtaagtacacacttccaatcggacaaattgggtttcatggtttcttacattcaaataactttaatgttatttatacaatttaaatgtaatttattttcgtttatttttcagtgacggtggcaccgaggagctagcacccctagcggatctcaccttcctgctgcagaaataaccaagcaaaacgatcgaattaaagagaacattgatgtttattgtacatatgcacattcataatttgttttattctgcaataacaacaattcctacacgtaagcagtacacatacagtagttgtacactatgactaaatgtataaaaagtttggatagaggtataacccctgacgagtgtacatatatctaataaattttgtaataaattaatcggatttcccctcgtaaatcgtaatgataagaatttgactggcagacttcttattcgatgctaaaactgatgtgctggcaaaatgatcaaatggataacatggatacactaacaatggacatcggctaaatgaaactggcaagcacttaaacaatatatatatttttttttatttacaatgggctttttcattgccacaaaagccctgatagctagcaatacttttggattgttattttgtaggcaaagtttcgatagaattatggtttatgttttcaggcagccgatgctaagacttaagctctaacttttaaagaggaacacggtcaaagtaagcactccccgatttagaccagttttttaacagtaattcctttttgttttttgtttttttttttggcacaccgtctttgagagagcccatttatacagggattgtaacactttgaggcaaggcggcatctggttatttgtcgtacagccaaatcgttcgtttcacttagattagtttagttgtataacacttagcttaactagtcgtttaaataggagtcaatggtgcaatgctgcctgcgtaacttattaggaatcgttaatagagatatgtggcgtatgctaagtatttacatgcgaaaatcgaatgtctgttgaatggctcgaacaacaagtgtcccacatttgtcctacgagttttggcagctaaaactacgctacgttaataactaactaaccaactaactaattgctgtgtctaccatttttgagcattgaaagtttcactttaaagcaagcaacaacgggaatcgcctaggcccaaaacactaagttcggattgagataggtccactgctggtcttatacttgggtcccagtcccaccatcatttcatttatgaataggatttaatttaagccttggatgcgagtataagagttggcatgcacacacacacacacacacacgcacacagggatcacattcattcgttcagctcaatcaatcacacggtcatgtacacaatgggaatatcttaaaaaggaactgatgatattacaggcaggagctggagctggagctggaaaggagccttcggatcccaactatttgtgtagaatacttttgtcctcgtagcgtattatggcgtcgccgatctgcttgcgcgacgccaggtggatgcactgctcccgaccgcagcgttccggcacgctctgcggcagcgttcctccgcgtgccaagtgattccgcacatcctggccgaagcgcaaattcggttccactccgcgcagtatatgcaccgagtgctgtgccgccacgaacatatcgagaatgctttccacgcccggtggtcgcgtctcctcgccaggctgcagcagcagctggtcgatgtccaggtcgctgcgtatgatcggcagtccctgcggatgtaagagcttgcgagctgaagcggaaggagtatggagtaaataaaagtccaattaactggaaaagtttcctccatcactcaccctggacataatcccgactatagaaagcgatcacgtcgtggttatggcgatcgaagtaaccgctgctctggctcacgtcgcaggtgtcgcactcacggcagaaatgcgcccagcggcatgggtacatctggaagccgattggtgcgtacacctggaagccctgtatcgtgttcatgcgcacgcgattcagaaagtccgccttgaagaccatgcctggcgtggccagcagcacgagggattcgaggcccagtttgggcagtgccagatccgcaaccaccagactgagaagctggcgtggtccatacatggaggcgtgcagcagccagctctgcggatccaccggttcgctcagctgctccggcagccggatggacacccaggcgatccgagagccatcggtcttgtacttagatgacaagtcaagggccagtgtcttcagtgctttgaagggatcctcgtcgcccttgctgggcgactccagtcggtacatgaagatctgagaggtaaaatagtgattacattattctgccttcaaattgtatatgctttcgatctcaccagcaacaggaatgtgttgtcctgattttgcatacaaatcctttcgtactgttccacaaacagcagagcatccggcacctggtgctcaaaggcgggcaccaacatggcaattcttgtgctctcggtgacgtagggcgagggcaccacctccacgcgacccagtggcttaaccacctcgaagctcttgatcacgagccggcgactgcgacccgatccctcctgcagattgagatgcagctggtagtccatgccgcgtgtggcatcgaacttccgataggcactgtgcagactgtggtagctcaggcgcggatgcttaagtgcggcatactgtagtgctatctccaggactttggcaaagtcctgtgcctcgatccgcgacagcgttgccaccgcatgctccgcattgccattgggcagaaagttgtgcgtcccattgagcagctgccacgtgaggatgtcgtgacgcgtctccggcgcactaggtggcggcacgcccaatggccaccggatctcgagaatcttgttcgatatactcccattggcaatccggtacgatttctgctctagagcatagccccgctcctgcaccttctccagatggtgctgcaaaccaaggggttttcaatattaataatcattgtttttccttggcttaccttggagtagtaggcatgcaatcggtagaagtcctccggcgtctggacgggatacacggtgctggcattgcggaaggcctcctctttggccaattcgctgaattcgcgatgacgacgacccggcgcatccaaggcgtagctaaattgccgcatgccctgcaagtcaataaagatacagatacatatagttggagttgagcatggccatgggcatgggcatgggcatgggcatggtcaaggtcaggttcagggccaacatgctcgattccgtggaaggaaagtcgggctgcggatcccacggctggaacagtgccatatgctcgcaacaagcgatccctttttacgatccataaaataaaaggaacaagcataattaaattaacaatgtcgcgctaatggaacaaagatcgcccattcgatcgcggatttgcccacatctttggcacttctccatacactctgtgcatttgtatccatttggagcattttttaattggcccgcgcacattaatcaattccccagcgaattgcagcttttgaagacgccgttcggcaaactctttaggccagttaattaagcgaaacacacttgcatatcttcgcttttgtttaaacaactgcaggcgaaataataacattcagcacggcttcccataattaaaagaaaatcaataaaaaaaatatggattctattgcaatattttcatttaacaattaatattgaggatggcgaaactttggtttaaataaaccaaactatttaacccatgtataattctaaataataatcaaatgagtggttatgtttgaagattgaaaatagttgacaaatgtttacctaatggtctgctgtttcctcagaaagaagatgacagaataaacactaaatttcaactgaaacatacagctcatggctggaattcactgtggtattataatcatcactactaaacatttttctgcagagaccaccaccacacataagacataaatcattccatgctgccttaccgcataaataaaattcaatccaaacaaaccagcaatcgaaatcaaacgaaaggaaaactaacatctcaacggaaaaagttccatttactcacggttgttgttcgactgtttatgcaaaaaataagctgcgtgttcatataaacagagctataatcagaaatgataatgaacaagacacacccacttgtactttcgattagaggaagtacgatgtttagtacgagtattaggataaataaaaaataatatatatatacagacaaataaattagtgactttattaaattgcttgattccccacattaataatatagattgaataaactgagaatgcaatttttatctataattttgaataagatacttataagtatcttaagatgttcgtaaagtggctctcaaactgtcacgactcgaatgttaacattcacagcttccccgcccagtgccacgcccacccagcgcacacttactggccggcaaagaaattcttgtgtttgctacttggaaattaaataaactgtgttgtccgtccatcaactgtgtgattctggtcttgctctgaatttggttactcatcctgctctttgcgagaacagaggcgtgccaatttcaaaggcttgggtattaaaattacacatatgctatggtatttcgctaatacagaacataatattatataatataatatgtataatacaagaatccccttttcaaacaaccaacgcgcacgccactgggctcaaaagtacggtgctgttggtgctttgctcttaattttctcaacttttcagggtcaatgtgcagcagtgttggttgagttttcgtaataaaagcaaagctaatttagcgatcagtaattattatactaacgtatactgttcggtgtaattgttttacatttgaacaaatgtcaaattgctttttttgtattttactgctcaagcgtacgaaagactattgatttcagaaaacatccgaaccggtatctctggcactttgtatcaatgaactgaaccaaagatcaagatacatttgtgcgtttgaatgtctgctccgtctgtgtatttggtttttttttttactcaacagcaaattgtttaaataaataaaaagacaagtggatggtgcgctcattgatatttcaacccaaaaacgattttgagaaagcataaatagaagatagatagattgatagatagattgatagatagactgatagatagatagatagatagatagatagatagatagatagatagatagatagatagatagatagatagatagatagatagatagatagatagatagatagatagatagatagatagatagatagatagatagatagatagatagatagatagatagatagaatagatagagataaattgcacatgcttcaataatttctatctaagatcggcgactcacctgaaagctctcctggcatccggccacccgactggcgtacttgacgcaccgcccgatgttgacactatggtcactggtgcttccgatccggacgcagcgctccagattgttgcgcatcttgcgtatgacgctgctgctgagcagaatgcccgcctccaaggagcaatagttgcgatcactggctccgggtgcctcctcctcgttcgccggcggttcattcgactggccatcggcggaggcaccgccacccgaaggatccaggccgatgcgtgcgccacccatgtacaggtcaaaggtgatgctcatgtgatagagcaacttcaccagcttacgcgcatccacgtagacggtatcgggcaccaacaggaaataatcgtactcatccagatagttgtccgcaatatacttgaccacgtggaatggccggcgactctcccgcgtgtccgtaaatcccacgatgttcttcagcttgtagttggtctttacactgtccgcataaatgaagaacttgatcttgttcaccaggtgggcggtggtgcggttgaaggccgtcgcaaaggtgttgatgtgctcctgcgaggtcatcaccccgatgaagagcttctcccgtatacccaactctgaggagtagtatcgcggtcgaatcacatttttcacctgcaagaaggaaaataaataaaattaaaatcattttattaggaaacatattaataatattcaagagcatgagaatatcggaagtcccttccatttccggattaccagctctgtgccctgatcttgaaaacatctccaatgatttgggatgcataaatatgcgcgatatctaagtggatcgatttgtgggcagaattactgcgcattctacgtgatttcgtttgaaaatctgatttatttttaaaacgaactggattcctcgggacataagagactttcaattttcaaccacgatatgggaagggtggaaagatcattcaccaattccaattagaaatatgagtaatactatctcctgatattcacctgcctatttttagcccctgacatgcactccaaatcgtataaaatgcgttaagggtcttttatctgcccaattacatctatattcctccacgcttaagtactcaaaacgacgaactcgtaaaccgactcttctcgagtggctccaatttttcgttggccacttgagggcacattttaattctattcctctacgattagatgactgtccaaagtttggctggcagcaacgatgacgaggaattccccctttgagtagctattttatccactatcttgtcgaggtagaaaacgaaaaaaaaaaaaaataccgattgcgtttcccagaatgcctagatacagtgataataatgtcaggtcttggttttaataccatgtgattccagaagttgacaactagattctccgggaacgtcgaaagaatatttattattatttgttatgccttaagaagccacatgtgacttgtcgttattaagcttcctttgtctcatttaatatttaaattcaactaagcataagcatattttacaaattttatattttacttgtatgtacttttgaatatttcaacattttgcatggctttttaaagctccataaaattgctataaacaaatatactcacttaatttatagcgccaaatttttttaatggtttctgcgcttttgttttcgaatttaatgaaatagaagtatggcccgaatttcgtggaactgcagacttttgtgactcactgtgccaggtaattttttacttttttctttttgttttttttttttgaattgaaacaggcacaaattcgtaaacacacttttgctgccgtttaagtgggcggcggttgaccgcccttcgcaatttgcatgtatgctaatttacgtactagccatcttaacccaaaagagatgcgtgcaaggtggtggccactcctcccgatgcttccatccgccaggccagtgactccaccttggctgccaacggagctcgtcgaataaacaattgtgccaagttgtgcaagcactttta

SEQ ID NO: 1205 - DNA, 2989 bp, DROSOPHILA
atgtcaggggctaaaaataggcaggtgaaaaatgtgattcgaccgcgatactactcctcagagttgggtatacgggagaagctcttcatcggggtgatgacctcgcaggagcacatcaacacctttgcgacggccttcaaccgcaccaccgcccacctggtgaacaagatcaagttcttcatttatgcggacagtgtaaagaccaactacaagctgaagaacatcgtgggatttacggacacgcgggagagtcgccggccattccacgtggtcaagtatattgcggacaactatctggatgagtacgattatttcctgttggtgcccgataccgtctacgtggatgcgcgtaagctggtgaagttgctctatcacatgagcatcacctttgacctgtacatgggtggcgcacgcatcggcctggatccttcgggtggcggtgcctccgccgatggccagtcgaatgaaccgccggcgaacgaggaggaggcacccggagccagtgatcgcaactattgctccttggaggcgggcattctgctcagcagcagcgtcatacgcaagatgcgcaacaatctggagcgctgcgtccggatcggaagcaccagtgaccatagtgtcaacatcgggcggtgcgtcaagtacgccagtcgggtggccggatgccaggagagctttcagggcatgcggcaatttagctacgccttggatgcgccgggtcgtcgtcatcgcgaattcagcgaattggccaaagaggaggccttccgcaatgccagcaccgtgtatcccgtccagacgccggaggacttctaccgattgcatgcctactactccaagcaccatctggagaaggtgcaggagcggggctatgctctagagcagaaatcgtaccggattgccaatgggagtatatcgaacaagattctcgagatccggtggccattgggcgtgccgccacctagtgcgccggagacgcgtcacgacatcctcacgtggcagctgctcaatgggacgcacaactttctgcccaatggcaatgcggagcatgcggtggcaacgctgtcgcggatcgaggcacaggactttgccaaagtcctggagatagcactacagtatgccgcacttaagcatccgcgcctgagctaccacagtctgcacagtgcctatcggaagttcgatgccacacgcggcatggactaccagctgcatctcaatctgcaggagggatcgggtcgcagtcgccggctcgtgatcaagagcttcgaggtggttaagccactgggtcgcgtggaggtggtgccctcgccctacgtcaccgagagcacaagaattgccatgttggtgcccgcctttgagcaccaggtgccggatgctctgctgtttgtggaacagtacgaaaggatttgtatgcaaaatcaggacaacacattcctgttgctgatcttcatgtaccgactggagtcgcccagcaagggcgacgaggatcccttcaaagcactgaagacactggcccttgacttgtcatctaagtacaagaccgatggctctcggatcgcctgggtgtccatccggctgccggagcagctgagcgaaccggtggatccgcagagctggctgctgcacgcctccatgtatggaccacgccagcttctcagtctggtggttgcggatctggcactgcccaaactgggcctcgaatccctcgtgctgctggccacgccaggcatggtcttcaaggcggactttctgaatcgcgtgcgcatgaacacgatacagggcttccaggtgtacgcaccaatcggcttccagatgtacccatgccgctgggcgcatttctgccgtgagtgcgacacctgcgacgtgagccagagcagcggttacttcgatcgccataaccacgacgtgatcgctttctatagtcgggattatgtccaggctcgcaagctcttacatccgcagggactgccgatcatacgcagcgacctggacatcgaccagctgctgctgcagcctggcgaggagacgcgaccaccgggcgtggaaagcattctcgatatgttcgtggcggcacagcactcggtgcatatactgcgcggagtggaaccgaatttgcgcttcggccaggatgtgcggaatcacttggcacgcggaggaacgctgccgcagagcgtgccggaacgctgcggtcgggagcagtgcatccacctggcgtcgcgcaagcagatcggcgacgccataatacgctacgaggacaaaagtattctacacaaatagttgggatccgaaggctcctttccagctccagctccagctcctgcctgtaatatcatcagttcctttttaagatattcccattgtgtacatgaccgtgtgattgattgagctgaacgaatgaatgtgatccctgtgtgcgtgtgtgtgtgtgtgtgtgtgcatgccaactcttatactcgcatccaaggcttaaattaaatcctattcataaatgaaatgatggtgggactgggacccaagtataagaccagcagtggacctatctcaatccgaacttagtgttttgggcctaggcgattcccgttgttgcttgctttaaagtgaaactttcaatgctcaaaaatggtagacacagcaattagttagttggttagttagttattaacgtagcgtagttttagctgccaaaactcgtaggacaaatgtgggacacttgttgttcgagccattcaacagacattcgattttcgcatgtaaatacttagcatacgccacatatctctattaacgattcctaataagttacgcaggcagcattgcaccattgactcctatttaaacgactagttaagctaagtgttatacaactaaactaatctaagtgaaacgaacgatttggctgtacgacaaataaccagatgccgccttgcctcaaagtgttacaatccctgtataaatgggctctctcaaagacggtgtgccaaaaaaaaaaaca

SEQ ID NO: 1206 - protein, 757 aa, DROSOPHILA
MSGAKNRQVKNVIRPRYYSSELGIREKLFIGVMTSQEHINTFATAFNRTTAHLVNKIKFFIYADSVKTNYKLKNIVGFTDTRESRRPFHVVKYIADNYLDEYDYFLLVPDTVYVDARKLVKLLYHMSITFDLYMGGARIGLDPSGGGASADGQSNEPPANEEEAPGASDRNYCSLEAGILLSSSVIRKMRNNLERCVRIGSTSDHSVNIGRCVKYASRVAGCQESFQGMRQFSYALDAPGRRHREFSELAKEEAFRNASTVYPVQTPEDFYRLHAYYSKHHLEKVQERGYALEQKSYRIANGSISNKILEIRWPLGVPPPSAPETRHDILTWQLLNGTHNFLPNGNAEHAVATLSRIEAQDFAKVLEIALQYAALKHPRLSYHSLHSAYRKFDATRGMDYQLHLNLQEGSGRSRRLVIKSFEVVKPLGRVEVVPSPYVTESTRIAMLVPAFEHQVPDALLFVEQYERICMQNQDNTFLLLIFMYRLESPSKGDEDPFKALKTLALDLSSKYKTDGSRIAWVSIRLPEQLSEPVDPQSWLLHASMYGPRQLLSLVVADLALPKLGLESLVLLATPGMVFKADFLNRVRMNTIQGFQVYAPIGFQMYPCRWAHFCRECDTCDVSQSSGYFDRHNHDVIAFYSRDYVQARKLLHPQGLPIIRSDLDIDQLLLQPGEETRPPGVESILDMFVAAQHSVHILRGVEPNLRFGQDVRNHLARGGTLPQSVPERCGREQCIHLASRKQIGDAIIRYEDKSILHK

SEQ ID NO: 1207 - DNA, 10979 bp, DROSOPHILA
gaatcttcgccatcaaaagttaaccatccaccagcagccgctccatcaggcgaaaagtgagtaggctatgtgtagataatgtgttagttaaagagacaaggtaaaaaaaaaggcaaaatacctttacacaaatcgtactgatttgagttttgcccactgaattcgctttgaattggagtgggcatggctgcttttggttactgctcctttggtaatgacaatggattcgccagtggggatgggactgggtcgtatagtacacatatctacgcatatacggcgagaagtggttgctcattcgggggttgcaagtgccatccgccatccgagctgactgtcttgattcacacagaaacaaattttggttgctctcgaagatctttgttgaaattcctatacaaaaagttgatgcaaacgatacactcaaaacaaaagcagatcaataaacttggcctgtggatttgaaaaattgggtaaaacaggctaaagattataaattacatatcacaggatatgcaactaatgaattgaaatgtctgtctattgattgattcatttgcatatatattttattactttataatataacactttgagctattttaaatattttttttacgcagtgcactcagtgcctgtgtgagtgggtttgagtgctgcaccttcagcccaccttggcagctgttcgaatgtaaatattgacaaaggtcttggctctaattgccgcctagttggtggagggcatccttggaaacatggaggtgctaaatactaatacgtagagaacatgaaacataatatatattgtacatgtaatttataattcaatatatttacccttcaaaacttaagaataatcttagtaatgttgaaatatgacagcagtttggcggttaagtttacttctaactgatctagtcaagtaactaactaatatgccccctctccacacagcaggcataacttagcgaccgtttcagggtcaggatgcgccgcttgaatgattgaccgcctacagattcgtcgcttgggtgcagctgctagaaacaaacgcgcaggaggcggaggcggagctggaggcggagcagtaggcagcggcggcgccggcggaggaggaggaggaggaggagcaggggcggtaccgggagcggctggagcggcgggaacaggaccgatcactggagcgtcagcaacagcggccagcggatccagcggcagtggtggccaccaccagcaccaccaccattcgcatccgtattccacgagcggcatcaacacgccggcgacggccagcaccagttcctccagcggcaacagcttgacgccgcagcagcagcaacagcagcagcatccacaccatcagtcccatcacgggcatcactacgcacaccatcagcagcatacgcatcatcacgcgccgccgcactcgcaccatccgcatccacatccgcacgggcatccgcattcgtatccacacctgcgacactcgcagccggcgtccgccagccagtttagcttcaatccatcgccgggtagcagtcctggcaacggactgggactgggcgctcgccaggatgcggccagtgcgctcaacagtccgacgaccattgtgaactccggtagcggcagcggcggcggcagcagcgtcgccttcggaatgcagccgcaacagcagcagcagtcgttggccggcggaggaggcggtggctcatcggcgacggcggctccatcttcgggcggtggccacaacaatggtgccgggctgggaccggtcgttggtggcggcggaggtggtctcaatctgctcggcggactgggcggcatgggtggcatgggcggcggagcagctgccgccggcatgggcatatgtggcggcattagcagcaccgtgggcagtgcagccatcaccggagtgccgcccattgggctgggcattgccaccggaattggcaacaagatcatgctgggccggaagcagagcctcaagggcggcgaacctttcctcgcggattacggaccggaggaatcgctcaacgagagcgccgacatcgagtgggtgaacaagctgtgggtgcgccgcctaatgcgactgtgtgccctcgtctcactgacctccgtatcactgaacacgcccaagaccttcgagcgttatccgtcgctgcagttcatcacctttgcatcggacacggctgttacgctgctcttcaccgccgagatgatcgccaagatgcacatccgtggcgtgttgcatgtgagtctggtgcactgagagaaatgccatctacttcatcgatactcttttgcagggtgaggtgccttatttaaaagatcactggtgccaattcgatgcttccatggtcagcttcctgtggatttcgatcattctgcaaatcttcgaagtgctggagatagtaccaaagtaagtggacgccccatagttataataattcgattctaacaatataatatataatatataggttttcctatttatccattatgagagcaccaagacccttgatcatgatccgcttcctacgcgtcttccttaaattcagtatgccaaaaagtcgtattaatcaaatcttcaagtatgtatcttgtaaactttaacaacatcatcagctatactatatcatcaactttgatttacagacgttcgagccagcaaatttacaatgtgacactgttcttcctgttcttcatgtccctatatggtttgctaggagttcagttctttggcgaactaaaaaaccattgtgtaatgaataatacggagtacgatctatacaaaagaccgtaagttaacagaaattcaaatgagaaatgttagaacccagttaaatcccaatagaacatggtcagttaattaataagaattcattttcagaattctgaccatcaattcactggccattccggatacgttctgctcgatggatcccgactccggttaccagtgctcgccgggcatggtttgcatgaaaatggactttctgagcagctatgtgatcggattcaatggtttcgaggatattgcgactagtatctttacggtttatcaggcagcctcacaggagggttgggtgttcatcatgtaccgggccatcgattcactgccggcatggcgtgccgccttctacttcagcacgatgatcttcttcctggcgtggctggtgaagaacgtgttcatagcggtgatcacggagaccttcaacgagatccgtgtgcagttccaacagatgtggggggcgcgaggtcacatccagaagacggccgcatcgcagatcctgagtggcaacgataccggctggcgactagtgaccatcgatgacaacaagcacggcggattggcgccggaaacgtgtcatgcgatcctgagatcaccatactttcgcatgctagtgatgagcgttatcctggccaatggcattgtgacggccacaatgaccttcaagcacgatggacgaccgagggatgtgttctacgagcggtactactacatcgagctggtcttcacctgcctgctggacctggagacccttttcaagatctattgcttgggctggcgtggatactacaagcattccattcataagttcgaactgctcctggccgccggaactacgttgcacatcgtaccgatgttctatccctccgggctgacctatttccaggtgctacgggtggtgcgactgatcaaggcctcaccgatgctggagggattcgtttacaagattttcggaccgggcaagaaactcggctcactgatcatcttcaccatgtgcctgctgatcatcagctcgagcatctcaatgcagctgttttgcttcctctgcgatttcactaagttcgaatccttccccgaagccttcatgagcatgtttcagattctcacccaggaggcctgggttgaggtgatggatgagacaatgatccgtacgagcaaaactctcacgccgctggtggccgtctattttatactataccatctgttcgtcaccctcatcgtgctcagtctgttcgtggcggtcattttggacaatttggaactggacgaggatatcaagaagctcaagcagcttaagttccgagaacagagcgccgaaatcaaggagacgctgccctttcgcctgcgcatcttcgaaaagtttcccgattcaccacagatgaccattttgcatcgcatccccaatgattttatgctgcccaaagtgcgcgagagctttatgaagcacttcgtcatcgagcttgagacggaggactcgctggtcgagaactgcaagcgacccatgtccgagtgctgggagtctaatgtggtctttcgcaagcagaagcccgtccggatcatgaacaagacggccaaagtccgggccgccgggagtagtctgcgcaaattggccatcacgcatatcattaagtaagatttgacatatttagctgatccatgagatccctgcaaactaatggcatcaatttctctaatcccgtagtgacagcaacaaccaacgcctgatgctgggcgattcggccatgttgcccgtggttgggacgaagggcggcggtggattgaagtcgcagggtaccatcacacactcgaaaccgtggcgcgttgaccaaaagaagtgagtagctgggccctgccccaccgaggcggcgcgacccgtttgatgtgtgtccactaccaattcgcaggtttggctcccgctccatccgtcgcagcgtgcgctccggttccatcaagctgaagcaaacgtacgagcatcttatggagaatggtgacattgctgccgcgccacgtgccaattctggacgtgcacgtccccacgatctggacatcaagttgctgcaggcgaagcggcagcaggcggagatgcggcgcaatcaacgggaggaggatctgcgcgagaatcatccattcttcgatacaccgctctttctggtgccgcgcgagagtcgcttccggaagatttgccaaaagatcgtgcatgcccgctacgatgcccgactcaaggatccgctgaccggcaaggagcgcaaggtccagtataaaagcctgcagtaagtggagcacccatctccgaattggaggattgacttatttaaacattgcttgcaagcatataaactttaatcctttacagcaactttctcggtctggtcacctatctggactgggtgatgatattcgcgacaacgctttcctgcatctcgatgatgtttgagacacccaattatcgggtgatggatcatccgacgctgcagatcgccgagtacgggttcgttattttcatgagcctagagctggcgctgaagattctggccgatggccttttctttacgccaaaggcttatatcaaggatgtggccgccgcactggatgtgttcatctatgtggtgtccacgtcgttcttgtgctggatgcccctgaatataccaaccaactcggcggcccagctcctgatgatcctgcgctgcgtgcgaccgctgcgaatcttcaccctggtgccccatatgcgaaaggtggtgtacgagttgtgccgcggcttcaaggagatcctgctcgtatccacgctgctcattctcctaatgttcatcttcgccagctacggtgtccagttgtacggcggtcgcttggcccgctgcaatgatccaacgatctcgcggcgggaggattgtgtcggtgtgtttatgcgacgtgtttttgtgaccaaaatgaagttgaccccgggtccggatgagtcatatccggcaatgctggtgccgcgagtgtgggccaatccaaggcgtttcaacttcgataacattggagatgccatgctgacgctgttcgaggtgctctcattcaagggatggctggacgtgcgcgatgttctgatcaaggccgtgggtccggtgagttggacaatacatatgtatccgaaatgatggctataatagaatatcttgtaattctaaatattttactttacaggtacatgccgtctatattcacatctatatattcttgggctgtatgatcggtctgactttgttcgtcggcgtggtcattgccaattattcggagaacaagggcactgccctgctgaccgtcgaccagaggcgttggtgtgacctcaagaagcgtctgaagatcgctcagccgcttcatctgccacccagacccgatggccgaaagattcgtgccttcacctacgacatcactcagcacatcatctttaagagggtcatcgccgtggtggtcctgatcaatagtatgctgctcagcatcacggtttgtacctgggcatttcagtggtcaaaggaatcacgaagtaactgcatgcatatgtatatgaaatgttgtgtaataatttctagatttcgattggttatattcagttgtttgcccatgctgaaatatagctaatgtgttggatatacatacgtacataataattttacgagatatatataccgcatgcctgaatctcaccagctttagccaaatggatcaaacataaattagagtaactaatcatctttcatctgtgattctgtacgtaataatctatttattctgtgattctgcatctaataatctatttatttatatatttgagtaaaacaattgatgcaaagtgaagggaaatatactaatctcttgtacatcacattacaacaactttagggttaaatagattattaattagaagaaaaatcccagcatataacataactattatagttgcgcatattttccagagatatattttcaataataagtgagccgccaaaaaatatgcttctgactttcacaatttgcagttcgagagccaaagtcatatatatatatatacataataactgcatgccagcacgtttgtacaaatgcatatatactatatagaacaaaggtggttagagtgacccacttacgatagcgaatactacgaataaccgaaatgcaaaccatagccagataatgaatgtatggtgttatgaattgaaactgtagtatgcgactgcttagcttagtgtttagagtttacagattagagtttagagtttagagcttatagctctaaagatttgagattcgagattatagcagttgctataatcgaaagctcttgaccttctatcgtcatagtcttagtcttgtctcttgtctcaattgtctgctgcagtggatcaagggagaggtgcatacggaacgcctggtgatcgtcagtgcggtattgacctttgtctttgtggttgaggtggtgatgaagaacattgcctttacaccgcggggctattggcaatctaggcgcaatcgctatgaccttctcgtcaccgttgccggtgtgatttggattatattgcagaccattctgcgggtaagttgttcatgttgccacaactgctgttgtcaaaaccaccactcagtaccaacaccaaaaaccaatcgattcacactacacacgattcacattaacatttacattccacacatgccccgctgaacaatgaacaatgaacactgaccagtctgacctctgacctttgacctctaatctctgacagaacgatctgtcctacttcttcggcttcatggtggtcatcctgcgcttcttcaccatcaccggcaagcacaccacactgaagatgctcatgttgaccgtgggcgtgtctgtatgcaagtccttcttcattatctttggcatgtttctgctagtcttcttctatgcgctggccggaacgattctcttcggtgagctgggtgtccaaaaaaaaataaaaagttaattaatttagaaaatacatgaataaagagctagagccagagtcggccaacttgggccacccccacaaccaaccccccccccatccctactgaccactccacacggctgattctcgttacaggcaccgtcaaatacggcgagggcatcggtcgacgggccaattttggttcacccgtcaccggtgtggccatgctcttccggatcgtcaccggcgaggattggaataagatcatgcacgactgcatggtccagccgccgtactgcaccttgggcaacaactactgggagacggattgtggcaacttcactgccagcctgatatacttctgcaccttctacgtgatcatcacatatatagtgctcaacttgctagtgggtaggtctccctaggaattagtaggtcactcatgtttagtatgttgaatatgtgattatccacttttctaatattgctaattatttacttggccaaatgcatagtagcattttaatcaactttgaaatttttacattaatcttaaacatttaaatcttttgtgaaattgtcagctaacttcctattaatcttaaccatttaaatcttttgtgaaattgttagctaacttcctaattatttaatataattaaaaatccttgcaaactgtatacatttatttatatatatattaacgacaattgagactaatataagactttccctttcggcagctattatcatggagaacttttccctcttctactccaacgaagaggatgccctgctttcgtatgcggatatacgcaatttccagaacacctggaacattgtggacatccatcagcgtggagtgatacccgtgcgccgggtgaagttcatcctgcggttgctgaagggacgactcgagtgcgatccgcaaaaggatcgcctgctgttcaagtacatgtgctatgagctggacaagctgcacaacggcgaggatgttacctttcacgatgtcatcaagtgggtgattgtgtgatccatagtttgatgtaatacccattatcatcatactattttcaagcatgctgagctatcgctccgtggacatccggaaggcactgcagctggaggagctactggcgcgcgaggagttcgagtacctggttgaggaggaggtggccaagatgaccattcgcacctggctggaggggtgccttaaaaagattagggcccaaaacgccagcgtaagtagcgatgggtcttcattgtgaatataatataagaattacatttaaatttgttatgtacccttcagaagcagcaaaattcgctgatcgctggcctgcgggcaaccaacgaacagccggtgatgcggccaaatatccaggaggacaaggctcccctgggtgcggtggacaagtcggcgatcagcacgatcagtggagcagtggccggcgcctgtccgccaaccagtgacgccttttcgccgacctttagttcaacggaaaacgaggagaaggacggcagcagtagtgcggtggttcagttgccccactcggagacatcgatagccggaaccggaagttcagcgacaggtgcagcgacagcgacggggacttcatcgggactgggcgtaggaccaccgactgttcagtccaccgctcgccatgtgatgaccgttggcaaacggggctatgccctcaatcgatccgattcaacgggcagttcggcgggcaggaaattcctggcacccacctccagtgatccccagcagcgttcaacgctgagcgacaaggagcggttgcatatcaccagtcagcaacggaaaaagaactcgatgaccacattgccacatgccggtcaactgggtcagttggccaagcaacgcggcggtggtggtgaggccaccaaatcgtccagtttctttgcccagctgaacagcgagattggtcagttccattatccgacaataaacgctgcagccgccgcagctgccctgcatggctatggacatggacatggccatggccatggtggtcatggtggtcatggtggacatggagagcaccagatgcatcatcatcatggcggcgccctgggcagtccgtcggccatgatgagccaaatgattggtggcagtgggaagctgttgccgttcaataaccaagcgaatgccgtctacgaggtacacgactggtggcaggaacaggtcctgtgtccgcagaccagcgatgacgagatctagcaatggccaaacatcattcgtaggtggacgaaaaccggaagccggaagttccgcagaggaggtggagcctattaaacattatcatcaactagtggcctagaacttttttgtatatgcctattaagtgtaaatgtatcggcctcacaattaacggttaacaattcttaacgagtatatatagagagatttagctatagtttagcactgggtaaaaatgaaaatgaaacagaagttaggaaacaaaaagggcaaccattagttttatgttatgttgttgtttgcgtgctagatggtaaatatgatcagtcaagtcggtaactttgttatagcttaaatatataaagaaatatatattatatatatgtataatgagtacatcgcatatgaattgcatatgtcttacgtatagtgcaaatttataagcgcgctgcctcaccaaaacggagcattgaagttcgtaaattgcccaaaaactcaattaagtagctaaagaaagtcaaaaacagaaaaccatcgtacagattcgaactaaacaaacaagtttataccacaagtagtagctgtagaaaaagacagagaattcccgacaccgaaacgaaagagatgcctattaagatattttgagattagccaaagaactcagcacaaattaatattaaagttattactacgaatatatagccaaattccccattcaatgcgacctaccccccccccccccacacacacacacacacaacaacgttcaaaaaaagcgagcgtaataaaaatcgttgaaattgcagaacgttttaaaaaaaaccactctcttggctgctcaatgaatgaatgggtctctgggtctcgggggaacgtgcgcccttcggattagacgaattgaactgaccgtaatctgcagcttatgcaaacccgtgcccgccttacggagcaggtgcgtgcgtgccagggggcgagcagtgcatccgttccggctgccggaacgatcgagctttcggtcgct

SEQ ID NO: 1208 - DNA, 6693 bp, DROSOPHILA
atgattgaccgcctacagattcgtcgcttgggtgcagctgctagaaacaaacgcgcaggaggcggaggcggagctggaggcggagcagtaggcagcggcggcgccggcggaggaggaggaggaggaggagcaggggcggtaccgggagcggctggagcggcgggaacaggaccgatcactggagcgtcagcaacagcggccagcggatccagcggcagtggtggccaccaccagcaccaccaccattcgcatccgtattccacgagcggcatcaacacgccggcgacggccagcaccagttcctccagcggcaacagcttgacgccgcagcagcagcaacagcagcagcatccacaccatcagtcccatcacgggcatcactacgcacaccatcagcagcatacgcatcatcacgcgccgccgcactcgcaccatccgcatccacatccgcacgggcatccgcattcgtatccacacctgcgacactcgcagccggcgtccgccagccagtttagcttcaatccatcgccgggtagcagtcctggcaacggactgggactgggcgctcgccaggatgcggccagtgcgctcaacagtccgacgaccattgtgaactccggtagcggcagcggcggcggcagcagcgtcgccttcggaatgcagccgcaacagcagcagcagtcgttggccggcggaggaggcggtggctcatcggcgacggcggctccatcttcgggcggtggccacaacaatggtgccgggctgggaccggtcgttggtggcggcggaggtggtctcaatctgctcggcggactgggcggcatgggtggcatgggcggcggagcagctgccgccggcatgggcatatgtggcggcattagcagcaccgtgggcagtgcagccatcaccggagtgccgcccattgggctgggcattgccaccggaattggcaacaagatcatgctgggccggaagcagagcctcaagggcggcgaacctttcctcgcggattacggaccggaggaatcgctcaacgagagcgccgacatcgagtgggtgaacaagctgtgggtgcgccgcctaatgcgactgtgtgccctcgtctcactgacctccgtatcactgaacacgcccaagaccttcgagcgttatccgtcgctgcagttcatcacctttgcatcggacacggctgttacgctgctcttcaccgccgagatgatcgccaagatgcacatccgtggcgtgttgcatggtgaggtgccttatttaaaagatcactggtgccaattcgatgcttccatggtcagcttcctgtggatttcgatcattctgcaaatcttcgaagtgctggagatagtaccaaagttttcctatttatccattatgagagcaccaagacccttgatcatgatccgcttcctacgcgtcttccttaaattcagtatgccaaaaagtcgtattaatcaaatcttcaaacgttcgagccagcaaatttacaatgtgacactgttcttcctgttcttcatgtccctatatggtttgctaggagttcagttctttggcgaactaaaaaaccattgtgtaatgaataatacggagtacgatctatacaaaagaccaattctgaccatcaattcactggccattccggatacgttctgctcgatggatcccgactccggttaccagtgctcgccgggcatggtttgcatgaaaatggactttctgagcagctatgtgatcggattcaatggtttcgaggatattgcgactagtatctttacggtttatcaggcagcctcacaggagggttgggtgttcatcatgtaccgggccatcgattcactgccggcatggcgtgccgccttctacttcagcacgatgatcttcttcctggcgtggctggtgaagaacgtgttcatagcggtgatcacggagaccttcaacgagatccgtgtgcagttccaacagatgtggggggcgcgaggtcacatccagaagacggccgcatcgcagatcctgagtggcaacgataccggctggcgactagtgaccatcgatgacaacaagcacggcggattggcgccggaaacgtgtcatgcgatcctgagatcaccatactttcgcatgctagtgatgagcgttatcctggccaatggcattgtgacggccacaatgaccttcaagcacgatggacgaccgagggatgtgttctacgagcggtactactacatcgagctggtcttcacctgcctgctggacctggagacccttttcaagatctattgcttgggctggcgtggatactacaagcattccattcataagttcgaactgctcctggccgccggaactacgttgcacatcgtaccgatgttctatccctccgggctgacctatttccaggtgctacgggtggtgcgactgatcaaggcctcaccgatgctggagggattcgtttacaagattttcggaccgggcaagaaactcggctcactgatcatcttcaccatgtgcctgctgatcatcagctcgagcatctcaatgcagctgttttgcttcctctgcgatttcactaagttcgaatccttccccgaagccttcatgagcatgtttcagattctcacccaggaggcctgggttgaggtgatggatgagacaatgatccgtacgagcaaaactctcacgccgctggtggccgtctattttatactataccatctgttcgtcaccctcatcgtgctcagtctgttcgtggcggtcattttggacaatttggaactggacgaggatatcaagaagctcaagcagcttaagttccgagaacagagcgccgaaatcaaggagacgctgccctttcgcctgcgcatcttcgaaaagtttcccgattcaccacagatgaccattttgcatcgcatccccaatgattttatgctgcccaaagtgcgcgagagctttatgaagcacttcgtcatcgagcttgagacggaggactcgctggtcgagaactgcaagcgacccatgtccgagtgctgggagtctaatgtggtctttcgcaagcagaagcccgtccggatcatgaacaagacggccaaagtccgggccgccgggagtagtctgcgcaaattggccatcacgcatatcattaatgacagcaacaaccaacgcctgatgctgggcgattcggccatgttgcccgtggttgggacgaagggcggcggtggattgaagtcgcagggtaccatcacacactcgaaaccgtggcgcgttgaccaaaagaagtttggctcccgctccatccgtcgcagcgtgcgctccggttccatcaagctgaagcaaacgtacgagcatcttatggagaatggtgacattgctgccgcgccacgtgccaattctggacgtgcacgtccccacgatctggacatcaagttgctgcaggcgaagcggcagcaggcggagatgcggcgcaatcaacgggaggaggatctgcgcgagaatcatccattcttcgatacaccgctctttctggtgccgcgcgagagtcgcttccggaagatttgccaaaagatcgtgcatgcccgctacgatgcccgactcaaggatccgctgaccggcaaggagcgcaaggtccagtataaaagcctgcacaactttctcggtctggtcacctatctggactgggtgatgatattcgcgacaacgctttcctgcatctcgatgatgtttgagacacccaattatcgggtgatggatcatccgacgctgcagatcgccgagtacgggttcgttattttcatgagcctagagctggcgctgaagattctggccgatggccttttctttacgccaaaggcttatatcaaggatgtggccgccgcactggatgtgttcatctatgtggtgtccacgtcgttcttgtgctggatgcccctgaatataccaaccaactcggcggcccagctcctgatgatcctgcgctgcgtgcgaccgctgcgaatcttcaccctggtgccccatatgcgaaaggtggtgtacgagttgtgccgcggcttcaaggagatcctgctcgtatccacgctgctcattctcctaatgttcatcttcgccagctacggtgtccagttgtacggcggtcgcttggcccgctgcaatgatccaacgatctcgcggcgggaggattgtgtcggtgtgtttatgcgacgtgtttttgtgaccaaaatgaagttgaccccgggtccggatgagtcatatccggcaatgctggtgccgcgagtgtgggccaatccaaggcgtttcaacttcgataacattggagatgccatgctgacgctgttcgaggtgctctcattcaagggatggctggacgtgcgcgatgttctgatcaaggccgtgggtccggtacatgccgtctatattcacatctatatattcttgggctgtatgatcggtctgactttgttcgtcggcgtggtcattgccaattattcggagaacaagggcactgccctgctgaccgtcgaccagaggcgttggtgtgacctcaagaagcgtctgaagatcgctcagccgcttcatctgccacccagacccgatggccgaaagattcgtgccttcacctacgacatcactcagcacatcatctttaagagggtcatcgccgtggtggtcctgatcaatagtatgctgctcagcatcacgtggatcaagggagaggtgcatacggaacgcctggtgatcgtcagtgcggtattgacctttgtctttgtggttgaggtggtgatgaagaacattgcctttacaccgcggggctattggcaatctaggcgcaatcgctatgaccttctcgtcaccgttgccggtgtgatttggattatattgcagaccattctgcggaacgatctgtcctacttcttcggcttcatggtggtcatcctgcgcttcttcaccatcaccggcaagcacaccacactgaagatgctcatgttgaccgtgggcgtgtctgtatgcaagtccttcttcattatctttggcatgtttctgctagtcttcttctatgcgctggccggaacgattctcttcggcaccgtcaaatacggcgagggcatcggtcgacgggccaattttggttcacccgtcaccggtgtggccatgctcttccggatcgtcaccggcgaggattggaataagatcatgcacgactgcatggtccagccgccgtactgcaccttgggcaacaactactgggagacggattgtggcaacttcactgccagcctgatatacttctgcaccttctacgtgatcatcacatatatagtgctcaacttgctagtggctattatcatggagaacttttccctcttctactccaacgaagaggatgccctgctttcgtatgcggatatacgcaatttccagaacacctggaacattgtggacatccatcagcgtggagtgatacccgtgcgccgggtgaagttcatcctgcggttgctgaagggacgactcgagtgcgatccgcaaaaggatcgcctgctgttcaagtacatgtgctatgagctggacaagctgcacaacggcgaggatgttacctttcacgatgtcatcaacatgctgagctatcgctccgtggacatccggaaggcactgcagctggaggagctactggcgcgcgaggagttcgagtacctggttgaggaggaggtggccaagatgaccattcgcacctggctggaggggtgccttaaaaagattagggcccaaaagcagcaaaattcgctgatcgctggcctgcgggcaaccaacgaacagccggtgatgcggccaaatatccaggaggacaaggctcccctgggtgcggtggacaagtcggcgatcagcacgatcagtggagcagtggccggcgcctgtccgccaaccagtgacgccttttcgccgacctttagttcaacggaaaacgaggagaaggacggcagcagtagtgcggtggttcagttgccccactcggagacatcgatagccggaaccggaagttcagcgacaggtgcagcgacagcgacggggacttcatcgggactgggcgtaggaccaccgactgttcagtccaccgctcgccatgtgatgaccgttggcaaacggggctatgccctcaatcgatccgattcaacgggcagttcggcgggcaggaaattcctggcacccacctccagtgatccccagcagcgttcaacgctgagcgacaaggagcggttgcatatcaccagtcagcaacggaaaaagaactcgatgaccacattgccacatgccggtcaactgggtcagttggccaagcaacgcggcggtggtggtgaggccaccaaatcgtccagtttctttgcccagctgaacagcgagattggtcagttccattatccgacaataaacgctgcagccgccgcagctgccctgcatggctatggacatggacatggccatggccatggtggtcatggtggtcatggtggacatggagagcaccagatgcatcatcatcatggcggcgccctgggcagtccgtcggccatgatgagccaaatgattggtggcagtgggaagctgttgccgttcaataaccaagcgaatgccgtctacgaggtacacgactggtggcaggaacaggtcctgtgtccgcagaccagcgatgacgagatctag

SEQ ID NO: 1209 - protein, 2230 aa, DROSOPHILA
MIDRLQIRRLGAAARNKRAGGGGGAGGGAVGSGGAGGGGGGGGAGAVPGAAGAAGTGPITGASATAASGSSGSGGHHQHHHHSHPYSTSGINTPATASTSSSSGNSLTPQQQQQQQHPHHQSHHGHHYAHHQQHTHHHAPPHSHHPHPHPHGHPHSYPHLRHSQPASASQFSFNPSPGSSPGNGLGLGARQDAASALNSPTTIVNSGSGSGGGSSVAFGMQPQQQQQSLAGGGGGGSSATAAPSSGGGHNNGAGLGPVVGGGGGGLNLLGGLGGMGGMGGGAAAAGMGICGGISSTVGSAAITGVPPIGLGIATGIGNKIMLGRKQSLKGGEPFLADYGPEESLNESADIEWVNKLWVRRLMRLCALVSLTSVSLNTPKTFERYPSLQFITFASDTAVTLLFTAEMIAKMHIRGVLHGEVPYLKDHWCQFDASMVSFLWISIILQIFEVLEIVPKFSYLSIMRAPRPLIMIRFLRVFLKFSMPKSRINQIFKRSSQQIYNVTLFFLFFMSLYGLLGVQFFGELKNHCVMNNTEYDLYKRPILTINSLAIPDTFCSMDPDSGYQCSPGMVCMKMDFLSSYVIGFNGFEDIATSIFTVYQAASQEGWVFIMYRAIDSLPAWRAAFYFSTMIFFLAWLVKNVFIAVITETFNEIRVQFQQMWGARGHIQKTAASQILSGNDTGWRLVTIDDNKHGGLAPETCHAILRSPYFRMLVMSVILANGIVTATMTFKHDGRPRDVFYERYYYIELVFTCLLDLETLFKIYCLGWRGYYKHSIHKFELLLAAGTTLHIVPMFYPSGLTYFQVLRVVRLIKASPMLEGFVYKIFGPGKKLGSLIIFTMCLLIISSSISMQLFCFLCDFTKFESFPEAFMSMFQILTQEAWVEVMDETMIRTSKTLTPLVAVYFILYHLFVTLIVLSLFVAVILDNLELDEDIKKLKQLKFREQSAEIKETLPFRLRIFEKFPDSPQMTILHRIPNDFMLPKVRESFMKHFVIELETEDSLVENCKRPMSECWESNVVFRKQKPVRIMNKTAKVRAAGSSLRKLAITHIINDSNNQRLMLGDSAMLPVVGTKGGGGLKSQGTITHSKPWRVDQKKFGSRSIRRSVRSGSIKLKQTYEHLMENGDIAAAPRANSGRARPHDLDIKLLQAKRQQAEMRRNQREEDLRENHPFFDTPLFLVPRESRFRKICQKIVHARYDARLKDPLTGKERKVQYKSLHNFLGLVTYLDWVMIFATTLSCISMMFETPNYRVMDHPTLQIAEYGFVIFMSLELALKILADGLFFTPKAYIKDVAAALDVFIYVVSTSFLCWMPLNIPTNSAAQLLMILRCVRPLRIFTLVPHMRKVVYELCRGFKEILLVSTLLILLMFIFASYGVQLYGGRLARCNDPTISRREDCVGVFMRRVFVTKMKLTPGPDESYPAMLVPRVWANPRRFNFDNIGDAMLTLFEVLSFKGWLDVRDVLIKAVGPVHAVYIHIYIFLGCMIGLTLFVGVVIANYSENKGTALLTVDQRRWCDLKKRLKIAQPLHLPPRPDGRKIRAFTYDITQHIIFKRVIAVVVLINSMLLSITWIKGEVHTERLVIVSAVLTFVFVVEVVMKNIAFTPRGYWQSRRNRYDLLVTVAGVIWIILQTILRNDLSYFFGFMVVILRFFTITGKHTTLKMLMLTVGVSVCKSFFIIFGMFLLVFFYALAGTILFGTVKYGEGIGRRANFGSPVTGVAMLFRIVTGEDWNKIMHDCMVQPPYCTLGNNYWETDCGNFTASLIYFCTFYVIITYIVLNLLVAIIMENFSLFYSNEEDALLSYADIRNFQNTWNIVDIHQRGVIPVRRVKFILRLLKGRLECDPQKDRLLFKYMCYELDKLHNGEDVTFHDVINMLSYRSVDIRKALQLEELLAREEFEYLVEEEVAKMTIRTWLEGCLKKIRAQKQQNSLIAGLRATNEQPVMRPNIQEDKAPLGAVDKSAISTISGAVAGACPPTSDAFSPTFSSTENEEKDGSSSAVVQLPHSETSIAGTGSSATGAATATGTSSGLGVGPPTVQSTARHVMTVGKRGYALNRSDSTGSSAGRKFLAPTSSDPQQRSTLSDKERLHITSQQRKKNSMTTLPHAGQLGQLAKQRGGGGEATKSSSFFAQLNSEIGQFHYPTINAAAAAAALHGYGHGHGHGHGGHGGHGGHGEHQMHHHHGGALGSPSAMMSQMIGGSGKLLPFNNQANAVYEVHDWWQEQVLCPQTSDDEI

SEQ ID NO: 1210 - DNA, 5572 bp, DROSOPHILA
acacgcatagaaactagaacgtaagaccatgacaatagatcgcacttgaagcagctgtccattgtattccttagatctagtaatataataagcccagcatataaaaagaaccgaataagtggcattgagggctccctccgaatgggagataaactcttctcggcgttcgcggaatggcagccaaaagtcagacaagtgcaaatagcaaataacgcgcatacgcaatgtgtgccgctgagggtgccccttgattgtctttatctgttccgaagaagacaaacagcggcctctgcagacatcgcccgagatggagataaagatcaagataatgccgaccagcagtcgcttcacgtgcaagatctgccgtaaatcagcccatcgacacgggatccggcggagaattccgagccagaatcccgggcaaacaaatgatcgcgcggaatggacttatggtgcgcggacccttagttcgtaaaagctttgcacgtttttatggattaatctcggcggagccgtaattttaattgagacaaacgttttgcaattgcaagcagctcaatggctacgtttttttgctttggactgcgggatatcctgtagttggatatcgttgccattagaagatactttataagtgcatcgtatgggtataacacttttacacatagtaatccatagttttatagattaatttatttatttaataggcttgcaaccgttgctttgcacggtagaaaacatatgtattattttattaaactaacgcataaatgtgtttcagtttttttaagtatagaacgtgtctaaaagccgaaaatgttgtaatgttggatatggtccacgagtacctggtataaattcccgaaacggcacacgaaccgatccacgcgcacacatgtgtgagtgcgcggacttcgggtcgagccgatcgtctggatggacagttagttcgcatataacggcgcttgcttgccgacttcggtgttagtcgcaagttgagaaccactcggcatagaattagaattccagagccagaggagagccgagaagaatcgtcccgatccgttccactccgcacttcgaatcaatttcgatggcccgctgaagaatctgcgcctcaagctaagctgtgatacgaatccgcatttgaatagaagtcgcagcgccgccacagatagtcgccaccaattgctcgcgttttgtgcacattagagaaatgcattgcctggtgatactcggatttctgctgggtagcctggtggcattcagctgggcaggagtcacaacccagccaccgccactcatacgcaccctaagtgccggcggagacataggaccccagttcgacgtggggaagaccaaggaacccgaaggtgagaaccagatcccgatccccaatgcaacgtagttgcaaacgtgcgaaattcgagctgaagcactactgcggttagaacgtgaaataatttaaattacttgaacttgaatggttgtccagttcaattatgcaacaagtgcttaacttgggtctatatcaaggttgcaaatcttaggcactaaatagtcacttgcgtttactttccaaactgagagcttattgctgggaaattagccacaaagcagagtgtttgttctacgtaatctagtgaaacagaaaggcattacgaatggtggtcacctattacgaaataggcgcttaaatgtaactttttaaattgccaacaaagtagaatttaaaattttgtagtcacctaattgcttagtttcgctatgagagcagtttttatcggctttcgaaaaaccgtacgagtaaatcagctgagcagctgacaaaaactgattaatcatatacttttgatttcattgacaagtccaaattaacagtcggcgaatgacagcctaactgtaacctgtctcagtgtcgaggtcgtcgggcgatgggcggtgggcggtggttggcactgggtggaataccccgccccttccccaagctaccacaactgaatattaattacgattatcatcaccgcaagttaagcagtgaacggacgacgctccaaatcgcgaaatgcaaatgttataaagccaaaaagtaatttttaatctctgaaaatccatttttaggtgagatatagctatacgcgctactcgtgtagtaattttgtatctaacagaagatcatttcaatattccaaaattcaatattcaaaagtcttataactattaccacccattttattaccgaaagccttaggaatactgactctgctactaaaacaattaaatgatcgtgtcgtataactttagactagataataaaataaagattagaacatgggaaatgaaaattcgagtacatacattgactaatttcaatgtaaatattgataagcgcatataaatcagctgagaaaattgaattcagaaattccggcttacattaaacaatgcaaaataatatatattaaagcgcataaatcaagaaaaatcgttttccccaccgaattgtggaaagccgaggcattttctgcgacgtacgttgcgaaaataagtcacattaactagtcgagtacttaaaatacgatccggaacatgttcaagtgccaactggatctcactggagatgggcaattaatacgtgacatggcacttgacttacccagcgattttcgatccgatttagtttcaatctgtgaatccgatttcagacgcggaattctggcacaacgtgggcctgaggcagctggagaagaccattaagcaggcgcagcgcgtgaaggaggactcctaccagaaaaaggcgcggaatatcatcatcttcatcggagacggcatgggaatatccacgatcagtgctggtcgcatctacaaggggcagtacctgaagcatggttacggcgaggaggaaaccctcgtcttcgacgatttcccaaacactggaatggccaaagtaagaatatatcggggagctcattgaaacaggaacatcatattaatgttgatacactccattacagacctacaacgtggacaaacaagtgccggattcggcgggcactgccactgcgatcttctcgggttcgaaaacccattacggagccattggaatggacgccacccgctccaagaagaatgggcagcaaggcagggtccagagcgtcatggagtgggcccagaaggagggcaagcgcaccggcgtggtcaccacaaccaggatcacgcacgccacgcccgccgccacctacgcccacatctacgaccgggactgggagtgcgacacggaagtgcccgcggaatcggtgggctttcatgtcgatattgcccgtcagttggtggagaatgctccgggaaatcggttcaatgtgatcctgggcggaggaatgtcgcccatgggcattctgaatgcctccgaggtgaagactactattttcgaaggacccacggaaacaatttgcacccgcggtgataacagaaaccttcctgccgagtggctggcccatcacgccaacgacacagttcctccagcattggtacataaccgtaaggatctgcttaatgtgaatgtcaagaaggtggaccatttgatgggcctgttccgaaacaatcacattacgtactccatagccagggaggcgggagagccttccctgcaagagatgacggagacggccttaggaatcttggaaaggggcgatgagtccaacggctttgtgctcctggtggaaggaggtcgcattgaccagggtcaccacatgaactacgcccgtgctgctctgcacgagctctacgaattcgatttggcaatccaagcggccgtgaacaatacggatcccgacgaaacgttgatcctggtgacggcagaccattcccacgcggtcacctttaatggttacgcgctccgtggagctgatatcctggggacagctaattcacacgagaaaaacgatcccatgttctacgagaccatctcgtatgccaatggtaagctagaccttagcattatcagaattttctggtaaaacaaactttgaatgttttcaggtcctggctattgggatcacttggcgaatgactccagacctcagaacagctccaacatgtggatgcccctgaagcattttaccgctgaggagcgggctgctcccacttatcgccacttggcgacggttcccagaaaggacgaaacgcacggcggcgaggatgtggctgtctttgcatatggacctggttccagtttgattcgcggggtcttcgagcagaactacttggcctatgtgatgagctacgcgggctgtttgggtcctgccaaggacttcgatgactcctgtgaggatcacaaggatgggcaaaaggataggccgctggacaaacccaatccaaagagaaatggcgccactgttgtgggagcctccttgatccccattttgactgctgccactgcggctattttgcgcggtcgcgggctgtaattaatgttgttttaaatatattaattgttattaaagtttatagacgtacggatggcttcgttgaatgagagagtgagcgagatggaggagtgatcgttgcaacttaacaaatagatacactgaaaaatatgcaatgttttttatttttgtcatggtaaacttgaatagaatatcccggccataaaaacgtcgatggattgattcatttaagttagtttactatcgctcgcaatgacacttttgcttaagttttgagtacatccccatcgatcgctcaatcgtttatacaaaacccataaggggcctcaaagaaaagtcaacaaattaggacaaaaggatttgccaggatcctaggccgccttggcaggaacggtggccttggaggtcactttcgacgactctggttccgcatccagcttctggacgcgatgaagatcgatgcactgtcggaattgggccacctcctcaatgcacttcaaggtctccccgggatgcgcgcggtagcaggcaagcagctgggatttcaggtcctggcagggaggcactttgtgcgacgacgcggtgctgacgaatcgcttgtgcacattttctacagcattggcgtactccttctccaggatggtgttggtcttcttgaggttctcctccagcttcgccatgcgctccttccacagctcgtcattcttgattagctcctggttcatctggcgctgcacatcggccgcgctaatggtgtgtcctcctccctggacgtaaatgggcactgcagcgggataggaggatactttcggagcaggagaagcagctggcgaggatgcggctggcttggcggcagccttcgtcgttggcttgggcactggtttcgattcctccgcagcggctgcgtgctcacgagctgaattggacaagatataaatcaatagtttaatgaaaaaaacatacaaataggaatggaaactagccaatgaaaccaaaactacaccctttcaagtgcgttttttttttgtgaacaagatagaagagccactctctacaacttgctgctgttctcgttaacgagtttccactgtgtttggcgtaaacatttgcccgttttgacaattgtt

SEQ ID NO: 1211 - DNA, 2113 bp, DROSOPHILA
aaccactcggcatagaattagaattccagagccagaggagagccgagaagaatcgtcccgatccgttccactccgcacttcgaatcaatttcgatggcccgctgaagaatctgcgcctcaagctaagctgtgatacgaatccgcatttgaatagaagtcgcagcgccgccacagatagtcgccaccaattgctcgcgttttgtgcacattagagaaatgcattgcctggtgatactcggatttctgctgggtagcctggtggcattcagctgggcaggagtcacaacccagccaccgccactcatacgcaccctaagtgccggcggagacataggaccccagttcgacgtggggaagaccaaggaacccgaagacgcggaattctggcacaacgtgggcctgaggcagctggagaagaccattaagcaggcgcagcgcgtgaaggaggactcctaccagaaaaaggcgcggaatatcatcatcttcatcggagacggcatgggaatatccacgatcagtgctggtcgcatctacaaggggcagtacctgaagcatggttacggcgaggaggaaaccctcgtcttcgacgatttcccaaacactggaatggccaaaacctacaacgtggacaaacaagtgccggattcggcgggcactgccactgcgatcttctcgggttcgaaaacccattacggagccattggaatggacgccacccgctccaagaagaatgggcagcaaggcagggtccagagcgtcatggagtgggcccagaaggagggcaagcgcaccggcgtggtcaccacaaccaggatcacgcacgccacgcccgccgccacctacgcccacatctacgaccgggactgggagtgcgacacggaagtgcccgcggaatcggtgggctttcatgtcgatattgcccgtcagttggtggagaatgctccgggaaatcggttcaatgtgatcctgggcggaggaatgtcgcccatgggcattctgaatgcctccgaggtgaagactactattttcgaaggacccacggaaacaatttgcacccgcggtgataacagaaaccttcctgccgagtggctggcccatcacgccaacgacacagttcctccagcattggtacataaccgtaaggatctgcttaatgtgaatgtcaagaaggtggaccatttgatgggcctgttccgaaacaatcacattacgtactccatagccagggaggcgggagagccttccctgcaagagatgacggagacggccttaggaatcttggaaaggggcgatgagtccaacggctttgtgctcctggtggaaggaggtcgcattgaccagggtcaccacatgaactacgcccgtgctgctctgcacgagctctacgaattcgatttggcaatccaagcggccgtgaacaatacggatcccgacgaaacgttgatcctggtgacggcagaccattcccacgcggtcacctttaatggttacgcgctccgtggagctgatatcctggggacagctaattcacacgagaaaaacgatcccatgttctacgagaccatctcgtatgccaatggtcctggctattgggatcacttggcgaatgactccagacctcagaacagctccaacatgtggatgcccctgaagcattttaccgctgaggagcgggctgctcccacttatcgccacttggcgacggttcccagaaaggacgaaacgcacggcggcgaggatgtggctgtctttgcatatggacctggttccagtttgattcgcggggtcttcgagcagaactacttggcctatgtgatgagctacgcgggctgtttgggtcctgccaaggacttcgatgactcctgtgaggatcacaaggatgggcaaaaggataggccgctggacaaacccaatccaaagagaaatggcgccactgttgtgggagcctccttgatccccattttgactgctgccactgcggctattttgcgcggtcgcgggctgtaattaatgttgttttaaatatattaattgttattaaagtttatagacgtacggatggcttcgttgaatgagagagtgagcgagatggaggagtgatcgttgcaactta

SEQ ID NO: 1212 - protein, 596 aa, DROSOPHILA
MHCLVILGFLLGSLVAFSWAGVTTQPPPLIRTLSAGGDIGPQFDVGKTKEPEDAEFWHNVGLRQLEKTIKQAQRVKEDSYQKKARNIIIFIGDGMGISTISAGRIYKGQYLKHGYGEEETLVFDDFPNTGMAKTYNVDKQVPDSAGTATAIFSGSKTHYGAIGMDATRSKKNGQQGRVQSVMEWAQKEGKRTGVVTTTRITHATPAATYAHIYDRDWECDTEVPAESVGFHVDIARQLVENAPGNRFNVILGGGMSPMGILNASEVKTTIFEGPTETICTRGDNRNLPAEWLAHHANDTVPPALVHNRKDLLNVNVKKVDHLMGLFRNNHITYSIAREAGEPSLQEMTETALGILERGDESNGFVLLVEGGRIDQGHHMNYARAALHELYEFDLAIQAAVNNTDPDETLILVTADHSHAVTFNGYALRGADILGTANSHEKNDPMFYETISYANGPGYWDHLANDSRPQNSSNMWMPLKHFTAEERAAPTYRHLATVPRKDETHGGEDVAVFAYGPGSSLIRGVFEQNYLAYVMSYAGCLGPAKDFDDSCEDHKDGQKDRPLDKPNPKRNGATVVGASLIPILTAATAAILRGRGL

SEQ ID NO: 1213 - DNA, 3264 bp, DROSOPHILA
gtcgtcactggcacacacactaagcacacgcacacgcgcgcaagcacacacacaactgcaatcgggcgtccaggatcaggataattcgttgttatccttgtccgcactgctcatttcgttgttccgctcggagttagttatgacatcctgacttttccacccgcacttgaactctccgttttccgcgcttgctgctttcgggtcacaattggaagtgccagttaccagtacaatgcaatttgaaatcaaggaattattttaaaatgaaataaaattgtttgatggcaatcgatatcagggggaggtgcaaactgactgagctatcaagtaatcgatatcagggggtcgagccatcgatatgttttgcctttcgatagctcttcagtgttcttaagtcacaggcttgtgtcacggattaaaacccagtacagtggaagctggctattagaaaacgttaagccaaactcataatgagttccctaaaattctgtaaatttgtaatttttaaacattagcctaaaatgtacttgattctaaaatcatttacaatatcattcggttatattactctttcgtaacgcaaaaaaagagaacgcacataacaaattattgaatacttttattgtactattacggtcgttttattgctaaaagtattgcatttcaatttacgtgacggtgtgtacagaattaactttataaattgttgaaactcaacaaagcaatactatattctgtaatttccgaatatttctattggagctatccaatccgtatattgaaaaaatcactttcgcaaataggatgtttaggagtatacatataaagtacagattctacagataataagaaaataatatttaaaataagtataattctcggacatgtaacggtgcgttcaggccagggtgaccagttcgtcgtggcgactatcggtattctgggcgagcaagtcagcgggcacactgcgctgctgtgtcaaaacgaaactggaaaaaatctgattgagttttcagcggacttggatcaatccttccaatccccaagaaatcgggagcagacggccaggatgacgtcgcgcaacctgacggaggtgttcgtcatcatgcgcaacaatgcgtccaagaaccggaatcactacgacgatcgggtgagtgcgtctccgtctggggtcttcactgttatcatcaactaacatatgttttgcgtttctccgtcttccagaggggcagcgatgcggagcgccttctaaagcactcggtgcgcgaggcggaggagggactggagctgcaggacgactacggcacgccgcccgcctggctggacaagttcgaggaggcgcagtacaccatgtctaagtgggtaaacaaacagtagtccatgcgcagggttcaacttcactcccatcactcgtttgcaggatcaagcctaagctggatgaactgggctccctgcacgcacgccacctcctgcgacccgccttcgatgatcagcgggacgacgagtgcgacatcgaggtgctcagccaaatcgtctccaagctgatcacctccacgcaccggcacatccagtgcgtgcgcagcagcatcggcgtgggcagcaagatggagcagtgcctgacggtcaacgcggtacactgcgccctgctccagctgcaggagctgacggtgaagttccgtgccagccagaatgcctacctgcttcagctgaactcccgcgaggagcgctcgcagaagtacttcgacgacggcggcggcgctggcgctggagacgtcttcacaaacgtggagctgggcgagcagagcgccgagaacttcgtcgactccttcgacaactttctgcagccgccggcggagggcaagtccggcaacggctatctgttcgaggacgacgagcaggccatcgacgatcacttccaaaggccgccggccagccggatgacccaacagcagctgctgctcttcgaggaggagaacacgcgggtggcgcagcaccgcgagcaggaggtgaccaagatagtcaagtccatctacgacctgaacgacatcttcaaggacctgggccacatggtccaggagcagggcactgtgctcgaccgcatcgactacaacgtggagcagacgcagacgcgcgtctcggagggattgcgccagctgcacaaggcggaaatgtatcagcgcaagaaccgcaagatgtgcgtcattctcgtcctggcggcggtcacattcttcatgctgctgctgctcatcctgaccaagctctagttgcccacgcgcctccagtgggccgacctcattcccgtcattcgctgtgtgtgtttgtgtatattgtaaatgtttgaatacatgttattatatttattatttattgctaatgctaaaaaaaaaaccgcaactactccctctcaagtcgaactccactccagtccagtccactccagtccgctctcccaatcacatgcgctccgagaggcgcgaggcgactgcccgcaggttgccatacaccttgctgggcggcgagccgaggattaggttgcagacggcccggcgcgcaagctgaatgttctggtagctgcccaggatgtggatcttgctatcggctagcacgatgcgggtcttggtcacgttctcgatggtgaatttggtgcggccgcccttgccggcgaggcggccgatggcgcgagactggtggtcgccgcgcagcgtcttcacgtccttgatttcgaacgactcgacgaacaggtcctccagacgcagcagggccagggcgtcgtccacctcgaagccgcagagaaaggcgcgcacgaagtcggcgccgcgctgcaggttggctatgtccggcgtctcggggcccacacgcagctccacctggcgcgccttcatgttgaagcggatctgcagcttcatgtgctccaccacgggcgtaaagatcttcatccagtgctccttgagcgaggagtacctgtgtggcggcacggataccttgcgcagctcgcttctggcccgctttgccttgggcggcgccgatgctcgcgaagatcccagcacctggccctcaatgccggtcgcctcgtccacctgcatctccacgtcctgctgcccgcctccgctggctccgcgcttcgtcgctctcttcgccggctcgaatgcgtctgctctgatgttctctgcctccatggtgcaatctgttgtgcttttactgcgttgtttccaataatttctcaatccagctgctttgtctgctccacgtgctcagtgtgaccgc

SEQ ID NO: 1214 - DNA, 1128 bp, DROSOPHILA
ctgattgagttttcagcggacttggatcaatccttccaatccccaagaaatcgggagcagacggccaggatgacgtcgcgcaacctgacggaggtgttcgtcatcatgcgcaacaatgcgtccaagaaccggaatcactacgacgatcggaggggcagcgatgcggagcgccttctaaagcactcggtgcgcgaggcggaggagggactggagctgcaggacgactacggcacgccgcccgcctggctggacaagttcgaggaggcgcagtacaccatgtctaagatcaagcctaagctggatgaactgggctccctgcacgcacgccacctcctgcgacccgccttcgatgatcagcgggacgacgagtgcgacatcgaggtgctcagccaaatcgtctccaagctgatcacctccacgcaccggcacatccagtgcgtgcgcagcagcatcggcgtgggcagcaagatggagcagtgcctgacggtcaacgcggtacactgcgccctgctccagctgcaggagctgacggtgaagttccgtgccagccagaatgcctacctgcttcagctgaactcccgcgaggagcgctcgcagaagtacttcgacgacggcggcggcgctggcgctggagacgtcttcacaaacgtggagctgggcgagcagagcgccgagaacttcgtcgactccttcgacaactttctgcagccgccggcggagggcaagtccggcaacggctatctgttcgaggacgacgagcaggccatcgacgatcacttccaaaggccgccggccagccggatgacccaacagcagctgctgctcttcgaggaggagaacacgcgggtggcgcagcaccgcgagcaggaggtgaccaagatagtcaagtccatctacgacctgaacgacatcttcaaggacctgggccacatggtccaggagcagggcactgtgctcgaccgcatcgactacaacgtggagcagacgcagacgcgcgtctcggagggattgcgccagctgcacaaggcggaaatgtatcagcgcaagaaccgcaagatgtgcgtcattctcgtcctggcggcggtcacattcttcatgctgctgctgctcatcctgaccaagctctag

SEQ ID NO: 1215 - protein, 352 aa, DROSOPHILA
MTSRNLTEVFVIMRNNASKNRNHYDDRRGSDAERLLKHSVREAEEGLELQDDYGTPPAWLDKFEEAQYTMSKIKPKLDELGSLHARHLLRPAFDDQRDDECDIEVLSQIVSKLITSTHRHIQCVRSSIGVGSKMEQCLTVNAVHCALLQLQELTVKFRASQNAYLLQLNSREERSQKYFDDGGGAGAGDVFTNVELGEQSAENFVDSFDNFLQPPAEGKSGNGYLFEDDEQAIDDHFQRPPASRMTQQQLLLFEEENTRVAQHREQEVTKIVKSIYDLNDIFKDLGHMVQEQGTVLDRIDYNVEQTQTRVSEGLRQLHKAEMYQRKNRKMCVILVLAAVTFFMLLLLILTKL

SEQ ID NO: 1216 - DNA, 2800 bp, DROSOPHILA
ctgaaacatatgtggccgccgttgctcggctaatttgcaccaccctgcccccgccagccccatcaacattttgccattgaaaaatgacaaacaaacaggggcaaaatgaaaaagtggcatcaagaaacgatgggaaagtaaggcgaatggggcaaatatgtttggggaaaatgacttttcacatattcttcatcagttcgccgagcatatcgcgatgtgcgaggtcctgacacttgctgatgagtcagctgctcggaaattcggtgatcaaggaagcggatcgagtgcacatcaatttaagatgagatacattattaaatcaaatcgttttaattaagttaagatatagagcttactgcattctgaatgcaagtgtgcaattagaatctctcacaattggaagaggggtatatttttcggtgtcactagggcttaaaatttcttggtatctttgtttcttggttttcttccagccggtctccaatttttaccaaagaaacgtactgaatattggtttggacttacaaataatagttccacacatttgtttatttattaattatgtgcctcgctgattgcgatatgcccaagaaaacaggcgtctcactgcttggccaatttccgccatctgtcgcagattctcgtctcctcctgatggcgtgccacttttaaaggcatgggtggataggaggtttgggcttttagccaagctcgaggcaattatgtttgcggctaatttgttgcgcgtccgtggaggaaatctaatttgtgcggacattgatgcatcgtcacgaggcgtgagacgcaattatgcgaagcggaccgaaagtatgcaacatcctggtgcgttcttcgccaattcttaaccccctccccacccatcagcaatggaccaaggtcagaaggttatcaaatttgataagcttccgcacagttttggttccgtacgagaagcttgcaagagaagctcctccaaaacagtcgacctacagacaacgcgatgagcagatccctgtttctaattcttttattgggaatctcctgcctggagattttccaggctcgctctcttctggaggggagaaaacaaagatttgtgcgcagacgcatatcacccgacgatcctgatctcgagatcatcgaggtcaaggacgtctactaccgaaagcggcccaagaagttggttgtccagctcgatgatgacgaattaaactggaaaattcgctgtgacttcgatccaagcaatccggagtgtaagaaacaagacaacattatttcaattcacttatgcaaatagatgttacgcaagtttaattgcgagtaatcttaatataacatcgtagcattttataaacataatgacttttctatattaggtggagatgtagtgaagaaacccgtggctcctatcaggccaaccacaaccaccaaccccaccacaaccactagcagaaccaccaccaccaccacaactgaacccacaacagaacccacaactgaacccacaactgaacccacaactgaacccacaactgaacccacaactgaacctacaactgaaccgacagaagcaccagatacagatgataatatcgaattgttcggcgacaatgaagaggactctgaggatcaggaggatctagatgatcaaggagatcaggagtatcaggaggttgacccctatggcacttacgatagccaaatccactcaattggggctaatgatgacggcaactggaattagacccaaatgaaaagcagcaaatgatcgattcgatctgttgactcaattgaacatcaataaaatggcaatagcggaactgcgctacataatgtaatgctacataaatgtcttttcgagggttgacagaaaagttatgcatgtaactttttgatgttatagaaaattctgcaaaaaatcgcagtagcagtttttatctgttttatggcctctccctcaaatatctgcagtttttcgagaatgttctggcctcgccaattgttatataatcactagtagctcgtgccattgtaggtcaattccagactagtgcgtctgagtcgagtgtaaataccaattgaacgtatctcgtttagtatatatactatatggtctatttatatgccatatttgtcacagcttccggcttaacggggaaataatcgtatttatttgggaaatcgtagcgatactaggatatacatttaaaagggcaacattatctgaatgaccatcacggaatcatcggcctgcagctgtatctccatccatatcattgtgtatttgtatctttgtcgagttgtgcttaaatcagcgcacaattgcgatgattgttgccgttcgccaattgaattaaagaaaatgcgaagcaagtgacacacaaaggcgacggcgatacgaataaaatgggtggaaatcgaagcgccccaggtcagtccagtatcagtggagtcaacgttcagtctggtttttgtggataaagccaaaggaaccgaatatatcaagatgaatagcttgcaaggatcgctggtcctcctgctgctcgccggagtttttcttcaaagtcaggcgggtctcttcgattgcgaggacaagatacccggacttggagatgtgagcgataagatatcggagattacgggcagcagtagcagttcggagcacgaggtgcgcgacttcttcaagaacgtgggatgccacatcaaggagggagccaagaagctgggcgagaaggccaaggacttgggcacggaactcaaagagggcgcccagaagctgggcgagaaggccaaggtcctg

SEQ ID NO: 1217 - DNA, 677 bp, DROSOPHILA
atgagcagatccctgtttctaattcttttattgggaatctcctgcctggagattttccaggctcgctctcttctggaggggagaaaacaaagatttgtgcgcagacgcatatcacccgacgatcctgatctcgagatcatcgaggtcaaggacgtctactaccgaaagcggcccaagaagttggttgtccagctcgatgatgacgaattaaactggaaaattcgctgtgacttcgatccaagcaatccggagtgtggagatgtagtgaagaaacccgtggctcctatcaggccaaccacaaccaccaaccccaccacaaccactagcagaaccaccaccaccaccacaactgaacccacaacagaacccacaactgaacccacaactgaacccacaactgaacccacaactgaacccacaactgaacctacaactgaaccgacagaagcaccagatacagatgataatatcgaattgttcggcgacaatgaagaggactctgaggatcaggaggatctagatgatcaaggagatcaggagtatcaggaggttgacccctatggcacttacgatagccaaatccactcaattggggctaatgatgacggcaactggaattagacccaaatgaaaagcagcaaatgatcgattcgatctgttgactcaattgaacatca

SEQ ID NO: 1218 - protein, 206 aa, DROSOPHILA
MSRSLFLILLLGISCLEIFQARSLLEGRKQRFVRRRISPDDPDLEIIEVKDVYYRKRPKKLVVQLDDDELNWKIRCDFDPSNPECGDVVKKPVAPIRPTTTTNPTTTTSRTTTTTTTEPTTEPTTEPTTEPTTEPTTEPTTEPTTEPTEAPDTDDNIELFGDNEEDSEDQEDLDDQGDQEYQEVDPYGTYDSQIHSIGANDDGNWN

SEQ ID NO: 1219 - DNA, 6656 bp, DROSOPHILA
tacagttaagcctggtttttagttatataaagtacatgtggttatttactactattagtttggtaaatatgaaagtttatttaagcaaaaaacattgtaatatttcctatttttaacaaatgtttaataactggaatgtcaatcaatcaatgtgtctatttaatgttctgacaattttactttaacttcttacttatatagaaaattcacaaagttgttattcaatttaatgtttcgggatgaaatatatatattttacctaggttcctatactatttaacacaaatagtgcactgggttactttttacaaagacactagaataataataataataataataataataataataataatattctagagtctttgctttttacctatactacggttgtgttttcgatcgattgacacggcaagttctgaactacatgggaatgtttggttcgctcttgattcgagtattctgagcatgattcgatcttggaaagattttgagatcaaaattcttaaatcgagatcgttgagaacggatttttctctgagtgttgagcaattaatacggttgagacaaaggcactagaataaaatagtgtctagaataattctagtgtctttggtaaagagaaggcaaaccccaagaaaaatatataagaagagttactcggaatgtggaaggttggttgacggagaaatttggaacggcgacaattgtcgccgacaatcaactaaattttggattgtcttttttttaaacaggtatattctcaattggattatgccgagtttacttttatgattttgatcattgccatgttggaaggtggataggtaacaagttacagttccttgaagacttatgggaccaacagtccagccacctacgggttaatcaacacggggataatgtgtggaaacatttatcgataattttacaaattagagggatataaaacaatttggtatattttcatttcatacctggaaggtatattgcgttgcacaaaagcggtcacactaattgatagacgcaaagttttaagtaaaatttgggtttagttaggcaaaggtaattaaaaatgataaaggagcgaaaaatgtaacaaaaaatgccgatatgttgtattctacgctcttttatcgattttttaaaatgcatttctcattgtccattcgatgaaacacgtaagcggttgtaagcaaactgacaagatggcggccacatctgcttaattgaaaatcgaaattaaatacgatataactagcctgccgacccaaattgcaaacggtttggagctgttgtaatcataatatttgaagcccttaccggcacataagtgaggttaagcacaagcgactttcatctatattacttgccttcgttgcagaccaaatgggtgattccgacgatgagtacgaccgcaagcgacgggacaaattccgcggggagcgcgagagttaccgtacggaacgccgggatgaccgccggccggtgggcggctctgccggtgcccgcgacgagtgggcggagcggtaagtgaaggtcacctttcaactattacatgacatcattactggacgtttcagcaatccgttcaggggcggagcttccgcaggcggaggaggagctcgccacagaccagactacagcgactaccgtggcccgggagctagaccacgctatgggtcacccgtccgtgatttgcccccagccaagcgtatgcgcccggactggggggacggcgatgtgcgcgccaatccccgctttgggggtgagttctactagactccaggcttttcagactgcttatcgaattctctttctataaaggctatgatccgtatttgatgcaggcctggaacgaccactaccagtcgatgcattcggcctactcccacggtggccatgcaccacctgttcgggagtccataggcggcggcggaggcgacacccttacccaaccagccatgctcaacctgaagcagtttctcgacacccaggacgagaacatttctgactcggaagtgatgcgcaaatacaccgagtataaaacagacttcaagcgccagcagctaaacgagtttttcgtggcccacaaggatgaggaatggttagtagctggccaaaagtggatcaacgacggttttgttgatatctctgcttgtgccggcgcattgcgttatttgccgttcttctgttcgccactcataactttctatatattaagtttttccctgcagcttattgggtttgtgagataaaaacttctctgagagattctgcgccatagcagagctgttgattgagtataattcattaattacccggcgagcaatgccgaggtgtgttcatatttcaaaaccgcgatttatttaaattcgattgacgaacaaaagcctaaataaatataaaacaatcccataaataacgaaagcgataagcttgcaaggtaagattttgggtgataattcaacaacaacctatctaaacaggtgaacaatttaccgaatccactatcaacagccgggcgaaaaagaaagagagatgaaattaaaacaaggattttaattactgcaatattaataaccatactattttttttaactgcaggttcaaaaacaaataccatccagaggacagtgttaaacgcagcgaggaacagcggggcttccttcaggtttaattgtttgcttcccttaccgcagaaaccgtaaccaaacttacttattgcagaggcgcactgatgtcttcatggagttactcgagaacggaacaataggaagtgtgaaggtggattcttctcaggctgatgctctgatccgtgttttagatacatgcgttataaagctggaaggcggcactgatgaggacctcaaagttttagacgaaaaacccaaggatccagtagtgtacgaacgaaaggcggagcagatgcaatccgtcaaggaggtggagaaaacaattaacagtcccaaagaggagatgagtgaggcagatccggtgtcgacacaacggaaacctgtgaggcctgttaattctgatggggagaactgggatgatgacgatgcagaaaattcggcgccaaaaaaagaattggccgaggattcaaaagacagcgattccaagcctgaagacaaacagttgaacaagaaaaagacaaaaaaacgcaaacgcaacagcagcgatgatgacagctcctcatccgaatccagttctagctcagatgaagagaaacttaaggaaaagtatgatgtggaagatggccttagggccgaacaaaaaaccgaggcagagaaggacagacaagaagcgaccaaagcaaaacagggacctcaaagtcccaaactggacgaggacgaaggtaatgaaaatactgagcccaaaggactagactcaaaaatcaatacttacgaggagattgacaatactttgaagtcacctgaaatatcttcgaatccaattaagaacacggataatggagacggcagcaaagtagaagaggatggagagaagccctctgttggtaaagacaaggttgtcgaaaccgagactattgatctagacaaagtaaaggatggccagcctagggctctgcataggacctcctccatctttctgcgaaacttagccccctcgataactagatcagagatcgaggccgtgtgtaaccgtttttccggctacttaagggtggccattgcagaccccttggtggagcgtcgttggtatcgtaggggttggataaccttcatgcgagacgtcaacattaaagagatttgctggggtctaaacaatcagcgactgagagactgtgaaatgggagctatcgtcaatcgggacctcagccgacgggtacgtccagccaatggtataactgcgcacaagcaagtagtgcgatcagacattaaactgtgtgccaagattgctttgaatctggatgagaagttcagattatgggcagaggggcctaaagatgattccaattccgcccgagcgaacgagtcctctgaaaatggcagcggatccacgtatggcttcaattcacaaaacccggttctgcaaaacatcactgattaccttatcgaagaggcgtcagctgaggaagaagagcttctcggccttaccggcgaaaacaaggacactgagggcgagcccattgagcgtgacgaacaacttatatccgttcttgatcgccttgtgctttacttgcgtatagtgcactcagtagactattacaaccattgtgagtatccatatgaagacgagatgcccaaccgctgcggcattatccatgcccgcggtccacctcctgttcgggtgaccaacaacgacgtgcaagagtatatcaagatatacgaaagcaagttgcaacagtttcttactaagactgtgccactgagtgacgaagagattaagaatcttggagccaaggacgccgaaacggaggtggaaaagtttgtgcaagcgaacactcaggagttagccaaagacaaatggttgtgccccctatcgggtaagaagtttaaggggcccgagttcatccgcaagcacatcttcaacaagcacgaggaaaaggtcgacgaggtgcgcaaggaggtgcaatactttaacaactatctacgcgatcctaagcgtccgcaacttcccgaacatccaggcacctctaagcgtccagaatcggaatctgctcgtggaggtggtggagggtgagtaaaacatttattcccgttgcacaacaaataagggtaattatttaattttgtttccaaaatgttagataccgaccgcccatgtatccacctttttcggcaatgccctatggttttggtccacccatgatgggtggtggccgtggaggacgcaacttccctcccgcgcgcaggttagtactatacataaatttctatagtgtagatgtgcaattctcggcagtcattcccgacatttttgaatagataaatttaaattttattgatcgatttgtccaagaatcgaagacgatctttccttggagtgctaaagagaaacgtgccgaacacatgattccactttccactacagcggataatacagttccgacgaacatactcgaacactgatagcatttaggagactctatcttgcccttttttttactttttctcttttgttggcctaaattgaaatttgtcacaactttcttgtgtcgcaaattttttgcagagaattgcctttggaacaccagcgccggcttatcggttaccatgatttggatgcgcctgccaattctgatatgtttgactaattgattagcacaatacaaataaaaacaggccatattgatgcagcttatatcggttggcgagctcaagttttaaatgcaattcaagcaatgctaggaaaagtatctactgcatataaagatggtttatatacgactaatgatatctgttttcctgtacaatgctagaacctacctttattgcccaaaataaatgaaaatccatagcctaaaagaaaacattgtaatattttgtatctctgccctatccatagtcttgcgtgaataattccaatatctatattcattctcgttgcttgcagacccggtggttttgattatcgacccagatcacactaccgggacttggacgcgccgcaagaaccatactagaactagctgtgcggagaacacaagctagataaattgtatcaaattaactgataaacactcaaacactctcttaattttcgcctgttttgtacggtcaacttttgtattccacaaggaaataaagtgcgaaaaaaagctttttgctgagtttttattgggttctattgtttttccctttgtaaacagagagcgcgtagtataacgtacggcaatgtctaaacgagatacacttaaacacataagttctcttggctagccccgaaagactggcatttggagaaacgagctaaaaataagaacgcaatcgccggcgtgctgagatcagaacgtcaaaaagaaaatatcccttgccaacgtaacattgtggtgcagttggtcccagtggaccaggagaataaatggtgtcaagcacggaatgtcctgtttgcggagttgctgcctcacaagcgtgcactaggtgcaaaatggtgcgatactgcgaccgagagcaccagaagcagcactggccgcagcacaagcgcagatgtaggccattcagcgaggagcaggatgccgagctgggcagatatttgaaggttacccagaacatagcagccgggcaaatagtcttcattgaggagcccctagtggtgggtcccaagtggtatctctccgacgcagacaaggaggcctctaacgttccgtgtgtaggctgttacactccgtgccgtctggggaagcaccagtgtcgaaggtgaaatatactaataaacatagtctatcatccatttgaacaatgtgatttccagatgccgttggccagtctgcagcgcaggctgcaagcacgagtcaatggaatgcagcgtgcttagcctcggatcgggttcaccaactcgggcagatgcccgctcattgaacgactacttcaggggcgatgctcttttggtgctcaaatgccttctgttgcagcgacagagtcccacgaaatggtccgcgttgttagagatgcagtctcatgagg

SEQ ID NO: 1220 - DNA, 2896 bp, DROSOPHILA
ttgcacaaaagcggtcacactaattgatagacgcaaagttttaagtaaaatttgggtttagttaggcaaagaccaaatgggtgattccgacgatgagtacgaccgcaagcgacgggacaaattccgcggggagcgcgagagttaccgtacggaacgccgggatgaccgccggccggtgggcggctctgccggtgcccgcgacgagtgggcggagcgcaatccgttcaggggcggagcttccgcaggcggaggaggagctcgccacagaccagactacagcgactaccgtggcccgggagctagaccacgctatgggtcacccgtccgtgatttgcccccagccaagcgtatgcgcccggactggggggacggcgatgtgcgcgccaatccccgctttgggggctatgatccgtatttgatgcaggcctggaacgaccactaccagtcgatgcattcggcctactcccacggtggccatgcaccacctgttcgggagtccataggcggcggcggaggcgacacccttacccaaccagccatgctcaacctgaagcagtttctcgacacccaggacgagaacatttctgactcggaagtgatgcgcaaatacaccgagtataaaacagacttcaagcgccagcagctaaacgagtttttcgtggcccacaaggatgaggaatggttcaaaaacaaataccatccagaggacagtgttaaacgcagcgaggaacagcggggcttccttcagaggcgcactgatgtcttcatggagttactcgagaacggaacaataggaagtgtgaaggtggattcttctcaggctgatgctctgatccgtgttttagatacatgcgttataaagctggaaggcggcactgatgaggacctcaaagttttagacgaaaaacccaaggatccagtagtgtacgaacgaaaggcggagcagatgcaatccgtcaaggaggtggagaaaacaattaacagtcccaaagaggagatgagtgaggcagatccggtgtcgacacaacggaaacctgtgaggcctgttaattctgatggggagaactgggatgatgacgatgcagaaaattcggcgccaaaaaaagaattggccgaggattcaaaagacagcgattccaagcctgaagacaaacagttgaacaagaaaaagacaaaaaaacgcaaacgcaacagcagcgatgatgacagctcctcatccgaatccagttctagctcagatgaagagaaacttaaggaaaagtatgatgtggaagatggccttagggccgaacaaaaaaccgaggcagagaaggacagacaagaagcgaccaaagcaaaacagggacctcaaagtcccaaactggacgaggacgaaggtaatgaaaatactgagcccaaaggactagactcaaaaatcaatacttacgaggagattgacaatactttgaagtcacctgaaatatcttcgaatccaattaagaacacggataatggagacggcagcaaagtagaagaggatggagagaagccctctgttggtaaagacaaggttgtcgaaaccgagactattgatctagacaaagtaaaggatggccagcctagggctctgcataggacctcctccatctttctgcgaaacttagccccctcgataactagatcagagatcgaggccgtgtgtaaccgtttttccggctacttaagggtggccattgcagaccccttggtggagcgtcgttggtatcgtaggggttggataaccttcatgcgagacgtcaacattaaagagatttgctggggtctaaacaatcagcgactgagagactgtgaaatgggagctatcgtcaatcgggacctcagccgacgggtacgtccagccaatggtataactgcgcacaagcaagtagtgcgatcagacattaaactgtgtgccaagattgctttgaatctggatgagaagttcagattatgggcagaggggcctaaagatgattccaattccgcccgagcgaacgagtcctctgaaaatggcagcggatccacgtatggcttcaattcacaaaacccggttctgcaaaacatcactgattaccttatcgaagaggcgtcagctgaggaagaagagcttctcggccttaccggcgaaaacaaggacactgagggcgagcccattgagcgtgacgaacaacttatatccgttcttgatcgccttgtgctttacttgcgtatagtgcactcagtagactattacaaccattgtgagtatccatatgaagacgagatgcccaaccgctgcggcattatccatgcccgcggtccacctcctgttcgggtgaccaacaacgacgtgcaagagtatatcaagatatacgaaagcaagttgcaacagtttcttactaagactgtgccactgagtgacgaagagattaagaatcttggagccaaggacgccgaaacggaggtggaaaagtttgtgcaagcgaacactcaggagttagccaaagacaaatggttgtgccccctatcgggtaagaagtttaaggggcccgagttcatccgcaagcacatcttcaacaagcacgaggaaaaggtcgacgaggtgcgcaaggaggtgcaatactttaacaactatctacgcgatcctaagcgtccgcaacttcccgaacatccaggcacctctaagcgtccagaatcggaatctgctcgtggaggtggtggaggataccgaccgcccatgtatccacctttttcggcaatgccctatggttttggtccacccatgatgggtggtggccgtggaggacgcaacttccctcccgcgcgcagacccggtggttttgattatcgacccagatcacactaccgggacttggacgcgccgcaagaaccatactag

SEQ ID NO: 1221 - protein, 939 aa, DROSOPHILA
MGDSDDEYDRKRRDKFRGERESYRTERRDDRRPVGGSAGARDEWAERNPFRGGASAGGGGARHRPDYSDYRGPGARPRYGSPVRDLPPAKRMRPDWGDGDVRANPRFGGYDPYLMQAWNDHYQSMHSAYSHGGHAPPVRESIGGGGGDTLTQPAMLNLKQFLDTQDENISDSEVMRKYTEYKTDFKRQQLNEFFVAHKDEEWFKNKYHPEDSVKRSEEQRGFLQRRTDVFMELLENGTIGSVKVDSSQADALIRVLDTCVIKLEGGTDEDLKVLDEKPKDPVVYERKAEQMQSVKEVEKTINSPKEEMSEADPVSTQRKPVRPVNSDGENWDDDDAENSAPKKELAEDSKDSDSKPEDKQLNKKKTKKRKRNSSDDDSSSSESSSSSDEEKLKEKYDVEDGLRAEQKTEAEKDRQEATKAKQGPQSPKLDEDEGNENTEPKGLDSKINTYEEIDNTLKSPEISSNPIKNTDNGDGSKVEEDGEKPSVGKDKVVETETIDLDKVKDGQPRALHRTSSIFLRNLAPSITRSEIEAVCNRFSGYLRVAIADPLVERRWYRRGWITFMRDVNIKEICWGLNNQRLRDCEMGAIVNRDLSRRVRPANGITAHKQVVRSDIKLCAKIALNLDEKFRLWAEGPKDDSNSARANESSENGSGSTYGFNSQNPVLQNITDYLIEEASAEEEELLGLTGENKDTEGEPIERDEQLISVLDRLVLYLRIVHSVDYYNHCEYPYEDEMPNRCGIIHARGPPPVRVTNNDVQEYIKIYESKLQQFLTKTVPLSDEEIKNLGAKDAETEVEKFVQANTQELAKDKWLCPLSGKKFKGPEFIRKHIFNKHEEKVDEVRKEVQYFNNYLRDPKRPQLPEHPGTSKRPESESARGGGGGYRPPMYPPFSAMPYGFGPPMMGGGRGGRNFPPARRPGGFDYRPRSHYRDLDAPQEPY

SEQ ID NO: 1222 - DNA, 44014 bp, DROSOPHILA
ctctagtttttaaaaaattaaaattttttaactttgagaaatttatttaaatttataaataaaaatagcaccacgtaatgtataattgtatataaactaacccttctagtttcccaataaattttattttaaaaaaagacttactggtccacatggtgggggtagctcttctagcataaatgttgtttataaaatgaatccatattgaatttaattcgaaaataattaaaatgttcttaaaaattggcactcaataaaaatcgcgtctgcttctcttctaatcgcaagtgaatccgcgataaaggttgtgtttttttttagaaacgtaatccgttaatcaatttctttctcttattgttgtttttctcgccctttgctcgtccccgtctcttttaccaacataatttgtctttgcatgttccgttgtgccttccaaatttaatatttcttacgatgcctatgcgctcgccgaatgagagcgacggcctattaatcggctagaaattaaatatcaattaattagtttaaaatatcgccaattcctcgctgtgattaggcacattaacttcggcttatattctgagtcaatatacatacatataaattattgaattcacctttttcatttctattgcagttaagggggcggaagcccctagattaggaataaggaagattcttaccttgaatggccagacggttcaatttgttaatagaggtctagaagccgcttccacaaaaccaagttcgctaacctagtacttgttaaaatggttaccgtcagctaataacaaggaagtccacgttattgaaacactttgtcggcaacgatcatatcggtgccaatcaattattattgccaaaatattccctaatgcgtcagatgtggtctgaaaaaggggatgtttaatgcgttaactgttgcggaaaccacacagccacctattaaggttttgtccctttttttgcatattgcaagtcgatagtgtcacattccatatcagcagcgatccccgtcatacaaataggccttatatgcgaccaagcttggtggatccgcgctcagagtgaacagtttaccccctgtgcagcaacaataggaagcaaagttagatgcgtcgaaaaacaaccaaaagtacagtctcagcagcagctatcacaccaacaacagcagccagatcaacagcagcatctaacatcacagccatgcagctcgcatcaattgttcaatgaccaatccaaggaaagactactagtttctcagattgacatgccattccaaatgatggagtcgataacacgccttgtctcaaaattattataattatttacgtagcccaaccaacacttggtctaggtcgtactacaaactattatcttatcttatctgttgttcaccatattttcaattctgctgaagacttcgagaagctcttcgacgacttggtgacaaagttcttcttctgggtattggaatgcttaccattgtccgtgtgggtctctaaccaccctcggaagagcactcgcagactgatgtctgttaaagtttccaggtcctttctacaggaaggcccccatgtattatctatacagccaaagaacacaaacaaccattgactttgttttctgatcataaaatttaacgtcgctgcgggaaaaatctcgcacaagctcttttgaaatttgaagttatggacaataattgccaaggatttgcctaaaaagggaaaagggtcgcgaccctggaacttttcattgaaaggacacaccatagagttgagcttcgaaaagcccctatcgcacaattttccctggtgcagtgtcagcgtttgatcctgggcaagacactcacctggacgtagcacacatcaaaaaagcaaacacatgtcgtgctaatctaggaagcccaacgacgccctcgcaaatgacctccatattcgcactgcagagaacggatcaaccgtcactcaagccggtataaagaacgcctccacagctcacatcaaccaccttaacccgatgacccgatggcttaaacaaaaacaccttggaggtctgtggacaagaagaccaaataactcttaagttctgaagcagtaattgtttttatactatttataaaaattgttttctttgtcctgttatgtattcacgatatcctctcccatttctttaactcaacgtattttagcattaagttggttaatgtgcgttttaataaatgtctgtgttacaataaagaaaatttaatgcctttacaaaaaccgtatagcgcgaccaggattcggtcccattgctgtagatagaaaacgtctttgtgttcttattacttccgtttatcagatggaaatgtgtcaaattttctaccagggccatgttgtgaaatatattaataagcaagatagcccagttaatttggccacgttatttccaacgcaggtaaggaactcaataatttataaatatacaatctacaagttggaaactaaatgaataatttcatttcatttaaaacttttataataaattttacatttatttttatgtcaaatagagcccgcgcactacatatttgtctttatgtttcgtaagttatacagaattctgtccgagaagtagagtttgcaactacttgaatggctaatgaggtttagatcttattgttgaggatgccagaagtcactcaagtagcgaagatctcgttattttcgatcagtacctgtgagttcatcaaaatatgaagtttttctattacaataaatttttcttacatattaatttttgattaatagtatttctacgtataatgcgtgaattatgatttgtaagtaaacatgtaaacatgtaatgttgcccaattatggacgatttggttgaaatgcataaactttacatatacttatatacataaacgcctatgtacatatatgtatagatatttgaatgatgaatgtgacttttgatgagcagtcaaattttgacatatatatatgtgctgatttatcttttgtctaacaatgtaatttgtctatccgaagtagcttaggattccgctgtgtgaacgttcatcgagaacgcacaaatactttcggccttcccagataccgctttagcttggtattgaccgacatcgtccatattacattttgccactgcaaaagagtatcgatggccatcctttgtaaatgagtaacgtggaagagtttcgtcaatgggtttcccatctttcagccaaaccaaatttaggagctcagaatctatttcgcattcaaatgtggtaccctctccctcaagtacagaaactgacgtgggaaactttacaaaggaaggctgcttagtctcgtctcctggcactgttacatttattgtgcaggtactgaatgattcgcctatatcattgaaggcctcgcaagtgtaggtgccgccatcttcgggaaatatctctgcaatttgtaatcgatatatattggcctcgttggtgtattggaaatccttgctcggctttatctctttgttattatgcagccatacgacatcgaaatgttgagctccaattatgcgacaagccagattcactgcatcgccatccctaacaaatctggactccaagtggctaactattttcggcgcgttgtcgccggcatttacttttcgcttgtttatgtttttatccagggcttgaaaagaaaattaattgttatttaaatgtttagaaaacatagaaatttaaaaagtaaagtaaaattttagataatgaaaacgaaatttatcaaatatacaaaacaaaagtatttacttaatcagtataatcgttagcaaacgagggtgaacaaagaaggtaaatcaggtaacggatttacattcccggattacttggcaaagtatttatttatttaattattatctacttacgctgtattgttagtttgcatttagtttccacggctccaacagaatttgtggccgtgcaagtgataactccctcgtcttcaggaaacacttcgttgatggttaaagttgcaataccatttttataccttaagtccaaaatatcagaagatgatagggactttccatttttcgaccaagagatttgaggctctggatctccttttacatagcaagttaatattaactgttctccatcgtgaattgttaaatcgtgaaggggcttcgtaaattccggtttgcacattaatgaatcatctggtggaactaagacgacatacatatatatgaatacgaaatcttttatcgacaaatatttaataaatacgtacgtataagctctttggtagcgcttcgtgatcttgacgggcttcctggggcctgtaaactatttgatgcatacttcttcttgtttgaaatgcctgatgagtttgagttggacacatttactttgtcaccctataacagaataataaaaaaatatcataaaatttttttaaatttaaaatttaaattttttacttacctgtggttcagatgtgttttggactgaagatgatgtatactgccgggatgtcactattgggaggggagctggcttaattggctgctctatgtatttcctatctgtttagttaagtagagacaattcatttcaaaatttaaatgtttaaaaggatgaactgtaactacagttttcatgatttgagaaaacggtgtgttaatatttcgttaagtcgagcgtatttttataataaacaatatgtatagttccgtgtaacacctactcttgactcgaacgacaatgaaatgtcacttcattgagagtctaaatatatacagttgcggtaacaataatagcaccataagcacattttgtgtttgtcccagcgtttctctattttctgacactttttcatcattttactcactaaacttaaatactacaatgattttcaatcgaaataaaaaaaatagtaacagatctaatggatattttaaaaataattggtaaaacaaaaataaaaaacttcaaatttaggcggtaacaaaaatagcactgtttctcgtagtttgctaaaactaaccaaaaaaataaaaaaataattcatcaaacggattatatcttaagaactatgtttaaagaatcttaatatttggttgcgtgacctttgttggcaatgacagccgcgcatcgtcctggcatggagtccaccaagtcctggcaccgttattgaggaattttgctccatggatccttgaccagaccccaaagatcatcgttatttatgggtttggcttgcttgctcagagagccaacatatggtatttattattcatgcaatctgactttaaaaaatataaacatttaataattttttttagaaaatcaactttccacctgcagtagtgctattattttaaccgcagctatatatataaatgcaataccaaaatagcatcacgttcaaatttggtttaaatcgtggtcaaacaatacgtttgggagtcgtttaaaatcactaatatatctgtgttacaaagtaagacctttattaaattacattgatgggtcaaaaaaaaatgtgcttggttgcggggtataaacttctatagaaaatttcttggttcttggatttaaaaattgtagtttaatgccattttaggtattatcatgcgaaagtattatctgccaatactaaataaaggcctttggcatgtgaaactttttgcaaagacgtgttttcaacttatttaacattttagtattttttggatacacacatgaaacgatatgtccatatatgcacatatagtatatgcctcttttctgcacataattatttatttattagctaaaatgttttttgttggcgttcaaacatgttcaatttgtgaccggatttgtattttgagcgtcgcaatgaactaaattttttcggaacctccaatgttattcttttatattacagtataattttggtataacaggatgtgaagccgtgaacatcatcgcaaaatcaaagataattgtaacggctatacaatttttgtcgtcgacttaatcactttcactgttttagaacgtttgattgagtaagtatatattttaagtatataaagaagcatgctgacgataaatgtgtatttctagtttggatttgattcattattagcatttacctcctgagtaaagaaaattgtgggcgagttgagcctgctcaggcgtaacccattctcctgggaaaattgaatttaaaaatgtattatagcaaatagtacgaacccatcaatatacatgtagacagacacgcctgtttataatattcatacgccttaaaatttaatcttaagtcgattccagattttattcaaaaaatggttaaatcttttaaccataatgagtaatgattttatactcgtaattaatctttaatcctaaaacgcaacttaaagtcctcacaacaaataaagaaaatgaaaatatatttctaattaaatccaagcgataattaaaaacatgatatattagaaaagcataatccacaagtatcttaaattccattactacatacgtcggagtaaaaataaatgaaagttcaacccctctaccagtaatgcatacaagacaacatttagaagataagaaatttactaaatactctgctgcatgcagtacagtaagagtttttgtctttttttaaattggtgaataaataaatggaaattgagcctttttcagcaaaagctgaattctgaagataattaatttactgattaatatgttaaatactaacattttatatagtcaggcattatacaaatagtctttaatgcgttttttatatatccgattaaaaataaataaatattaagtccatctactactactactataagcattataagtctgaagatatgtaatttgctaaataaaataaatttaatcatttacctatctgaaaaataaatttattctttcactaaacctttctctgcattttcgggttttttagaacttacaaagctagtgttcttttagtttaccttcaacaatcacaacacaatctgtttcgtctgttccgtgacagtttgttgccttacagctgtattttcctgaatcggatggcttgcagtcaattatttccatggtgacaactccatctgagtgagtcatcgcatactcgtatttgctaagttctcggccgtccttgtaccaccttacattaggtactggcttgccacttaagcaacacagtagtttgcatgtatcgcgggcttgcatgacgcgtggccgcaaaaggaatgtgaaactgggcgccgtctctgactcttcctgccagaatgtgtacggcaagggttcacgtctgcgcaccggagttgattccgttcggtacctcggctgttcttttggtaagggctgaacatttaggaaaacgacttcttctctagagccatagtgattttctgcgcgtataatatattctcctcgatcgtccaacttaactcggttaatgatgaagtagtaatcatctccaacgtatcgtttcataaacttgacactctgtcgcaactcgatattattatgtgaccaagtgagagtaggtgtggctattgcaatgcatctgcagtagaactttacgctttggccctcatagcaaaattgtgaagatggtcgaattacaaaacgtggcgctgcttgacgcctatcgaaaacagcatcatggatcttatatttctccatcagcaattttcttaaggatgagtattcagaaagccggccaatcggcagcaggaacctctcgaagtcttcatattttcttctcaatttttctcgataggctagataacgatcacggttgatttcctgtttcatagcactatggtctccagtcagccaaggatgcagaagacattcgtgagccgtcatacgcttttctttgtttctaacgagcaattttcttataaaatctttagcttcttcagaaatgtatttaaaggattctacgtcgaagtcccaatcgcaagcctttacgtttttgagagtttgaacatcattatcaccagcaaagggcgataatccgcttaacctaaaaaaaaagattttttaattttgttgtattaaacttgctcgaaccagcaagtggtaaaataactatgcttggatactggttagagttcgtaaaacatttctcagttccgaagatcaggaaaacgctgtagttgatgtcgcgggagtcgcgggactcttatgtacccggaacttagcaaatgaaagtacatgaaatatggtattccgcaggcagcaaagcaagtgacattaaatgcttaagcatccattttccaaagaactattagttttataggtttttaatacaccatgctagacagagacaccaagctaaacagagggtatgggggtactagtgtgcttggaaatgtgatcaaacttgcgcaggcatcacttatagtcttaggtcatatagtttacgaggtctaagagttcatacggactgacagacatacgaaaatggttctagtgactctggtggtcgttctgatctagaatatataaacggtatatatcggaagaaatttctacctttccctgataggaatttataacaaatctaaaaaacccatttacttcacgagtgttgggtatgcgggcgtacaaattacatccaaaaaattgtctatattctgcagctgccatagaggcattttagatctattttaaagaacaggagaatgatattatatataatataataattataaacccttgtagagaaaaagggtatactagattcgttgaaaattatgtaacaagtagaaggaaggcacgtccacacttttgaaagacgtttggacttatttatttatttaaaactaacataaagtataaaataataaggctcctctagggtgacgatggtttatacggagggagaaaaaatatagttctacatgataaacttatgaattaggttggactttagaaaaaaggttatagttttcttgatgttatcgttcgttgggttaggttgattgattgaaagggaactgtagggaaaggagaggacagttaactagaacgtgtttgacgttacttgtacttgttatttgcgatatctaaagtataattgctaaggtcgtcctctatgctgttaaatctcaaattttgccgatttttccgctaagcaaagaagtatacgaaaaaagaacaatgccctttactcgtagactagaaggatatactagatttgttgaaaggatgtgtgtaaattatatgtattcttgattaggatctatctggctatatttccctgtccgtaagttgagattagacatccagagacataaacgcagcgcacgtttgcttgcaaatatatattttttaccaagattaaaataaaatagcctgaagcacatagatacctggcatgtatattgcataaagtaaattaataaaaaggaaacatataaaaacttacagaacataggagagtactccagtagcccacatatcagtgtaaaagccgactggctctctgttgacgatctctggtgcagcgaactcagccgtgcctgttgttattttaacaacttcatttggatcgaggcgcgtcgctagtccaaagtcgataagtttaacatttgtgctagaacgagtttgacacattatattctctggttttatgtccaaatggataatattttgttcgtgcatgtgtctgatgccctcgcaaatttgcctcatatagtttataacttcagcttccgtcattacgtaaccttcagcagtaatgcgttcaaataattcaccaccagataaactaaaataaaaaatcaagtaacaataataagaatattagaagtatattttggttgttgcttacaattccagtattaggatcatttcatcgtcgtcttcgaaagcatcgtgtaagttgataagcttctgatgatgcagttgattcattatatctatttcacgacgtatcaagtctttctcaactgagtgtgatactggaatgaacttggcagcaaaaatatttcctgtgcttctctcacgacagcgatgtactactccaaatgcccctgttccgatttcctcaaggatatcatacctatcatatacactttgctgggatatttccacgggttgcggaacgaacttggagtaaatatcaaacacatatgaatcgtagtctttaactggtccatctgcttttccgcgcagttttcgtccatttgcatcaatttcccatttacgttcaattggtttctttttaacagactccttagtcttgattagagtacttgtgtctgaagcatcagaccgtccatatacattatcagcaaatatgcggaaatcgtactcctttcctggagtcaagccgctgactgccatagacgtaaacctagtatttccgactcgtatccacgaagataatgggtgctcccgccgctctacgtagtaattcgttatgtcgctgcaaccgtcccatacaggtgctttccaactaagagacaatgactctgtgccaatactttctattaaagggaatcgtgggggatctggacgatcactaatttgcacttgtattatagctgtatccgaaccaagttcattctccgctgttatcctataaggtcccgagtccaagtgcgatccatcacgaatgataagaacggcatgtctttctttaacctcaacagtgtaatgaccaccggattcaatattctcaccgtccctaacccagtgtatacgtggttttgggaagccagtgaagggaattttgattacaacattttcacccttatcgaagtaagcagtgtctctaaatcttggaggaacgtttaattttggagcagctaagaatttttcaaaaattcaaaatatttattataccaaaaacgcacaatatgtatatatatttacttactcataatggccagagtggcgcgtgttgattttgctccagccttgtttacagcgcgacaaacatattcatcagcgtcttcgccgaatacgtcattaatatttaggaagtgattgtcaccttctgagtacatgtgataccgggcgccattactaatttcgcgagctcctttataccaagatatcgttggtttaggaacgccatttatggtgcatgtgaattgggcattgtggttttgaatgcaattggcatcgcgtagcggtttcacaatcaatggaggcgaagccgcctgtggatctattatcttgactgcttgtgaagcggacgattctgttgaaaggcctgctacattctgagcaaaaattcgaaactcgtactgtcgaccttcaatgagattgatacagtttatttgattggcagcacagatggtagcgtttacacgctgccatgtgttgctgcctacttcacgcttatcgatccaatagccttgaatgtgagcaccgccatccgattccggtttttcccattccaaatgcacaaagtctcctccgatctcagtgatttgaggactgcccggtggcgatggtgggtcaattgggtctttagctcgaattggatttaacccctctagtggtggacccattccgttctcatttacagccatcactcggaaaatgtattcttggttttcaataagaccttgtacattgaaggcggtatctttgcaggtactagaaacagttatccagtgtggagatgacacatcttttctctcgatgacgtagtgactaactttaagaccaccatcgtaagaagggggacgccagtttaacatacaggagtttttgttaatgtaagagatacccataggtccagtgggtgctgaaggcatgccagtgatgtgtacataaaactcccctgtggcactaccagattcattcgtgaattctatttgatatggaccaccatcactttttacgatattacgaatgtaaatcgctacatagtcgtcaaatatgtttaccttaacatgcgtatcatcattactgtcacatatgacttcattatttttctttaatatcacagttagtggctggtcgccagagtagaaaatcttgatcttcgaattgtctccttctggtaattttagttcgcttgggcacctgttaataattggtggtgatccaatttttagataacctgatgtgttaacaaatccgagagaattcattgcctcacatgtgtagtcaccatcgtctccagtttgcacgttagatatgtgcagtcggaagaccccatctttactgtcgcatgtcattcggcccccattcatttgaatttcttttccattgcgaagccaccttgcggttggacttggcttacccgaggcggcgcattgtaaagtataatccttgccaaagggtgctaccttgtcttgcagtcgtgtaatccaatcaggcttctttccacctagtacctcgcaaaccttgattggcatagtacataagcttggttctgaacgtccagcggaattgacagcaaatactcgaaattcgtaatcacccatctcgatgaggttcataacggtgtattcagtatccaaaacattgtaatcattacactttacccatacggctccaccgatgtcccttctttcaataatgtaacccgtaatgcgggagccaccatctcttaagggtttctcccactttaggtcgacatagtttttgccgactctggttacttgtggggctccaggaggtgatggcacggtgaattttcctttcagcttaaatctaagtgatggtgaagatggcttacttaagcctgcagcgttcttggcctttatacggaattcgtattcactgccgttaattaagttgtaaagttgatacttagtgtcctttataatgtagtcatacgcattccaagacgaatcgtttaaaatatcccgatattcaatttgatagccttgtatgcgggaccctccatcacttaatggtcgggtccaaatcaaagttacatttccagagtcccagtcaataacctttggctgaccaggctcatctgggactgtaaattgatgtttggcaacaataggttcaataatatccaaaggatcagacaaaccatattggttttctgctcttacgcggaagttatatttgtagtgaggttccaggcccatgacatcgtagtgagtgttacgaacaaaactgctaatctttacccatgaaccactgttatctaatttttcaacgacataatttgtaatcggtgaacctccatcatccaaaggcgtcttccaggccaaggtgcaagtgtcgggggtaatgtcgtaggcattcaatggaccctgaggtggtaatggcctatctaccaccgtgacgtgacatgaagcagtatctgaacctttgttattggtaagtgtaatggtgtacgatccagtttcatctcgtttagctgatttgttgtaatacattgaagcataatcgttagaatcaaatttaatacgctcgccgggaattacttctaagccatttaaactccatgatgcagttgggcgaggactggcgtgataaggtactgttatacggaattcatctcctgcaattactgtcatatcccgaattgacaaatctgaagtaatctttggcgcatgaggtggtcggcggcaaaagatgagatcgctggaaccgctataggccgactgtccggctgcatttactgcggccaccctaaattcgtattcagcattttcaataagatttggaattttacaagaaaggtctggacaaagtgcatgaactgccttggtccatttgtcatcactcaataatcgtttttcaataatatatccagttatgggagatccaccatcatgtttaggcttcgtccatgctattgttatactatcttctgtcgagtcaataccatggggaataccgggagtattggggatatcaaagggatgtcttgcaagtataggctcagatgtattggccggatcggattgaccatatttattttcagctatcacacggaaatcgtactctttattgagtacaaggtttcgaattctaacaaaaggaactgtgcaaaagctgctgaccttagaccatgtggacgaacgagcttcttttttttcaataatataattttgaatagcggaaccaccgtcatcgtttggtggattccaatacaatgttagagaatctccagaaaactcatcagcacgtaggcgtgtcggtggagatggtctatccagaaccctaacattaatggtggccgtatcgaatcctgacgtattctttaattggagtctatattgacctgagtctgcacgtttcgagttttttaccacaacagatgctgcatcatcagtcaaatgtttgtgcacacggttattgtcatccagcatattgtcattagaataccaaaatgcgttgggcttggggaaagctaggtagggtacgtgaatgctaaaatcatcaccagccctacacactatatctcggacctttccgagttccatgcaaggcttatttggttgctcctcaattgtaatgggctgcgatggcttagatggatctgaacgaccaacttcgttttcagcaacaacacggaatgagtactcttctccttccttaagacttggtactgtgtatacagtggaattaataggtatatcgttaacagttttccaatccttcccgtttttgggacgcatttcgacataatacccttttattctggacttgccatccgtccgaggcggacgccaagataatgtgacaccattcctagtaatacgatccggttttggtggctccggcggatctggacgatagcgctgatgttcagcagtcattggatcagaaggctttgacgggtggccaggcccagcctcatttactgcgaggacccggaactcataacgagctccatcccgaagattggatactgtataggatgtattcggtgttgggtaattgttgcacttaatccactcacccccgcgttcgcgtcgctctacgatgtaccccgtaataggcttaccaccacaatcgtctggaggatgccactccaaattagcagagtttggtgtatatgcagaaattgttggctgagatggtgcaccgggtggatcaaaaggcgacttagccaacaccggcttaccctcgagagcttcggaagctccgtagatattttcagctctaatacgaaaaacatatttttttccctctactagattctttactgtaaagttggtgttgggacaagtgcctggcactggcttccaatcatctacaccaaactcagtgaactcgattatgtaccccgtaatgtcgctgccaccatcgtccttgggggaataccaatgcaaagaaatgtgatctggtgctgtctccgtataactcaaaggtccttcaggtggcgatggcttatctacgacaataacttcaatgtcagcggtatccttaccaaactcattagcagcggtaacagtgtattttccagagtcccgtctgtttgaatcatcaatgcgaaatagagtacgctccgagttagtctcataagatattcgcttgccttcctctaatttgagatcccctcgcttccattcaattgtcggagtaggtgccccagatatgggaatatttaaatttactggttcacctgcacgaactttaatgcgctttcctattaagccatcaaaataaaatcttggcttttcacgcagtggtcgagcattgaatatggccgaaggttcggaagtcttcccgttgccggcagcattaaccgccgatattctgtattgatattgatggttcgatgttactctgtcgtcttgatattcagcagtaggtactggttgtccatttatctttatccatcgtcctgtgtttacgtcgcgacgttcaatgtcgtaaccaataatgggggatcctccattactaattggttgcttccatttaattgtaatatgattcttgtcgctatcagttagttctggctttccaggagctcctggcaccgtgtactgagattttgcaacaaccggttggtcggaagtaagtggatcggagcgcccttgtaggttttcggccataactctaagctcgtacattgttccttccagcagtctgggaaccacggcatggttgtattttgcacttacataatttactgctggtacccacccaccgccatgggtaagatcacgcttttctataacataagaagatatttcagatcctccattatcttttggtggtttccatgatatagtcacagagttcgcagttatttcttcatattccattggaccctctggcggccccgggcggtcgagtactacaagttcgaagctgccttcatcgattccagaactattacgaagtaataggtggtagattccggagtcagacctttgacagttaacagtatgtactacagagtggtgaccgattgatgtaattgttgatctgtcattcgacaatagtggattgctattaagtgtccacgtcgcttctggtgctggctcaccgataaaatgtatatctgtgtgaaatatgagcccgcatttaatgcgcacttcatttagtggagttattatttttggtggcaggtagcgcggctttgccataatcatatcagacggctctgaaggttcagattggcctgcttgattaacagcaataactctaaattcatactcttgaccctcagttagttctggaattgtggttgtgttcttatttgatggaacatgtcgtacattagtccagtaagggctgcccttttcctttttctgtatgatgtattcactaattggagctcccccgtcactttttgggacagcccattgcaagtctatatggtcacgatcccaatcagtaataattggttttccaggcgcatcaggctcgtcaaattcgtttttagcaattatagtatttactgcttctaagggatcggattccccaattgcattgactgctttaacacggaacaagtactccttgcggtggacaagacgagtgacatcgtggactatatgtgtgctcatgccagcatcggaccatgtgcttcgagataaatccattttttcgataatataatgcaatataggcgaaccaccgtcatcatccggaacattccaggttaggtggcagccatcccttgttatctttgttatatccagaggacctttgggtggcgatggtcgatctaatacagttgcatgagcagacgcatcaaatgatccatgctcattctttaatattaaagtataacgaccttcgtcgcttctaagtgaggatacaatttcaaatgttagttcgttttggaaaagaccggactcgcctcgtgaatttgaaccgatttcttttccattatatagccaagtgattaatggtcttggagacgcctcgattggtaatgtccaccctaatcgctttccagcatggaccgtgatgtcgtttagaagtgacttgtcaaagaatggagcaaggaaacgtggcttgcatataatggtgctagacggatcagatggatcgctaggacctccccgattgacggcgatcacccgaaactcgtattctccaccatttgtaagttccggtacatgagccttacaattatcacctagcacaacagcagctcgttcccattgaccaaactttggtcttttttctataatatacgaagaaatgggtgctcctccatctctctttggagtggaccactccaagtccacaaaatgtttaccccaatctgtagcttgcggttggccaggcttatctggatgtgaataaggatcttttgctgttataggctgagaagttgtgagtggttgtgattgtccttgcttattaacagcccttaccctaaaactataatcatgattttcaattagattgtccgctctgatttcagtatcagtgcaatcaccaacgggaacccagcgcatggcctcattatccattttttccacaacataatgagtaatctccgagccaccatcatccttgggtggcctccatcgaagtactatagagtttttgctaacatcgccattacgtaatgggccttccggcacacttggagcatccaggattgttacttttacattgtgcctatctgtaccgtttatgttacgtgctgttaatgtatagacgcctgtgtcggatcgcttcgcatcaagtattcttatcttagtgcggtcatcaaaattggaaatttttactcggtctgtgtttatgatcatattgccttcgtgggtccaatctttgcttggcaaaggctccccagttactggtacatcaaattcaaatacatttccagctttaattttaatatcggacatgaagtttcgatctatttttgggggtgtgtttttggggcgagccacatgtgtttcagttgcatcacttggtgagcctggaccggctttgtttactgctctgacacggaattcatatttaaggccttcaatcaagtcaggaacgtgagcattggtgatgtcatcactgatttcagcgcatttttcccaatcaggagaaaatttgtcccgcttctcaactacatacccggttattggagatccaccatcagcctctggtctagtccattccagatcaacaaattctttgtcaaagtcttttatggttggtgttcctggttttgtaggtacatcgaatggatttttcgcaataatggcttgtgctgttgtaagtggttctgaagttccctgacgatttttggcacgtactcggaatttgtatttatggccaggggtaaggccaccgactttaagtgcggtgactggcccgtcagtttccccggcaggtatccaacgtcctgttgtttcatctaatttttcaacgacataattatctattggttgtcctccatcgtcgtctggtggattccagtgcagagtacaagactcggaatttatttcatcaaccttaagcggtccgtttggcggtgcaggtttgtcaatgacagttaccttaacatctgcactgtcttctccgtttgcgttttctgcaaacactgtgtatataccggaatcagatctggttgcactatttacttttagtttggtattgtagtcaacattagttaccttaacgttgtcctttgaataaacttcctttttcttaagtagccattttgtctgaggcgctggctccccagataccttacaatcaaatgtaaaggactgtccagctttaatacgcacttctactaggctggatctatctataatgggtggtttattgcgagccttcgcaattattggcggagtagaatcagatggctctccagtcccagctgcgttgaccgcggaaactcggaatttgtaggtttggccctcaacaagatctggaatagtcgctttgcattgatcagcagggacgtcaagggcccgctcccactttccatatttatcctgcttttcgataatatagcaagaaattggtgatccgccatcaattagaggtggggtccacgccaagtccacgtgatccttatcccaatcagttgctttaaggttctcgggcttaccaggttcatcgaaaggatttcttgcaactatagattcatcgcctaccaagggctgtgattcaccttcggcattcacagctgatactcggaacttatattcatttcccggagaaagacctgtaacatcaacttggggttctgtagatcgacaagaaggaatccagcaaccagtttcgggctctaatttgtcaatttggaaatactcaattggcgttcccccatcatcgctcggacgtttccatttaaggtggcaaccctctttatgcacatctgatatttgaagtggtccgttaggaggtgagggtttatctgtgataactacatttacaagcacactatcttttccagaagtgttagtcgccgtgaccaaatattctccagaatcacttcgctgcgttggtctaataactaattttgtatagtagtcaggagtttcgattgtaacatttttccctgattgcaaatggtaattggaaagtttccactctacttttggagcgggttcacctgttatatttgcatctaatttcagagcggttccggacgacagagtaatattacgtagatttctacggtctatcttgggggcaagatagcgcggcttagctgtaaatattttgcttgggtctgaaggctccgataggccacccttattcaaggcaactactcggaactggtattcatttccttcaatgagaccttgaaccgttgcagttggagttggggaattggtttccaaagccttttcccaaagagggctgtatttgtcttttacctcaactatatagccttgtatcggagatccaccatcacttgctggttctggccaagcaagttctaccttatttgcagtccaatcggtaggttctggaactccaggctttgttggaacgcctaagcaaatgtaatgatgtataaagttttatatttctagaatttttgaacttactaaatggatccttggcaattattgaacccaacgtttccagtggctccgattccccttccttgtttacagcttttacccggaacttgtaatcatgacctgggactaagccatcaacgttgtactcaggtccgtcagacctgccaacaggtaaccaaatacccgtatctgggtcgaatttctcaaccaaatagctttcaacaggttcacctccatcgtccttgggttttttccatttcagcttacaaccatccttgtgtacttctgatacttctaatggaccttcaggcttgcctggtttcgctaattaaacaaatgggaaatggatcttgtttttctaaatattacaataattgttaacttactaataatattaatttgaaactcgacttgatcctgcccgtaaaagttatgagctgagatcttgtagagtcccgtatctttccgttcggggttgttatttatgtatttggtgttatacggaaggttctcaatatgactaaatgatgtggtttgaacagacttgttgttttgattccaagtaacatccggtgcgggctctccactaatattgatgtccaaaaatatcggctctccagacttgaagttataggtacgaatatttttgcggtcaattttgggggccactattttattatgaaagttaaaaataaaaacattatttattatggtcaaatatgaaaacatttttcaaaagtgtgggcgtggccgttttttgtgttttgtgggcgtaagaatgggcgtggcaacatgggtcaacaaactctcgctacgtcaatgtctgtagaatctcaaacttctagttcttatagttcctgagagagatgttcatacggacggactgacagaaggacagggccaaatcgactagctattaatcctgatcaggatcctgatactttaaatggtcggaaacggtccttctacctgttgcatacatttcaacaattctagtatatccgtttactctacgagtaacaggtataatctccaaactaaactttgtcataagttgaccgattcttataagttttacattgttattacttaattttaatatatatgttttatagtgagttttccagtgattttatgacatacgcctattgttttactactggggaaacaaaaaacattcatgcgtctaaaaaggaatcgcgaaaaagatggcggacatggttacttacactttcttggctttgtaatgataggcttgcttgcgtcagatggttcaccaggcccagcagcattaattgctttgactcggaattcgtattcacaattttcatttagggttggcacagtagctttgcactcttcgccaaggcacgggatagtaatttctgttccctttatccacttgtcagtacctttctcacgtttttcaactacatagccagtgataggcgatccaccatcgttaattggtggcctccaaaccaaatcgacatgatctttatcccagtccactgcttccggagttccgggctttccgggctcatcaaaaggattcttggcaataacagactgttctccagttaatggttcagattcaccttcagtatttacggcaagcactcggaatttgtactcatgactaggctccaaattattcaactctgcgaaagattccttaaagcgaccagatggcaaccaacgcccactctcaacgtccattttctcaataatgtaatggtcgattggcaaacctccatcgtccaagggagcgttccatttcagcttgcacccttctttgtgcacatctgtgactcgtaagggaccctctggggggcccggtttgtctaagactatgacttcaaatgaagcctcatcccgtccagattcattctctgccttaagagtatattttcctgaatggaatcgctttgaaattggcacggtcagttttgtgcgatatgattccatatcaatattgtagttactatcgtcattttcaagtcgggctttgttgtgaagccaaacttttgtagccgggggctctccagagaccttaatgtcgaaacgaatgtgttgtccagccttgatggttatgtccttaatgtttgttctatcaattttgggtggagcaaatcggtcctttgcggtcatctggtcggacggctcggatggcttgctctttcctgccttgttgacagccattattctgaactgatatttgtttcctgcgattaagtcatttacgcgtgccttacagtcaggtgtacttgtttcaagtgccttttgccactttcctgtattgggatcctttctttctacaatatagccagtgatggatgcccccccatcgtcttcgggtgccctccactttagatcacagtggttacctgaccaatcaacaatttgcggcttacctggggtgtcggccgcatcgaaaggatttttggcctttgttggaatatcggtcaccaaaggctctgattcgccttcggaattgactgcttttactctaaacagatattcctttccttccgtaagacctgtaacatcggcttccggtgttttagttgtaagtacaggtacccatcgacctgtttccgtatccatgcgttcgactaaatattgttcaatagggtcaccgccatcatcttcgggcttttcccattttaggtgtaaggtttcggctgttacgttagaaacagctagaggccctttcggtttacttggcttgcacagtacttccagctcaacttctacggtgtcggaacctgagtcgtttttggcagtgacgatgtaaatgcctcgatcagcgcgtttcactttcggcataatgaatgtcgttttatagtcctcgttttcaatttttatgtgatctgaagttttaatttctgttttattgtaggtccatgttactttagctggaggttccgcctttattaaagcgtcaatatgaagcatttgaccgctgcgcataattttcttttgtaggttcttgcggtcaatgtgaggtttaagaaaacgaggtttcgctatcactgattttgaaacatcgcttggatcactaggtcccgccttattaacagcaacaatacggaactcgtattcatggccctcttctacgccagttacggtaccattacacttatccccaggcacggttgcagagtccacccatgcgcgtccagacttatctcgcatttgaataacatatttttgaattggtgcaccaccatcgtttttcggcggatcccaggctaagtcgacgaaatctttatcccaattagttggttcaggcttccctggtctatctggttcatcatatggatttttcgctataattggtttttcggtttccaagtcctcagattctccttccttgtttacagcccttactcggaatttatatgcctttccttcatgaagaccaattaccttggcctccggctcggtactttttccacatggtaaccactgacccgtgtgaggatcaagtttttcaatttcatagtagtcgatgggtgaaccaccatcatcatctggcttttcccacttaagcttgcaactgtgttttgttatgtcattgacttgcaggggaccttttggttttcctggcttgcccaaaactgtgacttccagttctgcttcgtcttcaccaacttcgtttgttgctttgataatgtatttcccactttgagatctctgtgcacgcataacaaagaatttcgtattgtaatcaacattatcaatttttacactatgttcgtcgcttgtaacagatgaattattgaagaaccattcaactttcggagctggctctcctcttatgttaatatccaagctaattgataaaccagtttttacaatcacgggttttaaattgactcgatcaatatgaggtttcactaaaaagtatatatcttaatgttaaaaacttaaaaaagatttttgtaggcaacttacggaatcgaggcttggccacatgccaattcgtttgttcagatgggtccgatggaccagccttgtttacggctcgaactctaaatttgtattgctgtccttcttcaagtttctttacgacgcccttacaaactggactatcagtttcaactgcctttacaaattcccctgaatctttatccattacttcgattatataattggtaataggagagcccccatcccgaatgggtggttcccattttagtttgacatgatgctcatcccaatcttcaagctctgggagaccagggggagcagacacgtcgaatggattcttggcagtaatagccgattcagtttcaagaggttctgattcaccctcctcgttgacagccttcactctaaattggtagcgatgatttggatccaagccctttatctcaatatcatatttttctggatctacggaaccagcaggaacccatttaccagtggcggtatccattttttctattacatagccagtaataggtatacctccatcatctttaggtttcctccatttaagcttgcacccctctttatgaatgtcggagacttcaatcggtccttcaggttttgaaggcttatctaatataatgacttcaactacagcttcgtcaacaccatttatattttcagcacgtaacttatactggccactttgcttgcgatccgtatcaagcaatgtaagtttggtattgtaatctatgttttctagacgtacttgacccgtagacgttaactcggtttcttttaggaaccatgttaaagaaggcgccggttctcccttgacatcgacatcaaatttaacgggttgaccagcgcgaaccttaataggcttcattttgtctctgtttatgtatggctttactaaaattgaaaatatcaataagggaattaaatacttttaaacttaatgatagattgaataatgtgatatgttcgtgttttgctttggcttaacactcgaattgatgtcgtaatctatataaccactatattaatatttgttatttattaattcataaaaaatatatacggtcttacgatttcttggcttggccaaatgaggctctgttgcatcacttggatcgctgaaaccggccttattaactgcccgaacacgaaactggtagatattgccttcaacaagaccttcaacggttgcttcgggaacggatgtcttcaaaaataaatttttttaatggaatcgctttgataaacatcttataaaaaataaaagctgaatataactcgcaatacttacattggtgctgaggatttcatcccaaataggagagaacttatcttttttttcaatgatgtaacctgatattggggcgcccccgtcagacctgggtgcttcccacttcaattttaccatatgctcattataatccacaatgttaggtgtacctggcttactagcagcatcatagggatttttagctatgatgctatcatcggagtccaggggatcggattccccctcttcattaattgccttgacgcgaaactgatactcatggccttcctggaggccctttacatcaaattcggtatcattggcagacgttcgaccaagagggacccaacgaccttgttttttatcaaacttttcaacctgatatgctgaaataggttttcctccatcatcttctggttttttccatttgagcttacagctgtctttagtaacatctttaacatccaagggaccccttggtttgcttggaggagctagaatattaacctcaactgtggcttcatcctgcccgtgttcgttaacagctattatcttgtatattccagtatgcttacgaacagtttcaatgattgaaatctttgtattatatgggatgttcttgatttcgctactgctaggaagttcttctggcttgagctctttatcattttgataccacgttattacgggtgcaggttcaccacgaacattaacatcgtaccttattggcttgccggctcgaatgagcaacggctttaagtttgatcggtcaatacggggcttcactgtaaaacgcaaataaaaacaatagagaacgctctagttctgtgctgcaactcgataaagtcacctagcagttatattaattattactgtctaatataataacataatctaattaacgtcttattaaatacttttaaaactaagaacccaaagtattggtgggattttgacaattttttggtgtctcgctagagacatcgataggaaggaaaattataaaaaattattaaatattattattttattaaaagctttatatacgatttttagatactcgtagtcagttagtgtgtatgcgaacgcgaaatttcataataagtgtgggggtgggaatttattttgatttgtcggcgtaagagtggttttggcaaatctatagtaattaagaaaactaataaaaatatgaacaaatatcacaatattttgcaaacgtcttgggcgtttgggtaggtgtgggaattttggtttaataaaactttcagaaactaggcgacaataaattcagagagcacaattgtactttttatgttgatttaattcacaggcggaaagggctacatcgacttagttagtgatccttatcgatagtgtaagaatataataatactttgtaacgatataactcttccttctacttgttacattgaaataatctagtaaatctataagtgcccgagaagggcctgcataagcgcttaacacttacattttttgtacttcactatttggggaacactagcatctgatgggggcgaaagtccggctttgtttactgctattactcgaaattgatattctccatattcctgaagtccggcaactgtggcttccagttggtctcccggtatttctagagctttttcccattctgtcttatttttattctttttttctattatgtacttttgaattggggctcctccgtcattattaggtgcagcccattttaagcttatactttgattatcataatcagtaacttctggagttcctggtttatttggctcatcaaatggatctttagccacgacccctaccaaagtagtaagaggttccgactctccttcctcgttaacagcagatacacggaacatgtactctgatcccagacttaagccagtaacgtcaaagctagggggctctttttcaccaggagatcttccaactcggacccattttccagttgctgtgtccattttttcaacaacgtattcctttattggcactccaccgtcatcttcaggcttcttccattgaagtttgcatccacttgcagttacatcgcttacagcaaggggtccttttggcgagcttggctttcctagaacaactaattcaacggtctctcggtcaatgccattgcggttctctgcttttaatgtataaaagccactatccttacgcaaaacatttgtaatgctaaaatcagtatgatagtcgacattttctatctttattctgtctccgttggttaatgggatatcatccctccagctccaatgcagctctggtattggttccccaaggacatcaaccgaccatttgtgagttcggccgctctttattgttactcgtttaaaagtagaccgatcgatttgcggcttaactaaaagttgaataaacattaattaaaacattatatttttttctttggggatccaagcgtcttgcagtacatacacagtaagtgcgttggcagttaagctgatgcgagtttttctaagcaatttccgactgtcagcgctgatgtaaatcaaaatgattcatgcataatattaaaatatactatattaaactattttataatatatctcgtgcatccacgattagggaaattgtgtactgttgaatgaaccataatgtcgactctcagtagagcgaaaagaaaagattatttgaaaataccaataccacaaaattaatttttttcagaataaaataagatagaattgtccagttccccgaatatcagatacctgttactgttttgggcaaactatagaaatttaaaactaataaaaaaataaaaaatatcgaaacattttccaaaagattgggcgtttcagttttggacatggcaaaatttggaaacaaacttgcgtcagtgtctctgcaagctagctgcaagctcaatttcaactctctagcttttatagttcctgggatcaaggcgtttatacggatagatggacagacagacgtggtcagatcaaagacactagaatactagaacaatagaattggccgtcactaaaaaagtggctgcatagtgccaagccaatgtatggccgttacgcatcttgttattctagtgtctttggtcagatcgtctaggctattgatgctgatcgggagtatatatacattatatgtccggaaacgcttccctcagccttagaaaagaagttttatttaggtgctggctacagaaatctcgttagccaagtttggactatttctggtcaaataaaacctttttaaacattacaaataaataaattattgttattttattaaaaataagtttaaagaagactatcagatgcccgctacttagctagtggacgagcgaacgagaaatttcagattttttttgcctaatcgataaaataacaataatagaatgaaaaagaaatttaacattttttcaaaagtgcgcgcggcttgtgagtggtcacgggtggtcaaagaacaaaaaggaaaaaaatcaaaacatttttcaaaagtgtggcaatatttggaagcaagcttgcgctccgtctatgtctctggaatatgcatgtctctaatagataaataaatctcaactttctagcttacatagttaataagatcaagacgtttatacggacagagtgatcatgattaggaatatatataccttacatggtcaaaaacggtttcttctacctgctacatacttttcaaggaacgagtaacttgtataaattcgaaaaaaaatccgcgaacgaagcaaaaatggatggtccgatatggttgattgtgctgtgtgtgaaaagttatgtaggcaacacgtataattaatatctgaaagcaatattagttaattaatcttaatattgtttgccaaatgtgtttaaatgttaagccaaagcaggtttatagctggactgaactgataatgtgaatacttacgatttttgtgtttgcacaagtgattgtcagttggttgggaaggctcggaggggcctgctttgttaacggctctaactcggaattggtacaccattttttctttaagaccctctacgttgcactcagggttgggatcatcggtctttgccacctcactccaggaaggtgcgaatttgtcttttatttcaacgatataatgggtaattgggcgtccgccatctgacggaggacgcttccattttaaaaggacactcttgttatcgtaatcatcgataactggctggctgggaggacttggaggatcgtatggatttcttgccacgattgcgtcgaatgtctcaagtggctctgactcgccctctttattaatagccttgacgcgaaacttgtatttcttatttggggttagtcccttaaaatcgaatgaagtctcattcggacccacttctccagctggaatccagcggcccgtctcttcgtccatgcgctctaatgcatatccactaatttcacaaccaccgtcatcatctggacgtttccatttcatttttatatggctggcgcgaatctcttccggctcaaatggtccaccaggaggaagtggcctgtcaagaaccacaacttgagcctcggactcgattgtccctgagctgttcgacagtactaatttgtatttgcctgtgtccttgcgcacggattttttaatagtaatggatgagttcctttccaactggtctaagcaaatgcgctggttgtcaaactttaaattgtctgttccctttacccatgttgctgctggctctggctcaccgtcatatttaatgtcgaaccgaatagtttgcccctttttaacggttacatttttaagaccttctccaacaatgaagggcttaacaaaacggcattttgcaataatggatttagtcttgtcgctgggttcacctgggcctgccctattaacagcacggactcggaattcatactgttgcccctcttttagaccgtcaacggtagcagttctagcatcgccgtcaacttccttgccggaaacccagtcgttagagaacttttctttgtattctacaatatatgcagttataggatccccgccatcagtctcgggggcttcccacttcagatctgcatggtctttatcccagtcggtaagatcgactgccttcggttttccaggctcatcccatgggtcttttgcaagaatggtatttttgaatgtggctggatctgattggccgattgcgttgacagcacgaatgcggaatctgtactgcttttttgggattaagtcatcaattttttttagacacggttcactaggtaaaacctcagcgacagactcccaaccatgttttttgcttaagtcctgccgttcgatcacatatttcgttataggtgtaccaccatcgtcagacgggggattgaagcttactacacaggatgtttgatagacgtctgtaatgtccacatcctgagggggctgtggaacatcttgacaaataatctgtacatctttggtatcttcaccttgtccattggatatttttatttgatatggcccagataaatctcttgacggcttttttattttaaatgtgaccttgtcatcggtaactgcaacctccacatccttcacgggcaatggctttccgtccttgaagagtttagcctctactggtgtttgctttgtaccggaaactaaataaacaaggtttaaaaattttgttgcgcattgatagggaacatcaaaaaagaagttgttgtgtgtatgattgaacgaagacgtctgataccttaatcaaccatgacatatattttcagattataaaaagggaccagaatacggaatacgaatacaaccacttgatataactatgaaccaataaattgtttggaagaacgagcccagtttggcaagtcatggtatataatatcataaattacttttgatgcgtaccgatcgatttcgtaatacctctttaacaaaatattcttcagtgtaaatttataagttgtgatacggaaaaatctcaaaatacaaaagtcgagttattataaatattggtacatttaaatttaataatatattttacctattttttttaaaacaattcttaaaacgatacaacttcttttccttggtatgttcagtttttttttgttttttttttttacctttaaatggcacttctagaagcacaggggcactgataggaccagaaaatttatcaggacagtctatgtttggtctactttctcccttgcgaatagaaagcttgcatttcgaacttagctgtccagactcgcaagttatttcgccctcattagacatatccaggctgctaaatatgagttgatgcttgccgccacccatgttcttgatttcaatactttcactcggtactatgggctctccgttaaatttccagtcacacggtgctgtttgatcctgaagctcgatgtccagaatcaatttttctctctcaacagcttcagtatccttgagttttttattaaatcggttttgatctataaaaaatatatttaaaaagggaataccaccgacattgtattattcaaataaaattatatattttatatacatattatgtattatacataatatataataatatatatatattaaattattaaaattatatgaacggaaaattaatgaacgggtacattttcattattttggcataaaatgaaagtagatatttcgaaatattgtaaattgagcaaatacccgttatgtggggaacctcaagtaaatgaaatctataaataaatcgatttgtataattgtaaatgtggtttatactaaacaaattaatctcgctagcttaaatactttattttatgccaaaaaaggcaaccagtcagtctagtattcgttgcactgatcgcataagaagagacaaacttacagttaataataatttccgactctgtggtgtcggcattcgttgtacatttgaattggccggcatcggtaaccttgcagtccttgatgactagctttcgctttcgaccatcttttacaatttgaatacgtttatcgggcttgatttcttcgccgttacgtaaccactgcacttcacccatagcatcatcgatttcgcaggcgagcgtcactgtgtctttctcaatacactgttgtgatttcagaaccttgacgaacttgtacgggtactctgtgaccttaaggttacactcagtcttatcaggttgcttatccagttgacatctgtagagccccgcatcatcgagcacagaatccttaataataagcttgaggttaccgtttatatctttggagataagatagcgaggatcatcggactccaatttggtgttattcttaaaccaatgcacattagccatgctgctgctgacggagcactcaagagtggtctcatgctgagtgaatccctcaagtttctttttaaggggtttcgtaaaagtgtaggtgggatcggcttcttcgacattcaaaaatgctgtacttgaaacaccgccgatttcaatcgtgtacttgccggtgtcctcgactttcggtgtcgtaataatcaactgataagtatcattttcttgtttaaatttaaatttactgccggtaaacacctcctgtatttaattaagtattagaagtgggaaaattcttctttaaaggctcttagtgagttgagctatattagggaacttacgtcttttcgaaacagccacttgggcttgcaattgggtttgctgaatctggcttcaaaaacaacctttttgtcctttccctcttttgcaaattgatcgataagtggactgaggaacgactcaaccttctgtgctcacatattttaagttgatacgttgtcaaaaatgggtaaaggtgtgtaaatttgatatacgattactaaatgttttgttattatcttaaagataatcttaccaagatagttctcacatatatatggatgtaatgaaatacaaaatcatctatatgtgtgatgtatattgataagatagtttacttttgttatatttctaattattatagattcgagcccaaaaaacaaagttgttctttcctttctttgacacgtattaatatttaaacaaaataatgtacatacatacgtaacacataatcttttagcataagtcaaatggctttaatcaggtataatcatttttctgcttaagtatgccatgtgccaattacaggcgcggcaacaacttatttgtttcaaagggcatttaaaaatcgccttggtaaaccgaaggtacagacaagcggtcggccatactcaaatgatagccgtaccatcgatttcgcatcttatagaatatatagaaatttaatttttttattttctgggttgaaagttcttgacttaatagtctgccggtaacaagcttgaagattatgattatgagcaattgtgagttaaattattggacttacaaataatgatcaagctgatagaatcttgacaaatttttatttatttaataaaatattttgaaacaagaaaccactttctaataccaatagtcgaggcagtctatatttatatatttattctcgttattattatttatcgtatatcgaatttaaactacaagcttattgtgtttttattttgtatacgtttaagctatgaaaaatgtacttccaactttgtcaaaaattgcattgcctttgttacttccacaaaagaaaatcaaagggcttacacacatttatataatataattagtccaaacgcaaacataaacatccagaatattctatgataactcacaggatttaggtattgtgaaaaaattattattaaagggtaaaacgtccatttatgctgatttatagggttagggttattttttcaaagtatgtatacctatatcatatgagctattatccataatattgtggaatttcttctgggtgtactttaagtaaatctgatgtgctcatttgttattttgttggtacttttatttcaagcttttttttgcataaacttcgcttataatttatgcaggtaaaaacatttagccgtatgtgcgatgtttttgagtggaaaactctttgtgaaatgacacatagctcaagaaacagataacaaaattcaaataattataattcaaaataattacttaataattgtagaaaacctttttgtgagttaattcgagatcattagtcaaatttggctacaagtaatttgatatccgaacagtagctatacaaaattaccaaaaatcaatagtcggttacaccactgaaaagtataggtaataatactgagtattaattcggtaatgaattatttatgcttttatatgtatatatatatatatatttatatatatatatatatttagagagagagggagcgcacctcctcacgccgaaatggatgtaatgtcggccaatcgggaatcagctctgccaaagatggtctacgcgatcctggaccctaaatttcaggtatatcaatcgaaaatgtttattggaaaatatttctttaaaaagtttaaaaccataacctgcctaaaaattccttaaaagaaataaaatttaaccaatacgggtgcgatttacaaattggatttattagatatatctaaatgaaacttaagatggggcaaacacttggatgccttattgattgatgcagtttacttggttttaaaatatgtatagggctacgctaagaacgaaattcacgcatttaataaaaatgtagtcaagctttaactgaatcaaagtgccaacaaattatagagaattccaccctgtcatcggcaagtctgataaaagcgaataacttagttcttaccctttcaacttttttaagggccggcaacggtttttctgtttctttaaggtcgccccaattggggtcctgttcgtctttgtcccatttttgataacgacgttttttgagcatggcacggaagtccataccacttgaatcagatacatagagttgcatttcggctgaatcctcaccgtgaatgttcgaaacaactatcttgtacttgctttcatcattgggcttgcacttacgcatacacaatgtaattgtgtttgtttgcccatctgtgaggaacttaaaccgaccgccctcaagaatctcgctaactcccttgtagaacttgaacgtaggtgctggactaccttcgacgccaacagtgaggtaagcagtcgagtctagaaaacaagtacaaagcatgctcatgttaacaactacaattttgttagattccgaagaattgagttacgatataacatatacatatatatgtgcttaaaggaaaataaaaaccaacgcagttgctttaactgattcacgtaaaacaatggggttatttatgatacttggtacatacctggaaaatgtatgttatttcgttatgaaaaaattatttcattaacacatatacataccttccacaacagagtaagactcttggacatcaacgatagaaggaggaccgccatcgccgacatcgcgtaagggtgtggatggcttgttaataagatcttctagatcttgcacgcttgggcggcgtacatcaatcgacggtctgcgccgctatagaccacaaacgtatacattgacacagttggcgataaaaacagggaaaatataaacagataaacatatattaagcatattaataaatggaagattctttgcaacgcctaaaaatcattcaagatgtattacatcacaaataatgaggcttaaaaaataatcaggcatgttccgaggaaaatgaagagagaaaattttagtggacttccttcgccgaactatacccgttactcagcacaaggaatgtcatgtagaaattgcaaaatgtaggtagaaattggcaagaaaggtatagaaaggaaaaaagagattgtaaaatagatgtcgtttttttaatcttaatcgtaatacggatagacggacaggcatgactagatcactttttagagtaacaactttcttctgcctgttacatacatttcaaataatgttttaaacacttttattctatgagtaacgggtaaaaaaaagtaacaccagctattctgtttttttttttttttttgtgaatcggaaaaggcctgaataagaagtatctatccgttgttaatattcaaaaaagtaaagacaaaataatttttaaaaattaaaacttaaaggcattccgctaataatgtataataactttcaaattaccgtttaatgaatactacaatcaaattctatgtgttgaaggttagacatatgtatgaatgaattctgttaatagaagtaaattactagaccatcacaaaactaaaaatcatactatttcttcaaaaaccctaatatacatttccgtttataatttaaagtttaaaactatgttttgtattttagaagtttatatcaatctatattctaagaaagtggaaagttcaagtatgcagctgtgctaagtacaaagatgcatcgttctaagtatgtagctgtacgtcaaatgtgagacgcaaaggcgtacacataaaaaacctttttttaaataaaataagaaaggatggaaattattttattgattagcctaacaataagccgctaaagtcagttatatgggttaagaataacggtataattcgaaatatacacgtaagatgaagtggattgttggaggcttaaagcgcttcaccattataaaatataaccattcttctactcgcccgattgttaccatttttatccaaaactcgaagctattaactacagcccaacaaaaatttctttactcgaattggtaaatcatatttattatctttattactttcctattaataaaatatgttatagtgatatacccctaagctatagtttaagcttttttaagatttttaattcgaaaaagtttttaagcttctaccagttatctaagagaaaaattcgtttggttctatgactgatttaaaaaaagctgcagaaacctagtccgttaagtgtgctaaccgtaaacaattatgtaaattctacaatagtcagcattccgtactttctgcctagcttccatattttcccatatggataaccgaaatctataaaaataaatttcccaaatcaattttgacatttctacattatttttgaatgtgattgaattaaaaatatgggtatttacatagttgctcctattgttatatatgtacatactcctactgtttttatgtaatataactttgaatcattttcataatcaataaaaggcaagcgaacactaggtaatagcagaaatgaacgaaaaactcgactacaatttcaaagacctgtttcgcgtctcccatttctcctggtcgttgttgcttttgctaacgtattcaaaaaaaaaatagaaagtgagaaaacagttaggtcattcgactttcccatggtcttaattttgttgtaaaaacaatgtaaggtgtggctctattctcaatgaaattgtacactaccgttataacctgatttcttaacagggttttcgagagtattggttagtggattagttttatttccaaggtctgatatcttgcgccttgatataagtcgcgaaaatgatatatttcccttttagtgaaaggttttcttcttatgtaaaattgaatatattcatgctggcttagtactacagcaatcaagttcataaatttcaaacaaagatttatatataattgcagtaaaagatattgggtgcaaagagattagtgaatgcctttgataaatataaattattcttctttaagtttcggtagtcaaattattaaacctcttgcacttctacaggtaaatatgttagggtttggcattaaatatgaatagtgtagtttgaaatgtgtttcaagccaaaggactactttctccggggtttggctctttgctctcttgtcttgagatggaatgcaaatcaccaagttatagaaaatttctactacaaaacgtattatgtaacaaccatgtgcagctaactctcacctgtccttcaccgacctcgcctggcctcaataactgtaatattattgaatcgtattataatgctgaacaatgtgtttgacactagcatagcatacgtcatataattaaaacttgtaagtgggtaaattgttgttcagtctgtgtagatattggctttgtttggtatttgaaagcttttcgggagagtatattttgaaaagattgtgtacttgatgtgattttttattgttagagtatttactattttttagttcacgtactacaaaaaaatgtcgctattaagagtaaatacttatcgttacattataccgaaacgaatgctcatgttattccgaatctctgtttctgacgtatagagaactaggtattgtctgcgcactggcaataatttatttgagaataagtttttaatgttgaaattaccgattcgaattaaaactacttttcgagaggccaccattcattgaaatggaatcagaacaaaattatgaaatatttcgaaaatatatccaatattatacgatgtatgtatatcgcaacacatgtgaatttccgtttcacaaaggccgcgattatgattatgtactctttggcagtcatggttagatatcttaaagcaatcaactgtatctgagaagaaataatgtattttaaagcctagcaaaatgttcagccgcttgttcgatatatttttaggtttcgtttgtcaacaagaaataactaataatagtttcacgtatatctgggctcaggcagactatttttgaactttttgattttatgtcatttttagatgtttttcatatatacatatgtaacagacaactctgcggttattcttgacccaacaaagctgtacgaaccgatttcaaaattgtttatcccaagtgcctttgcaagctaactgttttgctctaaaataaattctgcttacggatattcttagtagactgcaaaacttcaaatgaaaccaaaagtaattagatttcttacccgcgtgtccattacttccccaggacgaagtttcttctgtttttcgttgttgattggtggaggatttgcggagtgggtgtacaaatggtgttgttgaatgcaaagggtgtgcgttggagtatttaatgttttgttgttgagatttcaagaacattttttgttggtttgttataaaaatgaagtagtattgacagattgttggttggcgggttgttgtttagtttgaagggcgttttgcatataaggtaggtacataaaagggaacacaggaaatacgtatatttattaggtacattgcagtaatttactttttctcagggcaaaacttaatgagagattaccataggtaaatgactaagaagcaataacattaaatacatttttctcctgtataattaagacaactaaactacttacaaaatagttaagggtacccactaagcataagtataaaagtattcaaaacgtaggattgaatatttttaattaataatacacacattcggttctttttcaaactgacagcttttcgacaattttattgaagcgtcatgaataaaaggacacaaaatatgttatattgatatgaatatacacgtgtaagggcatgcagacatataaaaagtttgaaaagaaaattaattgtgccacgttcaaatgtcttcttttaaacgtgtttactttgaatgcatgacgtgccacatttgaataatttttaaccaaacatttgtcgttttcaacatttctaacaaactacaaatttttaaaaatatttgaatacaaaaaattagttttagttcatagcaaaattatgttagaaataacattaatttttgaagataggatttgctttaattgatataaatgcataattgttttttacaaatgaatggtaaaatatataatttttcttttcttggaattatatttattatgaaactatttccccaaatacttattgcataaaattcaaaataaacttttgacgaatctttttttacgactaggtttttaataggagcaacttctcctatgatcccaaagagaatgagcgatccgaacttagctccactacttacctcatcattgatgatcagagatggtcgtcgaccagtatcagcggggggtataagagatccgcggcgacttgggggctctggtgccagtgatggtcgcttctcccgaatcacttcgatcttgggtgggtcacctggagcaggtggttgcattttagggaccttttgcttctcctcctgttgaaacaatataataattattagttcagagtatggaagaaggctttttttatactaataagccgtcagctgagcaagctcaactcattaagaagccgtttcggtaattttataataacgtgttgttggtacattaatagagtgtgtaactgcgaatctaataaaatacccaccgtaattgtaaaattgaaggctggcattttaattacaaagctattggaccgctttgaaggagatgtcaaaagagcgcagtgcaataatgtttttattaaaaattaaaactaaataaactaaaaatttttttaaccgcgaatacgcagcgacaaaaacagacagacattaaacggattatgagcgagtgttgcatatttatgacaacagatatttcaacacattaaataataacatttcattttacatatattttataagctatttatatactaagtatatattatatatgtataataataaatatgtatatatatgacatattaaatgtgtggaaacatatattacattctaactaaattgcgtattggtataggttttatatactatttgcgtattcacaagcaattgcatacacaaaaatttttatagacggaattgttcaaagcgtatacactcagcggagaggattggttaatggcgtatcaagttgagtattgtaagtgtttgcttaccttagtttcttgcacaggcaactttacttcgggacctctaatgtccggggtgataatggatggtgtggatttctctgatttggtcttatcaatgctaaaaggatcatatttttctaaaacgggccgctcatagttatcctcaagggttgctaaagtttcaggcttcttcaagtcagcgacttgtgccttgactgcttttgtgggagagaactgctccgttgcatttgccttcggtggatggattgtataggttaggatgattgcatacagttattgtagtaggacaaaaaagtcacagataaggaaagagaggagagagaggcagaaattgaaagggaaaaatacagagacagactaaaacagagagtgagccaatatatatataacattttcagtgaaaaatggggcgtagagttacccaaagattgaaagtgtgacagacagatttcgacaactagaaaatattgttgtccataaaatagagacattaaagaagagcattgttcgcaaggaggttttcaaagctgttacctttgttaattgtatagcttgctggggagcagcttgctctcttgtatcctttatcacgggctttaaaactaccccaaggaatgattcattttgaattggctccttagtcatcagatttctgatagaggatcgacgtcgctgctttataatgtctagtacagttggtttgtcggcgtgctatgcatttgtcaagggatttttacaattagtgcggataagggaactatgctacgcaaaatggaaacatttctctcaaaaatatagtctccgctatacattataaacatatcctttctgtttgatcattttgtttttgagcttaacttacctgattattttttttatttccgagatccaatatttccttctgaaaattgttgcaaaaaatattggtttggtgtggggaaacaattttaacaaaatgtaaaaaaaaatcctttgcagcgtatatagttaaatattttacaaatacaatatataattacctcgggttcaatgatgactggtttgagcacagcgccatctcgaccgtctccttcatcaggaagtttacctttgccgactttcaagcccttaggttcgtctgcgtactgttcaataatgtccgtcttctgtatacggtcatgttgtcagttattaggcttttcaactttaaagtacattttaaacaaaatagaaaaaacaaaacatactttgggaattccatttttctgtgcaagaaccgcaggttctttctttccgctgtctattatgggtttttccatcttgtttggtatttccagatcacgagcaaagtcggatggtgtaaaatcggatttttcatacttttcaagctgtggacgttcatagtccggaatttctggtagctcttcgtatttcggttttgcttttgctttggccttaagtttgggagccgcaggctttgcctcctctttaacttgggcgatcgatgccttgcgcagctttggcagaccctcgtcaggctttggctcctctatgacctataccgcacattaaatagacaaatacagtaacaaataaacacgtgagtagtagacgtatagacttacatacaaatacaacaaaagagaccactatactcgaaatacatgtttttgttttttgaagcggtagaaattcggaaaacaaatgataatatggaaaagaaacaagagtgtcctagatctataaggtcataaagacggacagacgggaatcctaattaataataaatattccttgtaggatttgaaaacgcccactcatacaacatgttacaagtaaggggtcatatcaatttaaacttcattccataaaactttgtgatttagcaaatcaataacagtttgtgttatgaacgctgaaatgagcgtatttaatatttaaataaactagaaatggatttgcgactcccagcttatgataacgattatatattcatccatttattaccgaataacaggcataccaatgtttgtttttaaactaaaaccagtatagattgagaatgtaaataagcattggtttatttttaacgggaaatgcccgaatagagaaattattataaataaatttgaagcattttttgggtaatacaattttctagttattcacacataaaatttaaaaaaagaacaagagaaaataaaattaaattaaattaagaaaagaagattaaactggttctcgtttaagcctctcacctttgaagttcgtcgtttttcagcaggttttagcctgggaatctcttcttttaatggttgcggatttttgttagcgtcaattggtttattatcaacctgcttcaggggaaatggggaaatggtttcatatatgtgtatgtattgggattttaagggatttaatttatatagagcccaaaaatcattgacaagatccggtttgtcaccttgagtctgcgtcacttccatgacactt

SEQ ID NO: 1223 - DNA, 23546 bp, DROSOPHILA
gttaaagaggaggcaaagcctgcggctcccaaacttaaggccaaagcaaaagcaaaaccgaaatacgaagagctaccagaaattccggactatgaacgtccacagcttgaaaagtatgaaaaatccgattttacaccatccgactttgctcgtgatctggaaataccaaacaagatggaaaaacccataatagacagcggaaagaaagaacctgcggttcttgcacagaaaaatggaattcccaaaaagacggacattattgaacagtacgcagacgaacctaagggcttgaaagtcggcaaaggtaaacttcctgatgaaggagacggtcgagatggcgctgtgctcaaaccagtcatcattgaacccgagaaggaaatattggatctcggaaataaaaaaaataatcaggcaaatgcaacggagcagttctctcccacaaaagcagtcaaggcacaagtcgctgacttgaagaagcctgaaactttagcaacccttgaggataactatgagcggcccgttttagaaaaatatgatccttttagcattgataagaccaaatcagagaaatccacaccatccattatcaccccggacattagaggtcccgaagtaaagttgcctgtgcaagaaactaaggaggagaagcaaaaggtccctaaaatgcaaccacctgctccaggtgacccacccaagatcgaagtgattcgggagaagcgaccatcactggcaccagagcccccaagtcgccgcggatctcttataccccccgctgatactggtcgacgaccatctctgatcatcaatgatgagcggcgcagaccgtcgattgatgtacgccgcccaagcgtgcaagatctagaagatcttattaacaagccatccacacccttacgcgatgtcggcgatggcggtcctccttctatcgttgatgtccaagagtcttactctgttgtggaagactcgactgcttacctcactgttggcgtcgaaggtagtccagcacctacgttcaagttctacaagggagttagcgagattcttgagggcggtcggtttaagttcctcacagatgggcaaacaaacacaattacattgtgtatgcgtaagtgcaagcccaatgatgaaagcaagtacaagatagttgtttcgaacattcacggtgaggattcagccgaaatgcaactctatgtatctgattcaagtggtatggacttccgtgccatgctcaaaaaacgtcgttatcaaaaatgggacaaagacgaacaggaccccaattggggcgaccttaaagaaacagaaaaaccgttgccggcccttaaaaaagttgaaaggaaggttgagtcgttcctcagtccacttatcgatcaatttgcaaaagagggaaaggacaaaaaggttgtttttgaagccagattcagcaaacccaattgcaagcccaagtggctgtttcgaaaagacgaggtgtttaccggcagtaaatttaaatttaaacaagaaaatgatacttatcagttgattattacgacaccgaaagtcgaggacaccggcaagtacacgattgaaatcggcggtgtttcaagtacagcatttttgaatgtcgaagaagccgatcccacctacacttttacgaaaccccttaaaaagaaacttgagggattcactcagcatgagaccactcttgagtgctccgtcagcagcagcatggctaatgtgcattggtttaagaataacaccaaattggagtccgatgatcctcgctatcttatctccaaagatataaacggtaacctcaagcttattattaaggattctgtgctcgatgatgcggggctctacagatgtcaactggataagcaacctgataagactgagtgtaaccttaaggtcacagagtacccgtacaagttcgtcaaggttctgaaatcacaacagtgtattgagaaagacacagtgacgctcgcctgcgaaatcgatgatgctatgggtgaagtgcagtggttacgtaacggcgaagaaatcaagcccgataaacgtattcaaattgtaaaagatggtcgaaagcgaaagctagtcatcaaggactgcaaggttaccgatgccggccaattcaaatgtacaacgaatgccgacaccacagagtcggaaattattattaactatcaaaaccgatttaataaaaaactcaaggatactgaagctgttgagagagaaaaattgattctggacatcgagcttcaggatcaaacagcaccgtgtgactggaaatttaacggagagcccatagtaccgagtgaaagtattgaaatcaagaacatgggtggcggcaagcatcaactcatatttagcagcctggatatgtctaatgagggcgaaataacttgcgagtctggacagctaagttcgaaatgcaagctttctattcgcaagggagaaagtagaccaaacatagactgtcctgataaattttctggtcctatcagtgcccctgtgcttctagaagtgccatttaaagtttccggtacaaagcaaacaccagtagaggctaaactcttcaaggacggaaagccattgcccgtgaaggatgtggaggttgcagttaccgatgacaaggtcacatttaaaataaaaaagccgtcaagagatttatctgggccatatcaaataaaaatatccaatggacaaggtgaagataccaaagatgtacagattatttgtcaagatgttccacagccccctcaggatgtggacattacagacgtctatcaaacatcctgtgtagtaagcttcaatcccccgtctgacgatggtggtacacctataacgaaatatgtgatcgaacggcaggacttaagcaaaaaacatggttgggagtctgtcgctgaggttttacctagtgaaccgtgtctaaaaaaaattgatgacttaatcccaaaaaagcagtacagattccgcattcgtgctgtcaacgcaatcggccaatcagatccagccacattcaaaaataccattcttgcaaaagacccatgggatgagcctggaaaaccgaaggcagtcgatcttaccgactgggataaagaccatgcagatctgaagtgggaagcccccgagactgatggcggggatcctataactgcatatattgtagaatacaaagaaaagttctctaacgactgggtttccggcaaggaagttgacggcgatgctagaactgctaccgttgacggtctaaaagaggggcaacagtatgaattccgagtccgtgctgttaatagggcaggcccaggtgaacccagcgacaagactaaatccattattgcaaaatgccgttttgttaagcccttcattgttggagaaggtcttaaaaatgtaaccgttaaaaaggggcaaactattcggttcgacattaaatatgacggtgagccagagccagcagcaacatgggtaaagggaacagacaatttaaagtttgacaaccagcgcatttgcttagaccagttggaaaggaactcatccattactattaaaaaatccgtgcgcaaggacacaggcaaatacaaattagtactgtcgaacagctcagggacaatcgagtccgaggctcaagttgtggttcttgacaggccacttcctcctggtggaccatttgagccggaagagattcgcgccagccatataaaaatgaaatggaaacgtccagatgatgacggtggttgtgaaattagtggatatgcattagagcgcatggacgaagagacgggccgctggattccagctggagaagtgggtccgaatgagacttcattcgattttaagggactaaccccaaataagaaatacaagtttcgcgtcaaggctattaataaagagggcgagtcagagccacttgagacattcgacgcaatcgtggcaagaaatccatacgatcctccaagtcctcccagccagccagttatcgatgattacgataacaagagtgtccttttaaaatggaagcgtcctccgtcagatggcggacgcccaattacccattatatcgttgaaataaaagacaaattcgcaccttcctggagtgaggtggcaaagaccgatgatcccaaccctgagtgcaacgtagagggtcttaaagaaaaaatggtgtaccaattccgagttagagccgttaacaaagcaggcccctccgagccttcccaaccaactgacaatcacttgtgcaaacacaaaaatcttaagccgcaaatcgatcggtctacttttaaacgagtaacaataaagagcggccgaactcacaaatggtcggttgatgtccttggggaaccaataccagagctgcattggagctggagggatgatatcccattaaccaacggagacagaataaagatagaaaatgtcgactatcatactgattttagcattacaaatgttttgcgtaaggatagtggcttttatacattaaaagcagagaaccgcaatggcattgaccgagagaccgttgaattagttgttctaggaaagccaagctcgccaaaaggaccccttgctgtaagcgatgtaactgcaagtggatgcaaacttcaatggaagaagcctgaagatgacggtggagtgccaataaaggaatacgttgttgaaaaaatggacacagcaactggaaaatgggtccgagttggaagatctcctggtgaaaaagagccccctagctttgacgttactggcttaagtctgggatcagagtacatgttccgtgtatctgctgttaacgaggaaggagagtcggaacctcttactactttggtaggggtcgtggctaaagatccatttgatgagccaaataaaccaggaactccagaagttactgattatgataatcaaagtataagcttaaaatgggctgcacctaataatgacggaggagccccaattcaaaagtacataatagaaaaaaagaataaaaataagacagaatgggaaaaagctctagaaataccgggagaccaactggaagccacagttgccggacttcaggaatatggagaatatcaatttcgagtaatagcagtaaacaaagccggactttcgcccccatcagatgctagtgttccccaaatagtgaagtacaaaaaattgaagccccgtattgaccgatcaaacttaaagccgttgctcattcgagccggcaagccaataaggtacgatgttaatgttcgtggtgaacctgcacccgtaataacgtggtatcaaaatgataaagagctcaagccagaagaacttcctagcagtagcgaaatcaagaacatcccatataatacaaagatttcaatcattgaaactgttcgtaagcatactggaatatacaagataatagctgttaacgaacacgggcaggatgaagccacagttgaggttaatattctagctcctccaagcaaaccaaggggtcccttggatgttaaagatgttactaaagacagctgtaagctcaaatggaaaaaaccagaagatgatggaggaaaacctatttcagcatatcaggttgaaaagtttgataaaaaacaaggtcgttgggtccctcttggtcgaacgtctgccaatgataccgaatttgatgtaaagggcctccaggaaggccatgagtatcagtttcgcgtcaaggcaattaatgaagagggggaatccgatcccctggactccgatgatagcatcatagctaaaaatccctatgatgctgctagtaagccaggtacacctaacattgtggattataatgagcatatggtaaaattgaagtgggaagcacccaggtctgacgggggcgccccaatatcaggttacatcattgaaaaaaaagataagttctctcctatttgggatgaaatcctcagcaccaatacatccgttcccgaagcaaccgttgaaggtcttgttgaaggcaatatctaccagtttcgtgttcgggcagttaataaggccggtttcagcgatccaagtgatgcaacagagcctcatttggccaagccaagaaatctaaagccatacataaacagagacaaaatgaagcctattaaggttcgcgctggtcaacccgttaaatttgatgtcgatgtcaagggagaaccggcgccttctttaacatggttcctaaaagaaaccgagttaacgtctacgggtcaagtacgtctagaaaacatagattacaataccaaacttacattgcttgatacggatcgcaagcaaagtggccagtataagttacgtgctgaaaatataaatggtgttgacgaagctgtagttgaagtcattatattagataagccttcaaaacctgaaggaccgattgaagtctccgacattcataaagaggggtgcaagcttaaatggaggaaacctaaagatgatggaggtatacctattactggctatgtaatagaaaaaatggataccgccactggtaaatgggttcctgctggttccgtagatccagaaaaatatgatattgagataaagggcttggatccaaatcatcgctaccaatttagagtgaaggctgtcaacgaggagggtgaatcagaacctcttgaaactgaatcggctattactgccaagaatccattcgacgtgtctgctccccctggtctcccagagcttgaagattgggatgagcatcatgtcaaactaaaatgggaaccacccattcgggatgggggctctcctattaccaattatataatcgaagtaatggataaagattcaggggaatttgtaaaggcagttgaaactgatagtccagtttgtaagggcgtcgtaaagaaacttgaagaaggacagcaatacaaatttagagttcgagccgtaaacaaggctggtccatcggacccatctgaacaaacgaattggcatgtggccaagcctcgattcctgaaacctcatattgatcgagtcaatttaaaacccgtgattgtaaaaactggtttatcaattagcttggatattaacataagaggagagccagctccgaaagttgaatggttcttcaataattcatctgttacaagcgacgaacatagtgtaaaaattgataatgttgattacaatacgaaattctttgttatgcgtgcacagagatctcaaagtgggaaatacattatcaaagcaacaaacgaagttggtgaagacgaagcagaactggaagtcacagttttgggcaagccaggaaaaccaaaaggtcccctgcaagtcaatgacataacaaaacacagttgcaagcttaagtgggaaaagccagatgatgatggtggttcacccatcgactactatgaaattgaaaaacttgatcctcacacgggtcagtggttaccatgtggaaaaagtaccgagccggaggccaaggtaattggtcttcatgaaggaaaggcatataaattccgagtaagggctgtaaacaaggaaggagaatctgaggacttggaaaccgaaaaaccaattatagcgaaaaatccatatgatgaaccagatagaccagggaagcctgaaccaactaattgggataaagatttcgtcgacttagcctgggatccgccgaaaaacgatggtggtgcaccaattcaaaaatatgttattcaaatgcgagataagtctggacgcgcatgggtggactctgcaaccgtgcctggggataagtgtaatggtaccgtaactggcgtagaagagggccatgaatacgagttccgtattgttgctgttaataaggcgggacctagtgatccaagcgatgtttcaaaatcagtgatagcgaaacctcgttttcttaaacctcacattgaccgcaagaacctacaaaagaaaattatgcgcagcggtcaaatgcttcatattgacgctttaataaaggcggaacctccagctaaagtaacatggacctacaataaaacagaaattaaaacttcagatcacataaaaattgaaaacgaggactataaaacgacattcattatgccgaaagtgaaacgcgctgatcgaggcatttacatcgtcactgccaaaaacgactcaggttccgacaccgtagaagttgagctggaagtactgtgcaagccaagtaaaccgaaagggcctctagctgtttctaacgtaacagccgaaaccttacacctaaaatgggaaaagcccgaagatgatggcggtgaccctattgaacaatatttagtcgaacgcatggatacggaaacaggtcgatgggtacctgtacttacaactaaaacaccggaagccgatgttacaggtcttacggaaggaaaggaatatctgtttagagtaaaagcagtcaattccgaaggcgaatcagagcctttggtgaccgatattccaacaaaggccaaaaatcctttcgatgcggccgacaccccaggtaagccgcaaattgttgattggtcaggtaaccactgtgatctaaagtggagggcacccgaagacgatgggggggcatccatcactggctatattgtagaaagaaaggatcccaatacaggaaagtggcaaaaggcacttgaaacaagtacacctgactgtaaggcacgcgtaaatgacttaatcgcaggaaacaaatatcagttcagaataatggctgtcaacaaggcaggaaagagcaagccatccgagccgtccgaccagatgaccgcaaaggaccgatttgctccacccaaaattgatagaacaaacattaaggacataaccatcaaggctggacaacacattcgtttcgacattaaggtctctggagagcccccggctacaaaagtttggcttcacaacaaagcccgacttgaaaatgacgatagtaactacaatattgatatggaatcatatcgcacaaaactgaccgtgccaatttcaaagcgattccattcaggaaaatatactcttaaggcagagaatgaatctggacgggatgaggcttcatttgaagtcatagtcttagacaaaccgggccccccagagggtcccttacgagtcacagatgtgcacaaagaagggtgcaagctgaaatggaacgctcccttggacgatggaggtttgccaatcgaccattacattattgagaaaatggacgttgagagtgggcgttggttgccatctggtcgctttaaggaatctttcgcagagttgaataatttggagcctagtcatgagtacaaattccgagtgcttgccgtaaatactgaaggtgaatctgaaccattaactggagaacagtctgttattgccaagaatccttttgatgagcccggaaagcccggaactccggaagcagtggactgggataaagatcatgtcgatttggtttggaggccaccaattaacgatggtggatcgcctatcactggctatgtagttgaaaaacgtgagaaaggtactgacaagtggataaagggaacagaaattactatcccgtgccttggcgaagagtgcaaagctactgtgccaaccctaaatgaaaattgtgaatacgaattccgagtcaaagcaattaatgctgctgggcctggtgaaccatctgacgcaagcaagcctatcattacaaagccaagaaagttggcccccaaaattgaccgcaaaaatattcgtacctataacttcaagtctggagagccgatatttttggacatcaatattagtggagagcccgcaccggatgttacttggaatcaaaacaacaagtctgttcaaaccacatcatttagtcatattgagaaccttccgtataacaccaaatacataaataacaaccccgaacggaaagatacgggactctacaagatctcagctcataacttttacgggcaggatcaagtcgagtttcaaattaatattattacgaaaccaggcaagcctgaaggtccattagaagtatcagaagtacacaaggatggttgtaagctgaaatggaaaaaacccaaggacgatggaggtgaacctgttgaaagctatttggttgagaaattcgacccagatacgggtatttggttacctgttggcaggtctgacggacctgagtacaacgttgatggcttagtcccaggtcatgattacaagttccgggtaaaagctgtaaacaaggaaggggaatcggagccactggaaacgttgggttcaataattgccaaggatccatttagcgttccaacaaagcctggagttccagaacctaccgattggactgcaaataaggtagaacttgcttggccagaaccagcaagtgatggtggatctccgatacaaggctatatagttgaggtaaaagacaaatacagccctctttgggaaaaggctttggaaaccaattccccaactccaactgcaacggttcaaggtctcattgaaggaaatgaataccagttccgagtagttgccttgaataagggtggcctatcggagccttcagacccaagcaaaatatttacagctaagccgcgctatcttgcccccaagatagaccgtagaaatctacgtaatattactctgtcgtccggaaccgctctgaaattagatgcaaatataacaggtgaacccgctccaaaagtagagtggaaactttccaattaccatttgcaatcagggaaaaatgttacaatcgaaactcctgactactatacaaaattagttattagaccaacgcagcgaagtgattctggagaatatttggtcacggcgactaacacttctggaaaagatagtgtgcttgtaaatgtagttatcacagataaaccctcacctcctaacggaccacttcaaatatcagatgtgcataaagagggttgccaccttaaatggaaacgtccgagcgatgatgggggaacgccaattgagtatttccaaattgacaaattagagcccgaaactggttgctggattccttcttgtcgatctacagaaccccaagttgatgttacaggtctttctccgggaaatgaatataagttccgagtatcagctgtgaatgccgaaggtgaatcacagcccttggtaggcgatgaatctatagttgcaagaaatcctttcgatgaacctggtaagcccgagaaccttaaagcaactgattgggataaggatcacgtggacttggcgtggaccccacctctaattgatggcggatcaccaatttcttgctatattatcgaaaagcaggataaatatggaaagtgggagcgggcccttgacgtccctgctgatcaatgcaaagcgactattccagatcttgttgagggccaaacctacaaattccgagtttccgcggtcaacgcagctgggactggagagccatctgattctactccgccaataattgcgaaggctcgcaataaaccacccattatagatagatccagcctagtagaagtgcgtattaaagctggacagtcctttacatttgattgtaaggtatctggggagccagcgcctcagacaaaatggctacttaagaaaaaggaagtttattcaaaggacaacgttaaggtaactaatgttgactacaataccaaactaaaagtaaatagtgcaaccagatctgattccggtatatacacagtgtttgcagaaaacgcaaacggagaagacagtgcagatgttaaggtaactgtcattgacaaacctgcaccgccaaacggaccgcttaaggttgatgaaataaattccgagtcttgtactctgcactggaatccaccagacgacgatggaggacaaccaatagataattatgtcgttgaaaaattagatgaaacaacaggacgttggatacctgccggggaaactgacgggccagtcaccgcacttaaagtcggtggccttacccctggccataaatacaaattccgagtacgtgccaaaaatcgtcagggaacttcagaaccacttacaacagcacaagccattattgcgaaaaatccattcgatgtacctacaaaaccaggaacaccaaccataaaagactttgacaaagaatttgttgatctggaatggactagaccagaggctgatggtggatctccaataaccgggtatgtagttgagaagcgggacaaattttctcctgattgggaaaaatgcgctgaaatcagtgatgacatcaccaatgctcacgttcctgacttgattgaaggccttaaatatgaattccgtgtcagagcagtaaacaaagccggtccaggctcaccaagtgatgcaactgaaacacatgtggctcgccccaaaaacacacccccaaaaatagatcgaaacttcatgtccgatattaaaattaaagctggaaatgtatttgaatttgatgtaccagtaactggggagcctttgccaagcaaagattggacccacgaaggcaatatgatcataaacacagaccgagtaaaaatttccaattttgatgaccgcactaagataagaatacttgatgcgaagcgatccgacacaggcgtctatacattaacagcacgtaacataaacggtacagataggcacaatgtaaaagtaacaatcctggatgctccaagtgtgccggaaggcccattacgtaatggcgatgttagcaaaaactctatagtacttcgatggaggccacccaaggatgatggtggctcggagattactcattatgttgtggaaaaaatggataatgaggccatgcgctgggttcccgttggtgattgcactgatactgaaatcagagcggacaatctaattgaaaatcatgattatagttttagggtaagggctgttaataagcaaggacaatcacaaccactcacaacttctcagcctataacagcaaaagatccttattcacatccagataagcctggccaaccgcaagctacagattggggtaaacattttgtggacttggagtggtccactccaaagagagatggaggagcacccatttcttcgtatattatagaaaaaagaccaaagtttggtcaatgggaacgagctgctgttgtgctaggtgataattgtaaggctcatgtaccggaacttacaaatggtggagaatacgagtttcgggtgatcgccgtcaatcggggaggtcctagcgatccatctgatccgtctagcaccattatatgcaagccacgtttccttgctccattctttgacaagtcacttctaaacgacatcacggtccatgctggaaagcgattagggtggacattaccaatcgaggcgtctccaagaccattaatcacttggctatataatggaaaagaaatcggttcaaattcacgaggcgagtccggtcttttccaaaacgaactaacatttgaaattgtatcctcacttagaagcgacgaaggtcgttatactttaatattaaagaatgagcatggatcatttgatgcgtctgctcatgcaactgtattagatcgaccatcgccacccaaaggtcctctggatataacaaagataacaagggatggctgccacctaacctggaatgttccggatgatgacggtggttcgcctatattgcattatattatcgaaaaaatggatttatctcgaagcacatggtccgatgctggcatgagcacacatatagtccacgatgtcactcgtcttgtccaccgcaaggagtacttgttccgtgttaaagcagtcaatgcaattggggaatccgatcccttagaagcagtaaatactataattgctaaaaacgaatttgacgagcctgatgcgcctggaaaaccaattattactgattgggatcgtgaccatatagacttgcaatgggctgtcccaaaaagtgacgggggagctccaattagtgaatacatcatacagaaaaaggaaaagggcagcccttactggactaatgtacgacatgttccatcaaataagaacacaaccacaattccagaactaactgagggtcaagagtatgaatttagagttattgctgttaatcaagcaggccaatctgaaccttcagagccgtctgatatgattatggcaaagccgcgctacctgccaccaaaaataataactccactaaatgaagtgcgcattaaatgcgggctcatatttcacacagatatacattttatcggtgagccagcaccagaagcgacgtggacacttaatagcaatccactattgtcgaatgacagatcaacaattacatcaatcggtcaccactctgtagtacatactgttaactgtcaaaggtctgactccggaatctaccacctattacttcgtaatagttctggaatcgatgaaggcagcttcgaacttgtagtactcgaccgcccggggccgccagagggtccaatggaatatgaagaaataactgcgaactctgtgactatatcatggaaaccaccaaaagataatggaggatctgaaatatcttcttatgttatagaaaagcgtgatcttacccatggcggtgggtgggtaccagcagtaaattatgtaagtgcaaaatacaaccatgccgtggttcccagactgctggaaggaacaatgtacgagcttagagttatggccgaaaacctacaagggcgctccgatccacttacttccgaccaaccggttgttgcaaaatctcagtacacggtgccaggagctcctggaaagccagaactaactgatagcgacaagaatcatattacaattaaatggaagcaaccaattagtaatggaggatcccccattattggttacgacattgaacgtcgcgacgtaaacacaggacgatggataaagataaatggacaaccagtacctactgctgaatatcaagacgacagagtaacatcgaaccatcaatatcaatacagaatatcggcggttaatgctgccggcaacgggaagacttccgaaccttcggccatattcaatgctcgaccactgcgtgaaaagccaagattttattttgatggcttaataggaaagcgcattaaagttcgtgcaggtgaaccagtaaatttaaatattcccatatctggggcacctactccgacaattgaatggaagcgaggggatctcaaattagaggaaggcaagcgaatatcttatgagactaactcggagcgtactctatttcgcattgatgattcaaacagacgggactctggaaaatacactgttaccgctgctaatgagtttggtaaggataccgctgacattgaagttattgtcgtagataagccatcgccacctgaaggacctttgagttatacggagacagcaccagatcacatttctttgcattggtattcccccaaggacgatggtggcagcgacattacggggtacataatcgagttcactgagtttggtgtagatgattggaagccagtgccaggcacttgtcccaacaccaactttacagtaaagaatctagtagagggaaaaaaatatgtttttcgtattagagctgaaaatatctacggagcttccgaagctctcgagggtaagccggtgttggctaagtcgccttttgatccacccggtgcaccatctcagccaacaatttctgcatatacaccaaactctgctaatttggagtggcatcctccagacgattgtggtggtaagcctattacggggtacatcgtagagcgacgcgaacgcgggggtgagtggattaagtgcaacaattacccaacaccgaatacatcctatacagtatccaatcttcgggatggagctcgttatgagttccgggtcctcgcagtaaatgaggctgggcctggccacccgtcaaagccttctgatccaatgactgctgaacatcagcgctatcgtccagatccgccggagccaccaaaaccggatcgtattactaggaatggtgtcacattatcttggcgtccgcctcggacggatggcaagtccagaataaaagggtattatgtcgaaatgcgtcccaaaaacgggaaggattggaaaactgttaacgatatacctattaattccactgtatacacagtaccaagtcttaaggaaggagaagagtactcattccgtgttgttgctgaaaacgaagttggtcgttcagatccatctaagccatcgcagcccattacaattgaggagcaaccaaataagccttgcatggaactcggaaaggtccgagatatagtgtgtagggctggtgatgattttagcattcacgtaccctacctagctttccccaagcccaacgcattttggtattctaatgacaatatgctggatgacaataaccgtgtgcacaaacatttgactgatgatgcagcatctgttgtggtaaaaaactcgaaacgtgcagactcaggtcaatatagactccaattaaagaatacgtcaggattcgatacggccaccattaatgttagggttctggatagaccatctccaccgacacgcctacgtgctgatgagttttctggagattctctaacattgtattggaatccaccaaacgatgacggtggttccgctattcaaaattatattattgaaaaaaaagaagctcgttcgtccacatggtctaaggtcagcagcttttgcacagttccttttgttagaattcgaaaccttgtactcaataaagagtacgatttccgtgtgatagctgaaaataaatatggtcaatccgatccggccaatacatctgagcctatacttgcaagacatccctttgatatccccaatactcccggtattccccatggtattgactcgacagaagatagtataacaatagcatggacgaagcctaaacatgatggtggatctcccataactggatatattattgaaaaacgattattgagtgatgacaaatggaccaaggcagttcatgcactttgtccagacctttcttgtaaaattccaaatcttattgaaaatgctgaatacgaatttagggtggccgcagtaaatgcagccggacagtcggcctatagcggttccagcgatctcatcttttgccgccgaccacctcatgcgccaaagattacttcagatttgtcaattcgggatatgacagtaattgcaggagatgaattccgtataacagtaccttatcacgccagtcctcgcccaactgcatcatggagtttaaatggcttagaagtaattcccggcgagcgtattaaatttgattctaacgattatgcttcaatgtattacaacaaatcagctaaacgagatgaaactggatcgtacaccattacacttaccaataacaaaggttcagatactgcttcatgtcacgtcacggtggtagataggccattaccacctcagggtccattgaatgcctacgacattacccccgacacttgcaccttggcctggaagacgcctttggatgatggaggttcaccgattacaaattatgtcgttgaaaaattagataacagtggttcatgggtaaagattagcagttttgttcgtaacactcactacgatgtcatgggcctggaacctcactacaaatataacttccgcgtaagagcagaaaaccaatatggtttgtctgatcctttggatattattgaacctattgttgccaaacatcaatttacagtcccagatgagcctggtcagccaaaggttattgactgggactctggaaatgtaactttgatttggacccgaccattaagtgatggagggtcccgcatacaaggctatcaaattgaatatcgggatattttaaacgattcgtcttggaatgcgtatgactacattataaaggacactaagtatcaactttacaacttaattaacggcagtgaatacgaattccgtataaaggccaagaacgctgcaggcttaagtaagccatcttcaccatcacttagatttaagctgaaaggaaaattcaccgtgccatcacctcctggagccccacaagtaaccagagtcggcaaaaactatgtcgacctaaagtgggagaaacccttaagagatggtggctcccgcattacgggttacattattgaaagaagggacatcggtggagccgtatgggtaaagtgtaatgattacaatgttttggatactgaatacaccgttatgaacctcatcgagatgggtgattacgaatttcgagtatttgctgtcaattccgctggacgttcagaaccaagcttatgtactatgccaatcaaggtttgcgaggtactaggtggaaagaagcctgattggattacacgactgcaagacaaggtagcaccctttggcaaggattatactttacaatgcgccgcctcgggtaagccaagtccaaccgcaaggtggcttcgcaatggaaaagaaattcaaatgaatgggggccgaatgacatgcgacagtaaagatggggtcttccgactgcacatatctaacgtgcaaactggagacgatggtgactacacatgtgaggcaatgaattctctcggatttgttaacacatcaggttatctaaaaattggatcaccaccaattattaacaggtgcccaagcgaactaaaattaccagaaggagacaattcgaagatcaagattttctactctggcgaccagccactaactgtgatattaaagaaaaataatgaagtcatatgtgacagtaatgatgatacgcatgttaaggtaaacatatttgacgactatgtagcgatttacattcgtaatatcgtaaaaagtgatggtggtccatatcaaatagaattcacgaatgaatctggtagtgccacaggggagttttatgtacacatcactggcatgccttcagcacccactggacctatgggtatctcttacattaacaaaaactcctgtatgttaaactggcgtcccccttcttacgatggtggtcttaaagttagtcactacgtcatcgagagaaaagatgtgtcatctccacactggataactgtttctagtacctgcaaagataccgccttcaatgtacaaggtcttattgaaaaccaagaatacattttccgagtgatggctgtaaatgagaacggaatgggtccaccactagaggggttaaatccaattcgagctaaagacccaattgacccaccatcgccaccgggcagtcctcaaatcactgagatcggaggagactttgtgcatttggaatgggaaaaaccggaatcggatggcggtgctcacattcaaggctattggatcgataagcgtgaagtaggcagcaacacatggcagcgtgtaaacgctaccatctgtgctgccaatcaaataaactgtatcaatctcattgaaggtcgacagtacgagtttcgaatttttgctcagaatgtagcaggcctttcaacagaatcgtccgcttcacaagcagtcaagataatagatccacaggcggcttcgcctccattgattgtgaaaccgctacgcgatgccaattgcattcaaaaccacaatgcccaattcacatgcaccataaatggcgttcctaaaccaacgatatcttggtataaaggagctcgcgaaattagtaatggcgcccggtatcacatgtactcagaaggtgacaatcacttcctaaatattaatgacgtattcggcgaagacgctgatgaatatgtttgtcgcgctgtaaacaaggctggagcaaaatcaacacgcgccactctggccattatgactgctccaaaattaaacgttcctccaagatttagagacactgcttacttcgataagggtgaaaatgttgtaatcaaaattcccttcactggcttcccaaaaccacgtatacactgggttagggacggtgagaatattgaatccggtggtcattacactgttgaggttaaagaaagacatgccgttcttatcattcgtgatggatcgcacttggactcgggaccttataggataacagcggagaatgaacttggttcggatacagctataatacaagtgcaaattagtgatcgtccagatcccccacgattccctttaatagaaagtattggcacagagtcattgtctcttagttggaaagcacctgtatgggacggttgcagcgacataacgaattactacgtagagcggcgggagcacccattatcttcgtggatacgagtcggaaatactaggtttacgtctatggcagtcagcggcttgactccaggaaaggagtacgatttccgcatatttgctgataatgtatatggacggtctgatgcttcagacacaagtactctaatcaagactaaggagtctgttaaaaagaaaccaattgaacgtaaatgggaaattgatgcaaatggacgaaaactgcgcggaaaagcagatggaccagttaaagactacgattcatatgtgtttgatatttactccaagttcgttccgcaacccgtggaaatatcccagcaaagtgtatatgataggtatgatatccttgaggaaatcggaacaggggcatttggagtagtacatcgctgtcgtgagagaagcacaggaaatatttttgctgccaagttcattccagtatcacactcagttgagaaagacttgatacgtcgtgaaatagatataatgaatcaactgcatcatcagaagcttatcaacttacacgatgctttcgaagacgacgatgaaatgatcctaatactggaatttttatctggtggtgaattatttgaacgcattactgctgaaggttacgtaatgacggaagctgaagttataaactatatgaggcaaatttgcgagggcatcagacacatgcacgaacaaaatattatccatttggacataaaaccagagaatataatgtgtcaaactcgttctagcacaaatgttaaacttatcgactttggactagcgacgcgcctcgatccaaatgaagttgttaaaataacaacaggcacggctgagttcgctgcaccagagatcgtcaacagagagccagtcggcttttacactgatatgtgggctactggagtactctcctatgttctgttaagcggattatcgccctttgctggtgataatgatgttcaaactctcaaaaacgtaaaggcttgcgattgggacttcgacgtagaatcctttaaatacatttctgaagaagctaaagattttataagaaaattgctcgttagaaacaaagaaaagcgtatgacggctcacgaatgtcttctgcatccttggctgactggagaccatagtgctatgaaacaggaaatcaaccgtgatcgttatctagcctatcgagaaaaattgagaagaaaatatgaagacttcgagaggttcctgctgccgattggccggctttctgaatactcatccttaagaaaattgctgatggagaaatataagatccatgatgctgttttcgataggcgtcaagcagcgccacgttttgtaattcgaccatcttcacaattttgctatgagggccaaagcgtaaagttctactgcagatgcattgcaatagccacacctactctcacttggtcacataataatatcgagttgcgacagagtgtcaagtttatgaaacgatacgttggagatgattactacttcatcattaaccgagttaagttggacgatcgaggagaatatattatacgcgcagaaaatcactatggctctagagaagaagtcgttttcctaaatgttcagcccttaccaaaagaacagccgaggtaccgaacggaatcaactccggtgcgcagacgtgaacccttgccgtacacattctggcaggaagagtcagagacggcgcccagtttcacattccttttgcggccacgcgtcatgcaagcccgcgatacatgcaaactactgtgttgcttaagtggcaagccagtacctaatgtaaggtggtacaaggacggccgagaacttagcaaatacgagtatgcgatgactcactcagatggagttgtcaccatggaaataattgactgcaagccatccgattcaggaaaatacagctgtaaggcaacaaactgtcacggaacagacgaaacagattgtgttgtgattgttgaaggagaatgggttacgcctgagcaggctcaactcgcccacaattttctttactcaggagataggaaatacatagagcagccaattaagccagctcccctcccaatagtgacatcccggcagtatacatcatcttcagtccaaaacacatctgaaccacagggtgacaaagtaaatgtgtccaactcaaactcatcaggcatttcaaacaagaagaagtatgcatcaaatagtttacaggccccaggaagcccgtcaagatcacgaagcgctaccaaagagcttatacttccaccagatgattcattaatgtgcaaaccggaatttacgaagccccttcacgatttaacaattcacgatggagaacagttaatattaacttgctatgtaaaaggagatccagagcctcaaatctcttggtcgaaaaatggaaagtccctatcatcttctgatattttggacttaaggtataaaaatggtattgcaactttaaccatcaacgaagtgtttcctgaagacgagggagttatcacttgcacggccacaaattctgttggagccgtggaaactaaatgcaaactaacaatacagcccctggataaaaacataaacaagcgaaaagtaaatgccggcgacaacgcgccgaaaatagttagccacttggagtccagatttgttagggatggcgatgcagtgaatctggcttgtcgcataattggagctcaacatttcgatgtcgtatggctgcataataacaaagagataaagccgagcaaggatttccaatacaccaacgaggccaatatatatcgattacaaattgcagagatatttcccgaagatggcggcacctacacttgcgaggccttcaatgatataggcgaatcattcagtacctgcacaataaatgtaacagtgccaggagacgagactaagcagccttcctttgtaaagtttcccacgtcagtttctgtacttgagggagagggtaccacatttgaatgcgaaatagattctgagctcctaaatttggtttggctgaaagatgggaaacccattgacgaaactcttccacgttactcatttacaaaggatggccatcgatactcttttgcagtggcaaaatgtaatatggacgatgtcggtcaataccaagctaaagcggtatctgggaaggccgaaagtatttgtgcgttctcgatgaacgttcacacagcggaatccgcaaatccttggcaattattgtccataacttcaaatttcaaaagagcttgtgcgagatttttcccgcagcgacgttaaattttatgatcagaaaacaaagtcaatggttgtttgtgttctttggctgtatagataatacatgggggccttcctgtagaaaggacctggaaactttaacagacatcagtctgcgagtgctcttccgagggtggttagagacccacacggacaatgggggtaaactgttcactctgagcgcggatccaccaagcttggtcgcatataaggcctatttgtatgacggggatcgctgctga

SEQ ID NO: 1224 - protein, 7107 aa, DROSOPHILA
MGEVQWLRNGEEIKPDKRIQIVKDGRKRKLVIKDCKVTDAGQFKCTTNADTTESEIIINYQNRFNKKLKDTEAVEREKLILDIELQDQTAPCDWKFNGEPIVPSESIEIKNMGGGKHQLIFSSLDMSNEGEITCESGQLSSKCKLSIRKGESRPNIDCPDKFSGPISAPVLLEVPFKVSGTKQTPVEAKLFKDGKPLPVKDVEVAVTDDKVTFKIKKPSRDLSGPYQIKISNGQGEDTKDVQIICQDVPQPPQDVDITDVYQTSCVVSFNPPSDDGGTPITKYVIERQDLSKKHGWESVAEVLPSEPCLKKIDDLIPKKQYRFRIRAVNAIGQSDPATFKNTILAKDPWDEPGKPKAVDLTDWDKDHADLKWEAPETDGGDPITAYIVEYKEKFSNDWVSGKEVDGDARTATVDGLKEGQQYEFRVRAVNRAGPGEPSDKTKSIIAKCRFVKPFIVGEGLKNVTVKKGQTIRFDIKYDGEPEPAATWVKGTDNLKFDNQRICLDQLERNSSITIKKSVRKDTGKYKLVLSNSSGTIESEAQVVVLDRPLPPGGPFEPEEIRASHIKMKWKRPDDDGGCEISGYALERMDEETGRWIPAGEVGPNETSFDFKGLTPNKKYKFRVKAINKEGESEPLETFDAIVARNPYDPPSPPSQPVIDDYDNKSVLLKWKRPPSDGGRPITHYIVEIKDKFAPSWSEVAKTDDPNPECNVEGLKEKMVYQFRVRAVNKAGPSEPSQPTDNHLCKHKNLKPQIDRSTFKRVTIKSGRTHKWSVDVLGEPIPELHWSWRDDIPLTNGDRIKIENVDYHTDFSITNVLRKDSGFYTLKAENRNGIDRETVELVVLGKPSSPKGPLAVSDVTASGCKLQWKKPEDDGGVPIKEYVVEKMDTATGKWVRVGRSPGEKEPPSFDVTGLSLGSEYMFRVSAVNEEGESEPLTTLVGVVAKDPFDEPNKPGTPEVTDYDNQSISLKWAAPNNDGGAPIQKYIIEKKNKNKTEWEKALEIPGDQLEATVAGLQEYGEYQFRVIAVNKAGLSPPSDASVPQIVKYKKLKPRIDRSNLKPLLIRAGKPIRYDVNVRGEPAPVITWYQNDKELKPEELPSSSEIKNIPYNTKISIIETVRKHTGIYKIIAVNEHGQDEATVEVNILAPPSKPRGPLDVKDVTKDSCKLKWKKPEDDGGKPISAYQVEKFDKKQGRWVPLGRTSANDTEFDVKGLQEGHEYQFRVKAINEEGESDPLDSDDSIIAKNPYDAASKPGTPNIVDYNEHMVKLKWEAPRSDGGAPISGYIIEKKDKFSPIWDEILSTNTSVPEATVEGLVEGNIYQFRVRAVNKAGFSDPSDATEPHLAKPRNLKPYINRDKMKPIKVRAGQPVKFDVDVKGEPAPSLTWFLKETELTSTGQVRLENIDYNTKLTLLDTDRKQSGQYKLRAENINGVDEAVVEVIILDKPSKPEGPIEVSDIHKEGCKLKWRKPKDDGGIPITGYVIEKMDTATGKWVPAGSVDPEKYDIEIKGLDPNHRYQFRVKAVNEEGESEPLETESAITAKNPFDVSAPPGLPELEDWDEHHVKLKWEPPIRDGGSPITNYIIEVMDKDSGEFVKAVETDSPVCKGVVKKLEEGQQYKFRVRAVNKAGPSDPSEQTNWHVAKPRFLKPHIDRVNLKPVIVKTGLSISLDINIRGEPAPKVEWFFNNSSVTSDEHSVKIDNVDYNTKFFVMRAQRSQSGKYIIKATNEVGEDEAELEVTVLGKPGKPKGPLQVNDITKHSCKLKWEKPDDDGGSPIDYYEIEKLDPHTGQWLPCGKSTEPEAKVIGLHEGKAYKFRVRAVNKEGESEDLETEKPIIAKNPYDEPDRPGKPEPTNWDKDFVDLAWDPPKNDGGAPIQKYVIQMRDKSGRAWVDSATVPGDKCNGTVTGVEEGHEYEFRIVAVNKAGPSDPSDVSKSVIAKPRFLKPHIDRKNLQKKIMRSGQMLHIDALIKAEPPAKVTWTYNKTEIKTSDHIKIENEDYKTTFIMPKVKRADRGIYIVTAKNDSGSDTVEVELEVLCKPSKPKGPLAVSNVTAETLHLKWEKPEDDGGDPIEQYLVERMDTETGRWVPVLTTKTPEADVTGLTEGKEYLFRVKAVNSEGESEPLVTDIPTKAKNPFDAADTPGKPQIVDWSGNHCDLKWRAPEDDGGASITGYIVERKDPNTGKWQKALETSTPDCKARVNDLIAGNKYQFRIMAVNKAGKSKPSEPSDQMTAKDRFAPPKIDRTNIKDITIKAGQHIRFDIKVSGEPPATKVWLHNKARLENDDSNYNIDMESYRTKLTVPISKRFHSGKYTLKAENESGRDEASFEVIVLDKPGPPEGPLRVTDVHKEGCKLKWNAPLDDGGLPIDHYIIEKMDVESGRWLPSGRFKESFAELNNLEPSHEYKFRVLAVNTEGESEPLTGEQSVIAKNPFDEPGKPGTPEAVDWDKDHVDLVWRPPINDGGSPITGYVVEKREKGTDKWIKGTEITIPCLGEECKATVPTLNENCEYEFRVKAINAAGPGEPSDASKPIITKPRKLAPKIDRKNIRTYNFKSGEPIFLDINISGEPAPDVTWNQNNKSVQTTSFSHIENLPYNTKYINNNPERKDTGLYKISAHNFYGQDQVEFQINIITKPGKPEGPLEVSEVHKDGCKLKWKKPKDDGGEPVESYLVEKFDPDTGIWLPVGRSDGPEYNVDGLVPGHDYKFRVKAVNKEGESEPLETLGSIIAKDPFSVPTKPGVPEPTDWTANKVELAWPEPASDGGSPIQGYIVEVKDKYSPLWEKALETNSPTPTATVQGLIEGNEYQFRVVALNKGGLSEPSDPSKIFTAKPRYLAPKIDRRNLRNITLSSGTALKLDANITGEPAPKVEWKLSNYHLQSGKNVTIETPDYYTKLVIRPTQRSDSGEYLVTATNTSGKDSVLVNVVITDKPSPPNGPLQISDVHKEGCHLKWKRPSDDGGTPIEYFQIDKLEPETGCWIPSCRSTEPQVDVTGLSPGNEYKFRVSAVNAEGESQPLVGDESIVARNPFDEPGKPENLKATDWDKDHVDLAWTPPLIDGGSPISCYIIEKQDKYGKWERALDVPADQCKATIPDLVEGQTYKFRVSAVNAAGTGEPSDSTPPIIAKARNKPPIIDRSSLVEVRIKAGQSFTFDCKVSGEPAPQTKWLLKKKEVYSKDNVKVTNVDYNTKLKVNSATRSDSGIYTVFAENANGEDSADVKVTVIDKPAPPNGPLKVDEINSESCTLHWNPPDDDGGQPIDNYVVEKLDETTGRWIPAGETDGPVTALKVGGLTPGHKYKFRVRAKNRQGTSEPLTTAQAIIAKNPFDVPTKPGTPTIKDFDKEFVDLEWTRPEADGGSPITGYVVEKRDKFSPDWEKCAEISDDITNAHVPDLIEGLKYEFRVRAVNKAGPGSPSDATETHVARPKNTPPKIDRNFMSDIKIKAGNVFEFDVPVTGEPLPSKDWTHEGNMIINTDRVKISNFDDRTKIRILDAKRSDTGVYTLTARNINGTDRHNVKVTILDAPSVPEGPLRNGDVSKNSIVLRWRPPKDDGGSEITHYVVEKMDNEAMRWVPVGDCTDTEIRADNLIENHDYSFRVRAVNKQGQSQPLTTSQPITAKDPYSHPDKPGQPQATDWGKHFVDLEWSTPKRDGGAPISSYIIEKRPKFGQWERAAVVLGDNCKAHVPELTNGGEYEFRVIAVNRGGPSDPSDPSSTIICKPRFLAPFFDKSLLNDITVHAGKRLGWTLPIEASPRPLITWLYNGKEIGSNSRGESGLFQNELTFEIVSSLRSDEGRYTLILKNEHGSFDASAHATVLDRPSPPKGPLDITKITRDGCHLTWNVPDDDGGSPILHYIIEKMDLSRSTWSDAGMSTHIVHDVTRLVHRKEYLFRVKAVNAIGESDPLEAVNTIIAKNEFDEPDAPGKPIITDWDRDHIDLQWAVPKSDGGAPISEYIIQKKEKGSPYWTNVRHVPSNKNTTTIPELTEGQEYEFRVIAVNQAGQSEPSEPSDMIMAKPRYLPPKIITPLNEVRIKCGLIFHTDIHFIGEPAPEATWTLNSNPLLSNDRSTITSIGHHSVVHTVNCQRSDSGIYHLLLRNSSGIDEGSFELVVLDRPGPPEGPMEYEEITANSVTISWKPPKDNGGSEISSYVIEKRDLTHGGGWVPAVNYVSAKYNHAVVPRLLEGTMYELRVMAENLQGRSDPLTSDQPVVAKSQYTVPGAPGKPELTDSDKNHITIKWKQPISNGGSPIIGYDIERRDVNTGRWIKINGQPVPTAEYQDDRVTSNHQYQYRISAVNAAGNGKTSEPSAIFNARPLREKPRFYFDGLIGKRIKVRAGEPVNLNIPISGAPTPTIEWKRGDLKLEEGKRISYETNSERTLFRIDDSNRRDSGKYTVTAANEFGKDTADIEVIVVDKPSPPEGPLSYTETAPDHISLHWYSPKDDGGSDITGYIIEFTEFGVDDWKPVPGTCPNTNFTVKNLVEGKKYVFRIRAENIYGASEALEGKPVLAKSPFDPPGAPSQPTISAYTPNSANLEWHPPDDCGGKPITGYIVERRERGGEWIKCNNYPTPNTSYTVSNLRDGARYEFRVLAVNEAGPGHPSKPSDPMTAEHQRYRPDPPEPPKPDRITRNGVTLSWRPPRTDGKSRIKGYYVEMRPKNGKDWKTVNDIPINSTVYTVPSLKEGEEYSFRVVAENEVGRSDPSKPSQPITIEEQPNKPCMELGKVRDIVCRAGDDFSIHVPYLAFPKPNAFWYSNDNMLDDNNRVHKHLTDDAASVVVKNSKRADSGQYRLQLKNTSGFDTATINVRVLDRPSPPTRLRADEFSGDSLTLYWNPPNDDGGSAIQNYIIEKKEARSSTWSKVSSFCTVPFVRIRNLVLNKEYDFRVIAENKYGQSDPANTSEPILARHPFDIPNTPGIPHGIDSTEDSITIAWTKPKHDGGSPITGYIIEKRLLSDDKWTKAVHALCPDLSCKIPNLIENAEYEFRVAAVNAAGQSAYSGSSDLIFCRRPPHAPKITSDLSIRDMTVIAGDEFRITVPYHASPRPTASWSLNGLEVIPGERIKFDSNDYASMYYNKSAKRDETGSYTITLTNNKGSDTASCHVTVVDRPLPPQGPLNAYDITPDTCTLAWKTPLDDGGSPITNYVVEKLDNSGSWVKISSFVRNTHYDVMGLEPHYKYNFRVRAENQYGLSDPLDIIEPIVAKHQFTVPDEPGQPKVIDWDSGNVTLIWTRPLSDGGSRIQGYQIEYRDILNDSSWNAYDYIIKDTKYQLYNLINGSEYEFRIKAKNAAGLSKPSSPSLRFKLKGKFTVPSPPGAPQVTRVGKNYVDLKWEKPLRDGGSRITGYIIERRDIGGAVWVKCNDYNVLDTEYTVMNLIEMGDYEFRVFAVNSAGRSEPSLCTMPIKVCEVLGGKKPDWITRLQDKVAPFGKDYTLQCAASGKPSPTARWLRNGKEIQMNGGRMTCDSKDGVFRLHISNVQTGDDGDYTCEAMNSLGFVNTSGYLKIGSPPIINRCPSELKLPEGDNSKIKIFYSGDQPLTVILKKNNEVICDSNDDTHVKVNIFDDYVAIYIRNIVKSDGGPYQIEFTNESGSATGEFYVHITGMPSAPTGPMGISYINKNSCMLNWRPPSYDGGLKVSHYVIERKDVSSPHWITVSSTCKDTAFNVQGLIENQEYIFRVMAVNENGMGPPLEGLNPIRAKDPIDPPSPPGSPQITEIGGDFVHLEWEKPESDGGAHIQGYWIDKREVGSNTWQRVNATICAANQINCINLIEGRQYEFRIFAQNVAGLSTESSASQAVKIIDPQAASPPLIVKPLRDANCIQNHNAQFTCTINGVPKPTISWYKGAREISNGARYHMYSEGDNHFLNINDVFGEDADEYVCRAVNKAGAKSTRATLAIMTAPKLNVPPRFRDTAYFDKGENVVIKIPFTGFPKPRIHWVRDGENIESGGHYTVEVKERHAVLIIRDGSHLDSGPYRITAENELGSDTAIIQVQISDRPDPPRFPLIESIGTESLSLSWKAPVWDGCSDITNYYVERREHPLSSWIRVGNTRFTSMAVSGLTPGKEYDFRIFADNVYGRSDASDTSTLIKTKESVKKKPIERKWEIDANGRKLRGKADGPVKDYDSYVFDIYSKFVPQPVEISQQSVYDRYDILEEIGTGAFGVVHRCRERSTGNIFAAKFIPVSHSVEKDLIRREIDIMNQLHHQKLINLHDAFEDDDEMILILEFLSGGELFERITAEGYVMTEAEVINYMRQICEGIRHMHEQNIIHLDIKPENIMCQTRSSTNVKLIDFGLATRLDPNEVVKITTGTAEFAAPEIVNREPVGFYTDMWATGVLSYVLLSGLSPFAGDNDVQTLKNVKACDWDFDVESFKYISEEAKDFIRKLLVRNKEKRMTAHECLLHPWLTGDHSAMKQEINRDRYLAYREKLRRKYEDFERFLLPIGRLSEYSSLRKLLMEKYKIHDAVFDRRQAAPRFVIRPSSQFCYEGQSVKFYCRCIAIATPTLTWSHNNIELRQSVKFMKRYVGDDYYFIINRVKLDDRGEYIIRAENHYGSREEVVFLNVQPLPKEQPRYRTESTPVRRREPLPYTFWQEESETAPSFTFLLRPRVMQARDTCKLLCCLSGKPVPNVRWYKDGRELSKYEYAMTHSDGVVTMEIIDCKPSDSGKYSCKATNCHGTDETDCVVIVEGEWVTPEQAQLAHNFLYSGDRKYIEQPIKPAPLPIVTSRQYTSSSVQNTSEPQGDKVNVSNSNSSGISNKKKYASNSLQAPGSPSRSRSATKELILPPDDSLMCKPEFTKPLHDLTIHDGEQLILTCYVKGDPEPQISWSKNGKSLSSSDILDLRYKNGIATLTINEVFPEDEGVITCTATNSVGAVETKCKLTIQPLDKNINKRKVNAGDNAPKIVSHLESRFVRDGDAVNLACRIIGAQHFDVVWLHNNKEIKPSKDFQYTNEANIYRLQIAEIFPEDGGTYTCEAFNDIGESFSTCTINVTVPGDETKQPSFVKFPTSVSVLEGEGTTFECEIDSELLNLVWLKDGKPIDETLPRYSFTKDGHRYSFAVAKCNMDDVGQYQAKAVSGKAESICAFSMNVHTAESANPWQLLSITSNFKRACARFFPQRR

SEQ ID NO: 1225 - DNA, 6294 bp, DROSOPHILA
ttgaaatcgtgtaagaaagaaactagtgcggaaggaagttttgggagtggagagagcgtagggaagtgcgaaaatcgtttaattttcgttcgcggagaaaaatccagccaaggatttcacaaaagaccagaacaaagagtacaaccagtggtttttacagctgcatccgccctttcctcacaacgaaaggcggaaaagctaattcatagtccgcagcaaaatcgccaatcaagggcgcaagaagaagaggcaactacaaagtgcaagtgctggccgaggaacttcatgccaatgaaaactgaagctcgggaaggtgataagtgattggtaaccgtgttatgggcactacatatgccttgattgccccaatttctttgagtgggtggtgggcgtggcgggttgacttcgccaataggcacgtcatcaaaaatttgctttgttccggagacaaatcctttctcttcctgattgcttccactgcatctgggtcaccaatttaaccgacccaccttctgcgatcattgatggcgaggtcaagtgcttgaggcacgcacacttacacgttgtacatcacataataacccataacgacctgctgtcgaagctgtttaaacagcaaaatatgatatgaaattatcaccctatttccgacttactgttgacgtagacacagttctgtaaacactgaatcaagacatttacctaggcagccagtctagcttaaaagtttgtgataaagctccaataacgcagaatttcgcattccattcgatcactgcaaattctaaactgtctgtaagcggggaaaagcatcccgctttaaaactttacaacttttatcagccgcacattgtttcatgttacgcgctttttaacattgaacgataagataattccctgtttcatgtcggcagcaacgcaaccttcgctagtgataagatagcaactaaacaaaatgtaattcttcatctttcagaccacaaacctatgaattagcagcatgtcgacttacaatccgaacttcgtgcctcccgcccacgcccctatgccactgaacggaaacaattttgtgaatggtgtgcaaggaagcgtccagcagcagccaggtcctccacctggtcagcagtatataccacagaagcagccacaacagttccagcaaccacctcctgcagcagcttttccgggagcaggagcgccaggtaatgtgccaccgccgcagcagttcaacagtggtattacgaaccagttcttgccgcccacgtcaggagcagctacacctctgcagcaactgccgcccagcacgctgccgccccatctgcgtccgcccgccgccaacggaccaccccttacgaacggcagcaatggggcgtccagtgcgaactcttcgcgcactgcatccccaaggccagtaggagctgcccctcaatatgctcaaggaccaatcgctgcagcgttgaacaatccgcccctggcgtcgggactgcgtccttcgccccaaccgacgcaccaatctctggccaacttgacgagcaatctggaaaatcttaacttgaataccactcgagcaaatggaggtaccagcattttgccacaaccccaaacccagcaacagtacgcacccacagtaacacaaaaggatggcaggggagtggcctcggcccagacgggtccaccgcagttcaacgacgccaacagtctgttggcggccagcggagtggccgctgcactagttcccaatgccatggcgacgccgtttagtggacaaaagccccccaatttggctccaaatccggccaaaatgttcggaagcgcctcgatggccggtagaccaacaccagcggggcaacgaatcccatacggagtacccccaccaactaaccccgagcagcagagccagcaaaacaacaatctacagaatgcaccgccgccaccaagagtaggagcggtatggccgccgagcttaccaaatgtagcggcgccgggagcccagcccatgatgccgccagcccagcagacaccacagacgtatccatactcccaggtttatcaaccaggaccacagcaacagccaccacctcctcagtctgcagtgcagccaccgccgccgggaatgttcggaacgcaaccgactggagctccactgcagtatcaggcacaggcgcctcctcaggcttacggacaacatcctcagcaagcaccccagactgcacccgggggaccttatggaaccactgctccactaaacgtggctcagcagggattcagcagattgtggggacaggatactatcgaccttatgcagaatcggcatatcttaacgccggcaacgttgcctccgccaaaagtggttttgcacaaccagtttcacgagtccataaactgtagcccgagcattatgcgctgtacgctgaccaagattcccgagagcaactctctgctccagaagtcacgtctgcctctgggcattgtgatacatcccttccgtgatgtcaatgtaagaattttattgaaaataatttgatataaaagactttaacttggaattcctcacacagagcctccctgttattcagtgcatcaacattgtgcgttgccggctgtgccgcacttacataaatcccttcgtttacttcgtggacagcaagatgtggaagtgcaatctgtgttatcgagtcaacgaatgtaattgaaaagagttcccagcatataatggatttagtaatccaatgtttctttcttcgtgcagtgccagatgactttcaatttgatccggccacaaagacatacggcgacgtaacccgaaggcccgaggtacgctctagcaccatagagtttattgctccttcggagtacatgttgcggccgccacagccggccatgtacctgtttctcttcgatgtctcgataatcgcgcagcagagtggttatctggaggccgcatgcgccgtactcaaccggcacttagacgagatgcccggtgatgcgaggacccaggtgggattcatttgcttcgacagcttcgtgcacttctacagcatggccgaggggctcaaccagccgcacgaaatgacgctgctggacatcgaggaccccttcctgccacgtcctgatagtttgctggtaaacctaaaggagtgcaaggaactggtgcgtgatctattaaagcaactgcctaagcggtttgcccacacccacgatccgggttccgccttgggtgctgctctgcaggttgctttcaagctaatggtgagttgagctattcaaaattaaagaggaaccttaatcatcgtgaatactgtatacagcaagcgtccggcggacggataaccgtctttcaatcgtgccttcccaacaagggacccggagccttggagccgcgcgaagatcccaacaaccgctcggcaaaggacgtggcccaccttaacccggcaaccgacttctacaagcgctttgccctagagtgctccggctatcaaatagcttgtgacctcttcctgatgaaccagcagtacagcgacatggcaaccatttgtaagtgactcttagtaatgtaaattcaaactgcctttttgcattaagttctcttacgagtaatagagcaccgttaacttattggagtttcaatttccctatagctggcattagcaaacatagcggcggctgtgtacaccacttcccgctctaccagaagacaaagccacacatggtagaatcgttccgctcgtgtttcaagcgctatcttaccaggaaaattggatttgaggcggtaatgcgaatccgctgcactcgtggcttgcaggtgcatacattccatggaaacttcttcgtgcgctccacggacctgctctcgttgccaaacgtgaatccggatgctggatatggcatgcagatctcctacgaggagagcctcacggacgcgaaaacgatttgcttccaagctgcgctgctctatacgaacagcgaaggagagcgccgaatccgtgtgcacaccgtgtgtttgccggttaccgcttcgctcccagaggtaatgcattcagccgacacggaagctattatcgggctgctgtcgaaaatggcggttgaccggtcggtcgcctccaacttgtcggacgcccgcgatgcattcataaacgctacgatcgacgtgtacaatgccttcaagatagcacaaaatctgccatcgggacagtcgggtcagctgatagcgccgcgcagcctggcgttgctcccgctctacatcttggccctgcttaagcacgtgagttttttgcatatgatcttagttatcacagcttatttcggttttccactagcccgctttccgtgtgggaactagcacacgactggatgatcgggtctacgccatggattgcatgaaaacgctaccgctggaccagctaatgaagtacgtgtacccggagctgtacaagatcgatgcgttgatctaccacgcccgcaactcgaacattagttcgaaccaggatgacgacgaggacgaggatgaaccgttgccggagctgccgcgtcttcaattgtccgcggaacagtgagtagagttgatttatttttgaccttcgataacgaacgctttaacttcagcttggactctcggtcaatatttctgatggactgcggaacgctgataatgatctatgtcggccttaatgtgccgcccgatgttttggaagctgttctgggtatgatcttaaaacccaaccaatttgtgttactaatctgtttctaatttcaggcatcagctccaccgcagaactgggtgattatgtatatggattgccaaatgttgtgagcaacgagaacgatgtgctgaagcgttttattttgcgactcaactacgataagccctactcggcgctggtgcagataattaggtaagtcggaccactattaaaatattcataataccttgctaattattttatcttaaattaaagggacacgagcacggccaagggccagttcaccgagagattaaccgacgatcgcagtgaatctagtttgtcatactatgaatttttgcaacacattcgggctcaggttaaatagtatataagcaggatatcctaccactattgtatgcagcataaatacgagtttctaagaacctaaaaactcagactctggtgactagaagcacgaagcgaatgcaggtgacactggtgcgaaacaatggagaccagttcgggacagacatacacttgatacaccttaaccacccatcccctacccactctctcggcttaggtaattttaaagtgcatgtatttatttatttgttgatttgttgcactaaaaataaaataaaataattgaagatcatagtaaatgcgaaagagccaacttgtcacaacagaaactaagatatcgttgccagttcgtttagggcgaacattagtcaaaagttcagctaaccagtcagtagagctcccgaagaagtggatggctccgttatttattatagaaactatgcaataaaccaacgaaactgttgtacattatgctttagctcgatttttgttcgttccaactgcttcaaacattctgcaaacttctcagccccacaaattgttatcgcttaccccaattgtttgctgttttcagtagtatttattttccggaatccagagaaatctatatttatttataagtgtaaggaaaggcgttttgttgcactgtagttagcgaacttatttcaaacgtatgtacggatttggtattgtgtattgcattcattggactgctaggcagtgaatgtcttaagcttagaaggaatattatactgtatcaataaagagaccccatccctgtacctcaggtggcgcagttgtcgttctttgagtgggctaactaatcgaaaaaccatatacaaatactgtaccatactttatacacatacgagtacatcaagatataaagcgaaataaattttaattaaatcataaggcaatgcgttttattttcatatgtacaggcacatctgttgttcccaatatatcccaatttagttttgggaaagaccttaattaaattaacaatcatttacaatggatagatgatggcgcataagactcaataaatcggtcagcccttcgcaagacatatcctggttctatgttcctctacataaaacagttgtcagcgcctagccagagattcctgcaaaaatatcaactttaataatggacaaatataaattgggtatctggacttacggattgaagaagggggagcgcggcggatacttcctctttggtggaggacacaagatgggat

SEQ ID NO: 1226 - DNA, 3782 bp, DROSOPHILA
atgtcgacttacaatccgaacttcgtgcctcccgcccacgcccctatgccactgaacggaaacaattttgtgaatggtgtgcaaggaagcgtccagcagcagccaggtcctccacctggtcagcagtatataccacagaagcagccacaacagttccagcaaccacctcctgcagcagcttttccgggagcaggagcgccaggtaatgtgccaccgccgcagcagttcaacagtggtattacgaaccagttcttgccgcccacgtcaggagcagctacacctctgcagcaactgccgcccagcacgctgccgccccatctgcgtccgcccgccgccaacggaccaccccttacgaacggcagcaatggggcgtccagtgcgaactcttcgcgcactgcatccccaaggccagtaggagctgcccctcaatatgctcaaggaccaatcgctgcagcgttgaacaatccgcccctggcgtcgggactgcgtccttcgccccaaccgacgcaccaatctctggccaacttgacgagcaatctggaaaatcttaacttgaataccactcgagcaaatggaggtaccagcattttgccacaaccccaaacccagcaacagtacgcacccacagtaacacaaaaggatggcaggggagtggcctcggcccagacgggtccaccgcagttcaacgacgccaacagtctgttggcggccagcggagtggccgctgcactagttcccaatgccatggcgacgccgtttagtggacaaaagccccccaatttggctccaaatccggccaaaatgttcggaagcgcctcgatggccggtagaccaacaccagcggggcaacgaatcccatacggagtacccccaccaactaaccccgagcagcagagccagcaaaacaacaatctacagaatgcaccgccgccaccaagagtaggagcggtatggccgccgagcttaccaaatgtagcggcgccgggagcccagcccatgatgccgccagcccagcagacaccacagacgtatccatactcccaggtttatcaaccaggaccacagcaacagccaccacctcctcagtctgcagtgcagccaccgccgccgggaatgttcggaacgcaaccgactggagctccactgcagtatcaggcacaggcgcctcctcaggcttacggacaacatcctcagcaagcaccccagactgcacccgggggaccttatggaaccactgctccactaaacgtggctcagcagggattcagcagattgtggggacaggatactatcgaccttatgcagaatcggcatatcttaacgccggcaacgttgcctccgccaaaagtggttttgcacaaccagtttcacgagtccataaactgtagcccgagcattatgcgctgtacgctgaccaagattcccgagagcaactctctgctccagaagtcacgtctgcctctgggcattgtgatacatcccttccgtgatgtcaatagcctccctgttattcagtgcatcaacattgtgcgttgccggctgtgccgcacttacataaatcccttcgtttacttcgtggacagcaagatgtggaagtgcaatctgtgttatcgagtcaacgaattgccagatgactttcaatttgatccggccacaaagacatacggcgacgtaacccgaaggcccgaggtacgctctagcaccatagagtttattgctccttcggagtacatgttgcggccgccacagccggccatgtacctgtttctcttcgatgtctcgataatcgcgcagcagagtggttatctggaggccgcatgcgccgtactcaaccggcacttagacgagatgcccggtgatgcgaggacccaggtgggattcatttgcttcgacagcttcgtgcacttctacagcatggccgaggggctcaaccagccgcacgaaatgacgctgctggacatcgaggaccccttcctgccacgtcctgatagtttgctggtaaacctaaaggagtgcaaggaactggtgcgtgatctattaaagcaactgcctaagcggtttgcccacacccacgatccgggttccgccttgggtgctgctctgcaggttgctttcaagctaatgcaagcgtccggcggacggataaccgtctttcaatcgtgccttcccaacaagggacccggagccttggagccgcgcgaagatcccaacaaccgctcggcaaaggacgtggcccaccttaacccggcaaccgacttctacaagcgctttgccctagagtgctccggctatcaaatagcttgtgacctcttcctgatgaaccagcagtacagcgacatggcaaccatttctggcattagcaaacatagcggcggctgtgtacaccacttcccgctctaccagaagacaaagccacacatggtagaatcgttccgctcgtgtttcaagcgctatcttaccaggaaaattggatttgaggcggtaatgcgaatccgctgcactcgtggcttgcaggtgcatacattccatggaaacttcttcgtgcgctccacggacctgctctcgttgccaaacgtgaatccggatgctggatatggcatgcagatctcctacgaggagagcctcacggacgcgaaaacgatttgcttccaagctgcgctgctctatacgaacagcgaaggagagcgccgaatccgtgtgcacaccgtgtgtttgccggttaccgcttcgctcccagaggtaatgcattcagccgacacggaagctattatcgggctgctgtcgaaaatggcggttgaccggtcggtcgcctccaacttgtcggacgcccgcgatgcattcataaacgctacgatcgacgtgtacaatgccttcaagatagcacaaaatctgccatcgggacagtcgggtcagctgatagcgccgcgcagcctggcgttgctcccgctctacatcttggccctgcttaagcaccccgctttccgtgtgggaactagcacacgactggatgatcgggtctacgccatggattgcatgaaaacgctaccgctggaccagctaatgaagtacgtgtacccggagctgtacaagatcgatgcgttgatctaccacgcccgcaactcgaacattagttcgaaccaggatgacgacgaggacgaggatgaaccgttgccggagctgccgcgtcttcaattgtccgcggaacacttggactctcggtcaatatttctgatggactgcggaacgctgataatgatctatgtcggccttaatgtgccgcccgatgttttggaagctgttctgggcatcagctccaccgcagaactgggtgattatgtatatggattgccaaatgttgtgagcaacgagaacgatgtgctgaagcgttttattttgcgactcaactacgataagccctactcggcgctggtgcagataattagggacacgagcacggccaagggccagttcaccgagagattaaccgacgatcgcagtgaatctagtttgtcatactatgaatttttgcaacacattcgggctcaggttaaatagtatataagcaggatatcctaccactattgtatgcagcataaatacgagtttctaagaacctaaaaactcagactctggtgactagaagcacgaagcgaatgcaggtgacactggtgcgaaacaatggagaccagttcgggacagacatacacttgatacaccttaaccacccatcccctacccactctctcggcttaggtaattttaaagtgcatgtatttatttat

SEQ ID NO: 1227 - protein, 1184 aa, DROSOPHILA
MSTYNPNFVPPAHAPMPLNGNNFVNGVQGSVQQQPGPPPGQQYIPQKQPQQFQQPPPAAAFPGAGAPGNVPPPQQFNSGITNQFLPPTSGAATPLQQLPPSTLPPHLRPPAANGPPLTNGSNGASSANSSRTASPRPVGAAPQYAQGPIAAALNNPPLASGLRPSPQPTHQSLANLTSNLENLNLNTTRANGGTSILPQPQTQQQYAPTVTQKDGRGVASAQTGPPQFNDANSLLAASGVAAALVPNAMATPFSGQKPPNLAPNPAKMFGSASMAGRPTPAGQRIPYGVPPPTNPEQQSQQNNNLQNAPPPPRVGAVWPPSLPNVAAPGAQPMMPPAQQTPQTYPYSQVYQPGPQQQPPPPQSAVQPPPPGMFGTQPTGAPLQYQAQAPPQAYGQHPQQAPQTAPGGPYGTTAPLNVAQQGFSRLWGQDTIDLMQNRHILTPATLPPPKVVLHNQFHESINCSPSIMRCTLTKIPESNSLLQKSRLPLGIVIHPFRDVNSLPVIQCINIVRCRLCRTYINPFVYFVDSKMWKCNLCYRVNELPDDFQFDPATKTYGDVTRRPEVRSSTIEFIAPSEYMLRPPQPAMYLFLFDVSIIAQQSGYLEAACAVLNRHLDEMPGDARTQVGFICFDSFVHFYSMAEGLNQPHEMTLLDIEDPFLPRPDSLLVNLKECKELVRDLLKQLPKRFAHTHDPGSALGAALQVAFKLMQASGGRITVFQSCLPNKGPGALEPREDPNNRSAKDVAHLNPATDFYKRFALECSGYQIACDLFLMNQQYSDMATISGISKHSGGCVHHFPLYQKTKPHMVESFRSCFKRYLTRKIGFEAVMRIRCTRGLQVHTFHGNFFVRSTDLLSLPNVNPDAGYGMQISYEESLTDAKTICFQAALLYTNSEGERRIRVHTVCLPVTASLPEVMHSADTEAIIGLLSKMAVDRSVASNLSDARDAFINATIDVYNAFKIAQNLPSGQSGQLIAPRSLALLPLYILALLKHPAFRVGTSTRLDDRVYAMDCMKTLPLDQLMKYVYPELYKIDALIYHARNSNISSNQDDDEDEDEPLPELPRLQLSAEHLDSRSIFLMDCGTLIMIYVGLNVPPDVLEAVLGISSTAELGDYVYGLPNVVSNENDVLKRFILRLNYDKPYSALVQIIRDTSTAKGQFTERLTDDRSESSLSYYEFLQHIRAQVK

SEQ ID NO: 1228 - DNA, 3774 bp, DROSOPHILA
aggcctttctacgttgtgttttagcgaactcgaaagcgaactgtcgctccgaacggcgcacaaaacacttttaagcgcgcgcgctctcggtttttcttcgtgtgtgtgtgagtgatgggagagtgtgcactgttatcttttcaacatgtcgcccgttctttgttaaccgtttaaatggctgataattgaatattcccgataattgccgcactcaatgtgatacacacgtcctcaatatgggtatactttgtataaagtcgggtttcctagtcagataatccccacttactaagaagtaaatttatcaaatgcaatatggccgctcttttgagatgcgcatcagctgttctttgtttttgttttggccgtgggagagcaccacgtcatgtgttgccaggcggtttaattattgctgacaatttaattcacattttgtcaagttgatttgcacgttcgaaggggggatcagtcacccactttgataactgctaatatggcgacggctcttttttacgtgtcgcttgcagagctccaagaatgacacttgataagaaggatacatggtgggaaaacttacaaattacataatttgtttgttgattggggaaaccctacattatctccgaacccagcaataatatgtattgtaaatagcaacagtctcaagctcgatgctgctgtgaattaccaatatatcaaaacttaaaacattatcttaggaggtagatggtttatctgcagtttattttcaattctcatcgttagctgataaaactctcaggaaaccacttgaaatccaaagtgcagcgtccatattttgcacacgctgacaaccctgtcgtgagtcaccttccagcaggcgcagcaacaacagcactggcagcggccatatttgaatgacaccgaaatcccgcactgagcgcaaaacaacacatgcccatgcacgctctccaaaaccacacacacacagccatatcgatcgcatagaaagagacgtacgcgacgctataaacagcagttgattttcagagtttcaccaagaagcacataaagcgattgaattattaataaaagcacaggcactggaagtgagttttaatattactaactaactactttgtgagtgtttagttacgaaaactagaaaataatattctggaaactgtgtttttaaaccgaccaccatataaatttaaaaaccaaaacattccattggtggtggttttgttgttaaaaaagagcacagaaaattcaagaaaacgctacgacgcaaaacgaaaaaactcgcccaaaatgaaaacaaaagtgtctgttttccaattgtcaattgttgtgaaactaatttcctttgttttcgcctctcgaatttgattttaatttacagtaaaccgtcgacatgaaatttttcgttgcactcgctctctttgcgtgcctcggctctcttgccttggccaaggatgatgaatattgccagaacactgtaatcaccgcatgctctacgtcagccttttcgggtgagtaaagagagcgcctctaagagagagtggctaatctgtgttgttgctttttgtatctttgtaaaacataataataaaaacaagcgctcacgggctttttcacaggcaagagtaagtgaaatatagattggatgtatttctgcactatctcagatttcgtgaaaatgaacactttccaattcttactgcattacggcccttacattattattttaaagatacaaatacaaattcaaaattctattgccttgtttagtatggcactacctagttaggaaccattaagactatgtcattactattggatgtgcttctgctctcctattctaagagtgtgatctttattatttgctttttccccgtagccaactccatttgtaatgcccgttttgctggcattgaccatattgagcccgagatccagtcctacatcaacgccaacttggccaagtcgtacgactacctcctgctggccacccacttcaactcctaccagaagaaccgccccggcttccagaagctgtaccagggactctcggaccgctccttcgaggacagcattgccctgatcaagcaggtgacccgtcgcggaggaatcgttgacttcaacacccgccacgagtcttccggctccgtgagcaccaagcgcggcactcttgaggtcgacgaactgcactccctggctctggctctggacaccgagaagcagctggccaccggagccactcacgtgcactcccgtgccacccacgccaccgacgccgagagggatcccgagctggcccactacttcgaggagaacttcctgggcaagcaggccgagagcgtgcgcaagctgtccggctatgccaacgacctcgccaagctgatgaaggtccccgacccatccctgtccgtctacctgttcgacgagtatctgcagaagcagtaaggagtggagaccacctccttttcctccttctttttctaacacgctcctacactgtctcctcaaaattgctctcataattcccttataaatttgtttccttggattgttcatcaataaatcgcagtgcagcagcagcattatcaaagcagccacaagtgaataatttacaccgcgaaattcaccttgatttaccagcacaccagattgtgataatgttatcataaataagttagcaagttcgccccagcaaatgtatctttagtatgtacgttaccgcttgaacaaataataaacacatcaaagaacctaattatcaactagtaaaacagcagcatttttgcctctctgataaggtttgggtttgggtcgaaatgtatctggtcctcaatgaggggcgtctgtttgcgttttttctccgagtgctgctgattgcgggctggctggcagtgtactttggatatcatatggaacaatgaaatatacaaagtcgaaatggtatcggaaactactcagttctgcgatcacaacgggtgtaatgttccataatgttgtggtttctgatattcttagaatgtgccttcaactaaaaaccatatgtttatgtacaagccatcaacgcttgtctaaaaataaataaataaatgagaatgtaaacccatgttgtaaatatcgtagtattgtatgcaaactacgttaccattttaaaatcatctttttgaccattcagagactggaatcacttaggatctagtgggatctatctatctcaatatcaatttattactttctttcaattgacaacctaaatcgatggtgaaaagtgaaacctatctctcgcagtgatctgtggggcttaaaggagcccgactatctaatcagtgatacactcctccgccgctgatacgaaggggccacgtttgtcattccatgcgagattctctctgtcgccttatcactgcctggtgcacacggctttgccgctccggaaccggagcagatccgccgggcgccatcttggccgtctgctgactaagtcggagactccacgatgacgtggatgtcacattgttgcgtaagccgatgcaatctcggattttaattgtcccctgaatttgcatcgcagtttccctatcttcctctgctccctcctcactctcctgacctacaataattgttgtgaatccctatttgtgaatatgagttttttttttataatccacatggaagctctattaattctaggaaattccgtaagatcctataacagctgctcaattaacgtgtgaaataggtaaaaatgtatctttaatcacttttgaaagtggt

SEQ ID NO: 1229 - DNA, 1110 bp, DROSOPHILA
cgacgctataaacagcagttgattttcagagtttcaccaagaagcacataaagcgattgaattattaataaaagcacaggcactggaataaaccgtcgacatgaaatttttcgttgcactcgctctctttgcgtgcctcggctctcttgccttggccaaggatgatgaatattgccagaacactgtaatcaccgcatgctctacgtcagccttttcggccaactccatttgtaatgcccgttttgctggcattgaccatattgagcccgagatccagtcctacatcaacgccaacttggccaagtcgtacgactacctcctgctggccacccacttcaactcctaccagaagaaccgccccggcttccagaagctgtaccagggactctcggaccgctccttcgaggacagcattgccctgatcaagcaggtgacccgtcgcggaggaatcgttgacttcaacacccgccacgagtcttccggctccgtgagcaccaagcgcggcactcttgaggtcgacgaactgcactccctggctctggctctggacaccgagaagcagctggccaccggagccactcacgtgcactcccgtgccacccacgccaccgacgccgagagggatcccgagctggcccactacttcgaggagaacttcctgggcaagcaggccgagagcgtgcgcaagctgtccggctatgccaacgacctcgccaagctgatgaaggtccccgacccatccctgtccgtctacctgttcgacgagtatctgcagaagcagtaaggagtggagaccacctccttttcctccttctttttctaacacgctcctacactgtctcctcaaaattgctctcataattcccttataaatttgtttccttggattgttcatcaataaatcgcagtgcagcagcagcattatcaaagcagccacaagtgaataatttacaccgcgaaattcaccttgatttaccagcacaccagattgtgataatgttatcataaataagttagcaagttcgccccagcaaatgtatctttagtatgtacgttaccgcttgaacaaataataaacacatcaaagaacctaattatcaactagtaaaa

SEQ ID NO: 1230 - protein, 227 aa, DROSOPHILA
MKFFVALALFACLGSLALAKDDEYCQNTVITACSTSAFSANSICNARFAGIDHIEPEIQSYINANLAKSYDYLLLATHFNSYQKNRPGFQKLYQGLSDRSFEDSIALIKQVTRRGGIVDFNTRHESSGSVSTKRGTLEVDELHSLALALDTEKQLATGATHVHSRATHATDAERDPELAHYFEENFLGKQAESVRKLSGYANDLAKLMKVPDPSLSVYLFDEYLQKQ

SEQ ID NO: 1231 - DNA, 4756 bp, DROSOPHILA
tctccacctgcccgaggattacgatgagtggtctgcggtggccatctccgatgcttgggcatataagaggggattcctcaccgccaaggcagccaggccggatcgctaccgggccgcgaatcatatccttcgcatgtgcctggccggccaacagatgttggtattgcagttttatccgcccggatttgaggagcgacgtgagcactggctccaacatcccgatgtgggggaggtcaagaagtaccagcaagtcgaattagatgagccggagagcgagaccaacggcgacacatcatccgtctgctcggatagtgagtagctaacaaatttgaaaactaaaaactaaactaattttaaataaacccatcattttaagctgccgacagcgaggatgaagacgaggacagctccaatgacgagaccaatgctgatgaggaggaatgtggcatcagggaagacgcacccaggtctcggaacgtgtttgctctgctggaggacgattaaaagttgcatttactgattttgttattgcatcactagtttacacctataatttattattacgctatacaatgttttgctaacaataaactacaacaccaagctatggaggcagattatatgtcatcgatttcatcggatgaaatatagtcctcgccgagtctttcgtctagcgagagaagcaattcgatggctctgtgcggaaataaaaacgtaattattgttgttaagtgaaacgtgggttaagactaacttgatcaactgcttttcatatccgttctcctcgatcggggccggatacaaagcctttttgagcagcagtttctccaaattgcttcttaattgtatgactacgtcggcagtttcacgattgcatttaaagctaagtatgaaataagttaagtttatcctattgaaggaagatatgttatacccactaatatgtcttggccacgcacagatatggcgtattttgggtcactcccgcttccacgccatctccgaaaatgatcagtgccatgggaaaaaccattgtggagtcgagcaggaaaagatcggtggacttctgccgctgaaagtagacaaagtatgccgagtcgaagccactctctccgctgttcaccgaggagggatgaaagttaacgcggcgtccatcgtccgttgccatggtgtggatagcgcgtactctattcttgatctgccgtgattttctgcattaaattgtgtattagttattgcctctattgttaataggtggtgtctaccgcaagtgagccatgttgggatagagtcccgctcctataatggccctcagtaggggaatcttctcagaattcttattggatgcagcatccttgcagtttgacgatgccagaaatctgaaataaggtaagtagcttagtttacacaaggcagtcataaaacgaacctacttgtagttgtagagcagctcactgaactgattcttcatcctctccaactgctgcagtgtcatggagctgaggaaattcttatagcagaagtctcgttccgcgtgcgaatagcggctatcgcggtacgcaataatggtattgtgcaccatcaggtgatcgctccgcatatttcgggccattctccgcttgatttcatccactcggctctctttacccaaaggcgagtagaagggggacttaaaggacaaggcagccgccgccgaagtgatgggatccaagcaacagaagagcgccgacatcaggatcatttttcccatctgcggatcaatgggcagctttgccaagtgcatgcccagtggagtaagggtgcccgtctggtccaacgcctcaatgctgttcaataagcgggttaaattataagtgtgaaacgaaggggccaaactattaaacccaccgctttagcagttccactcccatctttatggcctcgggattgggggcattaataagagtttgcaggaaccgatacggatcgtcgatgtgcagtagcttgaggcttaaaattatggattccagcttggagcgtagtatctccggcgtcggaatatcgtccatgcgatcctctctagcgcgggagaacagattatagcatatgcccggccgcactcgacctgccctgcctctccgctgctgggtatttgctttggtcacccaaacctcatccagcgactgtatgttcgtttcgatgtcatagttggtggctttcgtccggccagagtttatcacataaaccacgtcgtcaatagtcaccgacgtttcggcgataattgtagagattataaccttacgctggcccgccggtggtcgcctgaacactgcctgctgttcccctgactgcattagggaatgtaatggaaatacggccatatgatcccgccacctttggcccttcgaagtctttggtttatccagaatattgtacagttgggagatcttatcataaccaggcaggaacactaatatggcaccctctggttcgttttcgcatatgtagtaaaccaaatcggctataaaatcaatatcctcgcagccctccgactccggcaaacgcagcttgtcgagcacacgactatcgtacgagttcctgatgcgtcgcagatacggttctatcatagcctcgtgcttcatcctgcgctcaggcggatcccgcttgggacgacgatcgcggaacttttggaactcgtagttcgtcttggacagaacatcctccaagtagagcatcttcacgggaaacatcacgccctcgatgcggaacatgggacagttgttaaagtagtcacaaaaatcctgctcccgtacagttgcactcatcaggatcacctttagatcgggtctgtggggcaggataacctttagaagacccattaggagatctgtttccacgctgcgttcgtggatctcatccaggattaagacacttagattgtgcatcagtgggtccgattgaagctgctgcagtagaacgcctgtggtgcagtaagtgatggaggctctctccctggccttcctgctctctaggcgaatctggtagcctaccgaattgcccaggctctcgcagcgctcgtaactcacccactcggcaatggcgatggctgaaatccttcgtggctgagtgcaaatgatgcggcacgacgaggcacatccgcgggaaatggcgtcgtcgaggaggatttgaggcacctgagtggtcttgccacatccagtgcttcctacaatgagtattacttggttttcccgcacagcctggataatatcgtcggcgtatttcatggtgggcagttttttccgtgcttctagccgtttcttggcattctcctccaactggcgttgccccagttccagctgcagtctctcgtccagcttggggtttacccagtctaagtccgcgttccgttccttggtctccgcaacgaattcctcaaagtttacactcaaaagatggcgaaactgttgctgaaatttggcatccacatttttgtcatccacattttgtctggacggtgcccggctgtagtcctccattaactccttcacacgctcaagcactccactgggagcactgacattgcagcccaagcggatttgcggctcctttgattccgcattctcgcctctgtccttcttttgctgccgggcaagattgcgatagtacaaaccgatgtccttgcccctgagacccggtgggcggttgcccttgcgggcgttggagccggatgagtccctatcgcgctgcatcctgtccaatttatataaaagaattcagaagaagaattcccaacccgaagtcaacaaaattcatagtgctgtcggactgtcaaaatgcgcaaatcagatagactaggactgccaacttaattatatacacctattgtgttactttaataattaattttcaaatataaatattttattcaaacaaaattggttgcatttagaacacgaagcaaaataaaatgaaaatcataaacaaagttttaaaaataagtgaaaaacaccggcttgctgcttattgtttggttcgaatacaggctaaatcccaaaagtatatttccataacccttgaaaatgaagcggtttgattgagcgatcccgctgcggtcacactaatttcgatcaactcaacgcgctgagtaaatcgaaccgcttgtgcttagaatttgttttttcgcaattaacggccgtgaagagccagcgatctgcatgccaagtgtccaataactaggcagaacagtgtttgcgttgcacaaaagcccgctagcggagtgtgttccatgtgtcattcccggcaaaggagcaacaagtggccgaaagtggaaagcaagagcaacaactaaataagtaaggagtaccacactgcaagaaaaagtgttcggagggaacggtgtgcacagcttgtcagcttgttttttgtacagagcgtcgcgcaataaaacaaacaaaaagacatagtccaaaaacaacaaccacaacaaaagccgtttgatcgcgagtttgtgtgcgtgtgcgagtgtggctctatttgtgtgagagtggcaagccattatttttctggtcttatgacgtaaaccaccgaaaaaaatcaaaagtgagcaggcgacacagatatcaaaacgaaggtgagcgcattcttaccaattctcgtttcgtttcttggaattccagcggttattagacggttttatacttgtttacattttcgcagttgcagcacacaactaatgccagagcgggagcgagaaagacatatgtagatcgttctgtgg

SEQ ID NO: 1232 - DNA, 2695 bp, DROSOPHILA
ctgaattcttttatataaattggacaggatgcagcgcgatagggactcatccggctccaacgcccgcaagggcaaccgcccaccgggtctcaggggcaaggacatcggtttgtactatcgcaatcttgcccggcagcaaaagaaggacagaggcgagaatgcggaatcaaaggagccgcaaatccgcttgggctgcaatgtcagtgctcccagtggagtgcttgagcgtgtgaaggagttaatggaggactacagccgggcaccgtccagacaaaatgtggatgacaaaaatgtggatgccaaatttcagcaacagtttcgccatcttttgagtgtaaactttgaggaattcgttgcggagaccaaggaacggaacgcggacttagactgggtaaaccccaagctggacgagagactgcagctggaactggggcaacgccagttggaggagaatgccaagaaacggctagaagcacggaaaaaactgcccaccatgaaatacgccgacgatattatccaggctgtgcgggaaaaccaagtaatactcattgtaggaagcactggatgtggcaagaccactcaggtgcctcaaatcctcctcgacgacgccatttcccgcggatgtgcctcgtcgtgccgcatcatttgcactcagccacgaaggatttcagccatcgccattgccgagtgggtgagttacgagcgctgcgagagcctgggcaattcggtaggctaccagattcgcctagagagcaggaaggccagggagagagcctccatcacttactgcaccacaggcgttctactgcagcagcttcaatcggacccactgatgcacaatctaagtgtcttaatcctggatgagatccacgaacgcagcgtggaaacagatctcctaatgggtcttctaaaggttatcctgccccacagacccgatctaaaggtgatcctgatgagtgcaactgtacgggagcaggatttttgtgactactttaacaactgtcccatgttccgcatcgagggcgtgatgtttcccgtgaagatgctctacttggaggatgttctgtccaagacgaactacgagttccaaaagttccgcgatcgtcgtcccaagcgggatccgcctgagcgcaggatgaagcacgaggctatgatagaaccgtatctgcgacgcatcaggaactcgtacgatagtcgtgtgctcgacaagctgcgtttgccggagtcggagggctgcgaggatattgattttatagccgatttggtttactacatatgcgaaaacgaaccagagggtgccatattagtgttcctgcctggttatgataagatctcccaactgtacaatattctggataaaccaaagacttcgaagggccaaaggtggcgggatcatatggccgtatttccattacattccctaatgcagtcaggggaacagcaggcagtgttcaggcgaccaccggcgggccagcgtaaggttataatctctacaattatcgccgaaacgtcggtgactattgacgacgtggtttatgtgataaactctggccggacgaaagccaccaactatgacatcgaaacgaacatacagtcgctggatgaggtttgggtgaccaaagcaaatacccagcagcggagaggcagggcaggtcgagtgcggccgggcatatgctataatctgttctcccgcgctagagaggatcgcatggacgatattccgacgccggagatactacgctccaagctggaatccataattttaagcctcaagctactgcacatcgacgatccgtatcggttcctgcaaactcttattaatgcccccaatcccgaggccataaagatgggagtggaactgctaaagcgcattgaggcgttggaccagacgggcacccttactccactgggcatgcacttggcaaagctgcccattgatccgcagatgggaaaaatgatcctgatgtcggcgctcttctgttgcttggatcccatcacttcggcggcggctgccttgtcctttaagtcccccttctactcgcctttgggtaaagagagccgagtggatgaaatcaagcggagaatggcccgaaatatgcggagcgatcacctgatggtgcacaataccattattgcgtaccgcgatagccgctattcgcacgcggaacgagacttctgctataagaatttcctcagctccatgacactgcagcagttggagaggatgaagaatcagttcagtgagctgctctacaactacaagtaggttcgttttatgactgccttgtgtaaactaagctacttaccttatttcagatttctggcatcgtcaaactgcaaggatgctgcatccaataagaattctgagaagattcccctactgagggccattataggagcgggactctatcccaacatggctcacttgcggtagacaccacctattaacaatagaggcaataactaatacacaatttaatgcagaaaatcacggcagatcaagaatagagtacgcgctatccacaccatggcaacggacgatggacgccgcgttaactttcatccctcctcggtgaacagcggagagagtggcttcgactcggcatactttgtctactttcagcggcagaagtccaccgatcttttcctgctcgactccacaatggtttttcccatggcactgatcattttcgga

SEQ ID NO: 1233 - protein, 674 aa, DROSOPHILA
MEDYSRAPSRQNVDDKNVDAKFQQQFRHLLSVNFEEFVAETKERNADLDWVNPKLDERLQLELGQRQLEENAKKRLEARKKLPTMKYADDIIQAVRENQVILIVGSTGCGKTTQVPQILLDDAISRGCASSCRIICTQPRRISAIAIAEWVSYERCESLGNSVGYQIRLESRKARERASITYCTTGVLLQQLQSDPLMHNLSVLILDEIHERSVETDLLMGLLKVILPHRPDLKVILMSATVREQDFCDYFNNCPMFRIEGVMFPVKMLYLEDVLSKTNYEFQKFRDRRPKRDPPERRMKHEAMIEPYLRRIRNSYDSRVLDKLRLPESEGCEDIDFIADLVYYICENEPEGAILVFLPGYDKISQLYNILDKPKTSKGQRWRDHMAVFPLHSLMQSGEQQAVFRRPPAGQRKVIISTIIAETSVTIDDVVYVINSGRTKATNYDIETNIQSLDEVWVTKANTQQRRGRAGRVRPGICYNLFSRAREDRMDDIPTPEILRSKLESIILSLKLLHIDDPYRFLQTLINAPNPEAIKMGVELLKRIEALDQTGTLTPLGMHLAKLPIDPQMGKMILMSALFCCLDPITSAAAALSFKSPFYSPLGKESRVDEIKRRMARNMRSDHLMVHNTIIAYRDSRYSHAERDFCYKNFLSSMTLQQLERMKNQFSELLYNYK

SEQ ID NO: 1234 - DNA, 3460 bp, DROSOPHILA
cactgtggtgcagatcaagtctcgcggaaggtaccgcggtccggtggacagaaggtggtcggatagatccgtctgctctcctatgttatgtagtacgtgatctgctgcagtgcctgtgcccaggaggctaatgttctcttgcaacttgcgtggtttcctctgctccatttcgttgagtccttttgcagatctgtttttaatttcaatttgttctttaaatggcgctaggcttacccttgcaaatgttgctcagaatagcattgcgcacgtgtttcaccttcataccggatggcttgtacacatttagaatgccattcatgtgcttaaacactgtggcggcatcataaactttggtgagagccatttctgctttaagttacgtatgtgcgctatttgtttttaaattcacatgacagtgttggtgaacacacacgaacagctgagcacatgtgctgcccagtactgaatagggtatagacatgcacttgaaacttaatttataaaatttacatataaaatgttgttttcaaatatctctttaattttctaaaaaaaagtttagttggaaataattctcaaaacgttgtggtctttatacccgcaaaaaaacatgcttgtatcactgcaaaacaagaattaagtccaccgcacgaaaaaacaagaaacaaatccgattgggctaaaattttctataaattttacaaatttcacgggaatattctcactgtggcttgcatactatttgcttgcatttaaaatgacaacaaaactgcacttaaagaagttataatcaaataaagtcttatgcgtatcactatattctcacaagagaagtggttttcaacgaaaaaaatgttttaaactggtaaacagcaaactgaagcctagtgactaccctaaatgttattaaaatatcggtggccgttagatatcgatataaacgataacatcgattattaagcatatgtcttttacatctctattgcacgtgtaggatttgttttgaccgcacgaatttgtatagccgcataccattaattcacgttttaatcgcaagtattgagagaaaccgcgtcttgagatgaagtggactactgcaaataccaaacatgtaaactacacggcgaagcacgaactgtatgtgggaacacacacgggctcctttaaacgtacgtccgcttgttctttatcgaacagcataataataatgacttcaactttttagacctggtgcctgcatccgagaagaccccttatggacaaagcaacctgagtgatctgtgcgccctggataaggattcccgcgtcacatctctggcctttggcaacgacgatcagacggagatccttctaggccgggccaaggacgccgtggagattcactccttcacagaaaagggacattctaggaacacagtatccttcaatgctgcgccaattgttggtctggcccgatacaatgacaagcttattgccggcattggcaacggagagatacagagcctggagctagaggcgaacgacgagtccgagcccgtggttatcgccacgggtgaccaaatggaccacctgcgccagtgcgcccaagtcaaaagcattgtagcaactggcggcaaagagcgtcaaaacaatctaaaggtctacgatttaaatgccgacggtaagcagattttcacctcgaagaatttgcccaacgactatctgcagctagaggttccggtttgggacagcgatatcggctttgtggatgggcctagtgtactggccacttgctcgcgaaccggctatgttcgcatctatgacacgcgtaagcagcgtcgacctgttgcatgttttgccagcgaggagcacgggatgagttttacgactttagtggcaaagggaaactttatttacacgggtaccacaatgggtgctctaaaagcctttgacactcgacgcatgaaaactcatgtgcatacgtacaagggattcacaggcgggataagtgaccttcatttagatgccaccggtcgctttctgagctctgcaagcctagaccgatacgttcgtatccatgattccgaaaccacagtgctgctctaccaatgctacgtgaaatcaaaggccactaagattcttatccgaccgtttgaaaacgaggcacgagtaacagaagaacctgaggaggtcgctgaccttcaaatggatagaaacgtgagtgaaaataagagcgtcaacgcaacatctgtggacaatgaatacgaggatatgtttgatcagatgcccactgtggggtaagtttaactacatattgagtgatttaataatacgctaaaatcttatattttggccaacagtgacagcgataatgagtccgaggaagagatgtctaatattaagctttcaaaggccgatctaaaaagaagatcgtcggaaaagtctttaaaaaacaaaaagaaaaaagttgtgattagttaaagcgacatgtatttacgtataagaatattaaagaaaaaatagtatagatttcggtggtttttatattaaagaactaacaaacatggcatcgtaggtagacacagagctgttttaaaaaagtttcgttgcatattacattctgaactgactgtcgagcaagggaacatgaggtgcgtgcaagtacttaaaataaattatattgtaaagatggaagcaacaaacgtcgactgcgattatagtgttttacccccagcataaaaatggattcgtggccttcctgtcattttttcaatgaagtgttgggtctgtaaaaacattgcagcttctgcagtctaagataaggtgttgtttatttcctatttctaaaaacataattctcaaaaatgttggctttgggggacagtaatgtaggaggcaacctcatttaaagagacgactcttgcggttcaccctttcttttatttatgttatgtggagtcgtggtttagtggcattttaatgggcttatagtataagtatcttatccctactagaggagtatcttacatatgtttaaatatttatttacactagatagatgtacggcaacggagaaaaattaatattgtagccatcaatagtttggtattattcatcttaagtaagcttctgtaaaaatcgttttggccacataatatgagatacacataatatcatgtgtgtagtatctgaagacatatatacatatgtttgcctataaactcatatttctcataaactagaattaaatgttttcctgaaaaatgcaatatagattattataaatgcgttataataataatatttcccactcgtttctagataaacaacggctttgttttaaaaatttaaaagtataagaaaataaagccagagctcctgaattcataatatgttaaacaacaatgctcattattttgagtttaggaacatagttgaaattttaattccatcagatgttcaatttaaaatttaatgttta

SEQ ID NO: 1235 - DNA, 1341 bp, DROSOPHILA
ttttgaccgcacgaatttgtatagccgcataccattaattcacgttttaatcgcaagtattgagagaaaccgcgtcttgagatgaagtggactactgcaaataccaaacatgtaaactacacggcgaagcacgaactgtatgtgggaacacacacgggctcctttaaacacctggtgcctgcatccgagaagaccccttatggacaaagcaacctgagtgatctgtgcgccctggataaggattcccgcgtcacatctctggcctttggcaacgacgatcagacggagatccttctaggccgggccaaggacgccgtggagattcactccttcacagaaaagggacattctaggaacacagtatccttcaatgctgcgccaattgttggtctggcccgatacaatgacaagcttattgccggcattggcaacggagagatacagagcctggagctagaggcgaacgacgagtccgagcccgtggttatcgccacgggtgaccaaatggaccacctgcgccagtgcgcccaagtcaaaagcattgtagcaactggcggcaaagagcgtcaaaacaatctaaaggtctacgatttaaatgccgacggtaagcagattttcacctcgaagaatttgcccaacgactatctgcagctagaggttccggtttgggacagcgatatcggctttgtggatgggcctagtgtactggccacttgctcgcgaaccggctatgttcgcatctatgacacgcgtaagcagcgtcgacctgttgcatgttttgccagcgaggagcacgggatgagttttacgactttagtggcaaagggaaactttatttacacgggtaccacaatgggtgctctaaaagcctttgacactcgacgcatgaaaactcatgtgcatacgtacaagggattcacaggcgggataagtgaccttcatttagatgccaccggtcgctttctgagctctgcaagcctagaccgatacgttcgtatccatgattccgaaaccacagtgctgctctaccaatgctacgtgaaatcaaaggccactaagattcttatccgaccgtttgaaaacgaggcacgagtaacagaagaacctgaggaggtcgctgaccttcaaatggatagaaacgtgagtgaaaataagagcgtcaacgcaacatctgtggacaatgaatacgaggatatgtttgatcagatgcccactgtgggtgacagcgataatgagtccgaggaagagatgtctaatattaagctttcaaaggccgatctaaaaagaagatcgtcggaaaagtctttaaaaaacaaaaagaaaaaagttgtgattagttaa

SEQ ID NO: 1236 - protein, 419 aa, DROSOPHILA
MKWTTANTKHVNYTAKHELYVGTHTGSFKHLVPASEKTPYGQSNLSDLCALDKDSRVTSLAFGNDDQTEILLGRAKDAVEIHSFTEKGHSRNTVSFNAAPIVGLARYNDKLIAGIGNGEIQSLELEANDESEPVVIATGDQMDHLRQCAQVKSIVATGGKERQNNLKVYDLNADGKQIFTSKNLPNDYLQLEVPVWDSDIGFVDGPSVLATCSRTGYVRIYDTRKQRRPVACFASEEHGMSFTTLVAKGNFIYTGTTMGALKAFDTRRMKTHVHTYKGFTGGISDLHLDATGRFLSSASLDRYVRIHDSETTVLLYQCYVKSKATKILIRPFENEARVTEEPEEVADLQMDRNVSENKSVNATSVDNEYEDMFDQMPTVGDSDNESEEEMSNIKLSKADLKRRSSEKSLKNKKKKVVIS

SEQ ID NO: 1237 - DNA, 39052 bp, DROSOPHILA
catgaatatccgattgatgcactctgcaacggccggtgttgcggctttccgagtgggtttgccttggtgttttgtcgctaacaggtgcttgcttagccacgccccagtgcgccccattggtcgaccttgtcaccccttcacccacccgaccacggaccgcccacccattcaatttcaattaccgtaccatacgagcacttctgtttaccgtttgcactgcaagtgtctctaatttatttgctgcgtctggagcgccgaaatgttcatctgcttgactggagctgcccgaaaatccattgtcgtaggtaaattatgcgtgagccattgactgaggcgaaaagttacagaaatcagcaggaaggtaaataagaatggcaataaataacgccgaaaacggaagttggtgcgaggtgacgctggaaaattgtatgcaaagtaaacacttgccggtaaaaattcagcgggtgatttgatccgcatccaacaaatcaaaactacaaggcccacaaaatgctttctagactttcaaaaatgtatctgcttatatacatatatatagtttttaatatttatgatttattattaattatgatcactatatttattataattattagaatggataaatgaataatttctaattagcttattcaaattaaacaacaaattaccacctatactgaaaacctttgtttatatacttttattttaagtcagccaggcgccatctattggcaggtagcagcagatgctagagcgagatagagctcgagagcgagcttctggtttcgaaaagctttcccgacgaccagcaacaacaaacagctgagtgggtggcagccgacaaaggaaaagcggacaagtgtcctgcgagccgcctttaatacggcgctccttcggcaggaagcgctcagtcgtcgacggctgattcaggcgaattgttcactccggcggacagagtgcggcgcaaaatcgtagcggactgggaaaactccttgggaaaagtcgcgcgcgcgtttcgcgtttcttatcatacgagtcggccagtgaaagtggaaagttattgcgcgagtgaaagcaggccccggagaaagaagctaaaaaaaaagcagcaaacacacagataaatcacaagttgcaaataaacaaaagccgagggaatcgtcgtccaataaaaggaatcgcgcggctcaaacaaatgtaaattatccacccacacacacacacacatgctttgtttttttgtgaatcatacataagcgaatgcgtcgcacacacaatgccattccacttggccccggatattaaagcatacttctctgcgctctaatttatttttgttcccggacggatattttggttcacgctatcattgtccttaatttatgaggttctgcgattctgtctgcaaaagttgccaaatagaaatatttgcctcaatatgtcaaagtttattagacatttagctttgcgtgcccacggcaatttgctgacagttgttttagttggtcggacgatagtgaatgaccattatatttgataaatgcccgggcggacaccgagttgaatgtacaattgcttttgccgcattttccgctcagttccctttatccaaaagatgcactgtacaaaaaaaaagcaaggtttaaattcatgagcctatgtgataataagttgttaggaaaactaatagtttgttgctttaattgctttaaccaaacaaataaatggataaataattgttaacaactataggatattttcaaatttctcccaacgtttatttgcaggtagatcaggcagcaaaatatttttttggtcggccagctgatgactttatgatattatttttcactgtacaaactcaacttttgcggagagcacggcatccacatcctgtggccgtcccgtggccatgttgtgtgcactgtgcctcattttgcgccggcctaatggcaggctcatcattaactcagttattgtcagtttggcgctaaattgacaggcggaacgacgggcctttgggcaaaaaggaaaggggactttttcaactgggccgagtaaatatcgttttgtttttactttcgcagcggcgtcattttgtcgcaattatcaaatggcgtgcccgtcatcgccaaatagcagcgacaaatggccccatcgaagaaactttggccccttacccaataagcctggccaaacaatttgcaaagccctgggaatcgagacttatttacactcttgtctctctctcgactggcacgaaaatagcacaaggaccttctgttgacagtgccttaccgttatcaaaatgccaaatgctgcacgtaattaaaattcgctcaattggaaggatgtcagaggccccgaggtcattcgcaaataggtactgccggtggaatgctctcctgattaatattccctatttggcaatcacagtgagcaaacatggggtggaaaaagtctagcagttacataccaatggccaaacgaacaacaggcatgtacacattgtactcgtgtatactttcatatatcttatgaccgggctcctaatgggctacagaaatgtctgccaagatgggcgaaaatcgatattttctccgctccgctggctggtttgtttaaagtatttaaagcattgccggctggcaggtagaaatcccttacggctcgccgaactcactgtgcttttctccgtgtaacttatcattgctttgcaggccaagttttcctcttttcaattggaggtaacttttccggccagggctgccattttgtgctccactcgcttatgccaatcctgccccaaggcgacccattacctgggcaactcccaagcccaaacccaaaaactccgcgagaactcaacgttcgcagtgccttaattgccctgcactcgtcgtggcgcataaatttcttggccaaaagtgtgtgcgttacctgttttggcccgacttttgtataattaaccagacgtatgcaccctttgtagctttgttttaaaaacgccattctgccattttggcgctactctgcgatttttaaaaaatactcaaggaatctccattcttcggctattcaagattaaaatattattctatgtgaagaattgggaaagtaataatttataatttttccttgaattctgggctagaatttatttcacaaaaattttctttgtcattagtaaggaaactttcagggcatccatggattcggccaagcggactccaagcccccatttacctcgactaaattgtgacccagttgatggctgagctgcgggttgttggtgtgcctttctattggtgcatcggtgtgttgtgccttccgcacgtgttgcatgtggcatgcaacaaacagcacatatgtacatacaccgctgtatagcccgcaaaaatgcagatgtaacagcgtggcagctgaaatggccctaaaaattgtagctgccaagtttgggaaatgctccgggctacttgggcccgacttttcgtttgcgctcatttaaatatttgattaaaataggcgcttgaagttagccttcgtattttggcctgaaagattaaaaagtggaaataatcatggaatggcagcaagcaagcccgattcggtatcgcataaaatattcataaatggtagcggtataataataataacactccaacgccttcattgataaagcatattcatatattttcactttcacatgctccgctcgttattgagcaaaccgcagcgtttacattgtaaatttcattacactttttctgtttatcatagcagtcatatcggttgggcaaacaaatataatttattacattttcattgtcgcgctcccaggggagcagtgtaagtcgtacggcggacggacgaatcgcgaaaatgaaataaattgcaatatcaatattgaattctggtgtccaatttcagttgtgatatgcgtttgaacatattcgttatgaagtgaattaaatacgccagcagagcgtttcaattaagcgaaaaccggaagagaaaaaaagctctaaaatggtaagtggtatttaattaaaaaagcaatcaaaactgataatagagcacattacaagcactcttaaatgaatacagaagcttaagagagttctcgagctgacatatgcaatctgaatgattgtgatttttggagcatttccaacaaccttatttatcatttcactttacttgtatctgcgtgtggcatttgggactctattctcctgtactgctacaacatttcaatgcgcccaacaaaggcaataaacatcaaatatcggttagatacatcttcatcagacaaccgaacagaaaagctgagagcccgtgtggaatgaaaaaaaaaaaaacaaaaagcaacagcagacacaaacaaaaagcgaaaacacactggcggcccgaggatgaagcctcatgtgtggccaactagacgtatgcgtaatgtatgtaaatatatttcaagtgttttgcttgtttagtattacttccggcggaagcgattgattgtgctgcgtatctggatggcagaggtatgtctgctgcctcctacccccccccccccttttattccacctcctttgaggggtttgatttcgcacaacaaatcaaattgattgcttttcggatacatttaaacgaaatgaaaatgcgcaatcgctattggtttcgcatatttcaaatttatcgactcgaatcaaagcttgtgtcccgtctgggaatgtaattaaagtccaagagcttctgcttttacgatacgaaagagaccaatacggcaacatggatcattcaggccagatacaccagacactagagtgaaaatattgatgtttgtttaagagcagccataagcataaatactaatcggttactgttttcccttcaatcgcagtatggcttcgttaactacgctttggagctgctggtgctgaagcatttcggggaggaaatatgggagaagatcaagtaagtagcgttcaaatgccaagtcaacagttacacaaactcattagcaaacgacaattaaatggttaaatggttataaggaacccaatcactctcactggcatatattctcatattacccaatatatcgtgcgattcatttcaaggctgtttgcacccacaaacatattaacagccacgcacttaattaataactaaaatacataaatcccccacatttgtctgccacgtaccgcaattaactaattatccatttttcacatcagacatggacgttcagtcgttgggcgtggcccgccctcacagccatagtgagatatacataaattaatcgaggccgtttgttgttggtggcgcataaacaagcaggacacgcgtcgcattaatgcgtacacggatttcgcaggctcagagatccacgggctcgagcctgcgagtgcagccagaatctacactcaaatacaaatacaaatacttttcagattcaaaggattcaaactcaattaatttgtaggacataagtcaaggatataagctaattctaagaggattcgggacactgggacatgatcggagaatcagaattgtgttaatgttttttatgaaaccatgcctaataagttttaagaacaaccctctgtatattgttcttcagtgtattcagttagcggaaatcaacgccccgaaacggccattggcaagtgtgtgtgtgagtttgtatatgggagcgttagtgtgactacaggctatatggtatatgcgattcgcatttatcttaattaagttattgatattgctacatggctgcacgggttagcctgagtcatagactaagggagtagtcctctactaattggccgtgatttatgatttctgattgcttaaccgcaagtcacttgccatttgtattggccacgttcacaaattgctaatgaattgaggcagtcaaggggcgaatcgcatcgggtgtcggcatcctggcccagacaaccctttaattatggcgaagaaaagggaaacatggcgaacttttctcattagaagggtctgctcttaaaggaaaaggtaacaatagcaacgttcacaggacactgtcatctggctccaactttgatgttataagtaagagttaattcaattaattatcgcattaaagacagctataaatgggttgatattttagaaatcttgcgactggggcactaagaaattctggaattcaaataaaactgaaagaatattctaatatatatatttggctgcttactttctctcggtgcattggcggcccttcaatttaaatgcctgccaatggggtcggcattgacttgactttaattacattgcagttagttggcagccacagtcgtagacatagtcgcagagcctagggaaatagctgcagcgagaatcaaactcattatccagcactcgaggcgccaagacaaagacggggtctcaagtcctgcgtcttatgtcttatgccttatgtcctgtggcctcagcccggggccacagtctctctgctctgtcagtccccattcctcagataggccacatcgtttgtcgccgtcctcgcacttgaaggcattgtcaaagcgatcattaaagcgaggaaaaagaatagaaaagccgaggccacaatggaaacgtggcccaggggcgggggtttgtctggttctgcccgccttgtcatcgtggcattggcattggcatttgccttgattgacacccagctgaccgcattgatagatagttggtagtcagtagtcggtctacctctttgtcagcccattgctgattgcttttaaagcctctgcgcaggaccttaaagccagctcctgttccgcagcctcgctggtcgtgtttgcgctcacttaatcagaatcagtgcgttaagtgctttatgctacttggtcccgaagcataattgcagcacatcaatctgcaaatgggtctcattaatttgcccaaacaagatgctcgacgaaaggggaaagcggagcggactctgagtttaaagcaaagatgaaaccaaacagataacttaaggtctttgcagctaagtacagcacgggaaaaaatatgtactgcattcgctttctaatttacatctcattgaaaaaataacaacccaaaataagcagattattaagtttttctgcatttgtaagaccccaatcatccaattatattgtacttcacatcaatgcaaggaagagtagatcattttgttacaaaattgattattgaggcttttcctcggagtggctggagtgtcagttgttcaactaatacactcacagcaaccagtcgaccagtcgcattattgttgtttttcctgcctcagcttttcatctgctgctgttgcaaaagtccagttattgttatcctgctgccgacgtgcgtgtttgtggcactttagacaaaaatcgatttgcctataaaatgctttacagcaacgaccacaatgcggccacaggcgagagctgaggtttgagctgcttggctgcgatggaattggatttgccctttgtgcgagtgtgtcaatatgtcagtcaactctatatacaccccatggttatgtggctatatggtttgagctgtcatatgagccgcagccgctgccggtcactcgccaattcacgctaatgggttccgatgcctcgacctcatccctttttgcctggtttaatgcgtgtggaatgatatcactaatttagttaagtgttcagagcttttagctgcctgaaatcttatgccatttacatggcgcccgaactggggcaggtgaataccaagcatagagtttgataaatggctagaaaacttggtcgagcacgtcaacgccgacttgtcatattaaatataaatttaaggaatttctgaggccaacacgtgccactgccgtttaccaaacatttttgcgacttattagctttgctgcggagaaggagttgagttcaaggggagattctcgctgacaaatactgaaaatccatcaatcttcattgcgcttcactggaatttccatcaacggcgctgggtcggtggagaagcaatcagccagcattttgtcaagcatcctgctaaggacattcgtttgattgcaggcatttgcgaatcctttgccattaaaagcgcatttgtacacttacatacatcgtggtatctgtgtaaaagtatttatatacggctttgatacgcgctcagcttattttttggttacttcgggccattagtcgcccacactccgccactcacccactcacccaatgacctgacttttttggccatgtcgtctttttttttagatattcataggaacatgaattcgcacacacacgcccgcagcattacgtctttttccctgttgtttgccacactcacatcacattgcttaacacaccccctcgaacgcacgaaaatcgatcgcattttcatggcagacattatggaaattcgactcgattctcgagtgtgtgtatctgggctggggttagggaaaatggcattttgaggcttgtaacgagttgagggttgcccgtacccgtgtccccgtgtccgtgtcggtgctaatgcgtcaaaagtgtgcgttggcctggccaaaaaaagttctcagccaaactcaaactccgcaactttttaactgacagctggtaacatttggggaatgcaaactgtgccgccggcagctccaaaaactcaaacacgaaaacaaacatcgggcgaacacaagagaagcacctgtttcaccagtgctgtcggcgcctagcttaagtcagaaaagaaacaagtcagcaaaatatttagaaacaacaatatttttaaaaacaaacaaaagagatgcatagtatattttaagaatgcagtttttgcaaacatttattaatagtgcataaatgtcatgctaaaaactaaaacacgtctaaagaaagacgcactttatagaattttatgttttcaaattttatccgccgtttaagtcgcaaagtcactatggagtcgttcaaaaaatcgcagcactgatggttttacccttcctctggcaggtgaagttctccctcaactttttgcatttacaatattttcatattgctgctccaactgtcgtcgccattttgtcaactgttttcagcgcgcagcaaatattgttacgctttattgacttccatgatgcgggcaagctgctccatgacagttgcagccacgcctccacgcaggagcatcctgttccgcccctggccaggacatttgacacgttttcgcacttatcgctgagattactttttgctttgattgcatttcttttggctcgacgtcgcgactcctttgcttcatttattgtctgtttgattgcttcatatttttggccaaaacctggaatcctggcatccactacaatcccccggtttattgttgaaagtttcccgttggcgttttatgtgctctccacttttatcgctttatgaattatgcgtcgcgtgcgtgcgtcccaaagttggtggcgttgcgcatacgcaatgttggacctgccgccttcaattcgctggcactcgagtattatcgccattaatggcttgtcaatagtgccaatgacttggccgggtgtcctttcgtgtgttaaagtcaaatggtgtgcaataatctaaataagaccgagtccaaggaggctaattatagtcaagacaacgaagcagccacttgataacgattatgacaagccattaagcaggcaaaggcgaatggaatagccattattaagcgactcactgggcggatatttgggtaaggagaatgggcggtattggctatcaaaaaatgtcatttacataacacgaaaccttatactacgacaatttaattgatttttaataaagagaaaaggttattaaccgatggacattttgtgtaatatgacatacccgaatattcaatacaatgtttactattaattattcaacgatattcgtttgtgttaggattggttgcacaaaaaaaactgaaataatgtctttattttttactaattaagtaattttaactctgtgttcgttccagaacttcttatcaaaagttcaattacacggtaaaagtaaatatttgttttccgaccgcttgaatacacaggtttggtgttccgcgggccctttcctcatgtctccagtaaagctccttattggcctttcacggagggttgaactaacttgagttcacttgacggatccaactaattacatattccatggctttggcgaaaaccaaacgccaacgaaaattccattaatttgtaataataattccatgatgccgaagtcattaattatgtaaacggctggttgactgctggacatttttaattaaatgcggcagtcgaaatatgtttgccaactgggcgccaactggtcgcatacgcaatgtctagttagtagtgttgcaacagccggggctctaaagaataattaaataacccgccagccagtagaaggagtgactgggcacgtatttcgcgctcaaatgcatcgctgaaatttttatttattgcattttgcgaattgcgacacgcgcactagttttgctaggtcctttggggacgagagcaggacacgtcgcttaaaagcaatttattttccccttatgagagggtcagctgctggttgaaacgctttaccaccgtccgcttttcgcaagctcgtgtgtgtgtgtgtgtgttttttaataaaacttaaaaccgcacaagactctccctgagcgcatttgtaaacatttcgaaattgcatttgggctgcttcccgggtgaaatctgcatattgaaatcgtgtcctctccaatggcagcaggcatttttcatttgttgctgttacttccggccgagatttgccaacgtcgatgatgccaaagggcaatgcgtcccgcccatttgcattttacagcaaaacaagacatatcccggagcaactgctctgcatctgctcggcatcaggatgagcagcagaaacatcgtcctctaagccggaagtgttgccatgtgcctcctcctagatttgcgccgttttgttggccttgcgaggcttcagctttgagtggagctctggccggcggccatcattaggactaaaatcctgtaggactgtaggactgaatggcagagccaccagaacaaatttgcagcatagaaatggttccggataggcggccattgcaaattgtgttaggatgccagttggcaactgccagtggaaatataaatctaatttccatctcgattcgattggaaatccatttttcagtgtgagtgcatgaaattgtttcgctgacgtcccacgaagagtattttgctaaattgtatttgacgattaatcgatttaccattctcatgagaactaacgacgaagaaaggatcactttatcagtatttttgtcagaacaaggcaaaaaatcgtaaataagctcctaatgatttttcgaattaactggtctttaaatcttgaaacttttattttttgccaatttattaaaatattgatgattataccccttatcaaaaaatcgaaaattgacaaaaaggaatttttttttcaaatatccaaaagtgatagaagttttatgtttaggtcataggctacataaaaaaggcaactccaagctcataagttattttataagcaagcttcattaaagagttgtgttttatttcgtttataatggaaatcaccctgataaatggacaaaccctgcaattgaaataagcacatcgcccttaattccccttacattctctcataacattaaatatttaaaccccattttttcgctgcatgcgtaaatatcagctctgcatacaataacgttaatttacccttaattccgccttaggtcagctttaaaaactaattgtgttaagggcggcttaattctttgctttcccctgcgaagaccaaacctaaatcggaaaatgggaaatccaggcgcagtggggcggctacaaccgcaaattccgaagtgagagatgggcgcgatgtagtaggattgttcggcatttatcagagcttttcttttggcggcatcgacagttgctaatgatgtcctaatttcgagatgtcacagtgcatgcgtagagataaaaaagtaaatggaaatggccgagggcaagggcgagtcaatcgatggcgggcggtaataaatgaccacgaaaaagacaaaaaaaaaaagaaatgctggtcgattgggcctgcatatggacagatattaatgggcctggccaaaagtgcgattcattcgattttccgatcatcttggctgcttctttctcccttttctgatttttatgtctctaggtgtgcgacgcacacttcaagctgcattaaaggttaatcatacgccccatggccgccgccgcagcttaacgatggtaaaaatgctaatcctcaggaaaatcgacttggcgaagccaatgccaatggcactggccgtgacaatgatgctggcgatgttgatgatgatgatgagatccttcatccttcatcattaacaacgtacatcacgtctgactgtgaattgcttggcagcggtttaacgctaatcgcatacaaatacacactagacagcagacaggatacacccatagtcaccaaagtggcaaagtgggagcaccagggtggatcttccggtaccagtaaaactagggaattggcttccactgccttcttcctgatttgaataacacgcctcagggattaccacaaacacacacagtcctaggcacacagagaaaaaaaacacaccgaaatgggtcatcaaatggttgtatgaacaacaaacatatcggagtggggctccttaaggacataagattcgaaaaaaaaacccttgagataggataaatttacattattatatgttattatgataacatttataataatgttttaatttgtgactcaatataacctaaggcaaatacaattttttattcataaaaaagcctctataagaccactttacttaaccgccagttgagatacgtggcccactatagatactcgctgtaatttcgatgttaatttcccgcctctggcattcgattaaagcgatgctcttggctaattcgacttgaccctggcacaacttggctgcatcctgtacgtgcgcgggtgtgtgtgtttgtgcacaataaaacatgtgactcacttgagttatgtggcacattaacttggccgagtcttaagtggcttttaaccttatttcgtttccgtttctggtttgcactggctgtggttcttttctttttattttggttctttgcagctacttaggaaattccaaatgcaagttggaatacataaagctgactgtggcatactctattccgaaaagtgcaggcatttagctggcatcattaaaccaaggcaggcttatcacggtatagaatccttttcacctcgctacaaggccaaattggaagaaattctgtgacttctctctattttctctttggtgctaagtgcctgccaagaaaatgcactaatgttggctagtttaaattcgttcatatgtgtgttaaacatttcaatgggcgaatacataactacagacaaacagtggaggtaaaaataataggacaatgtgtcttatttaatttatacctatacaaattgtaaataataaggatttgactttcaattaactaatttgtacggaatgaattgatattaaagtaagcattttttttttcattcccgttctaaatggatggtctctgctgtctggcggttgcatgtgcatcccacattcgcatccaaacttctgcggtgcacgtcagaaatagctgcgggctgatttgttaagtcgacgatggcgaaacgaggaaccacaattagacgtgacctcatcttctcgtaacgaactcattaagaattcttcacccgaccgcacgcaaagtcatcctcagactcgaattagctgattgattatggattttactcactttgcggtttgccgcgaggcccacactctggcgctggctaagccaacttaaagtttcagctgccaaaagtcaacaagtagttcataataaagcgacttaatgtcctgccataaaaagtgagagtcatgtgaggaattgcgaggtaaaatggaaaatgcggcgcgggaaagcaagaaacgagaaacgtgagttagagagcgtgtcagtgacgcgtaaattcctcgggttgagcattctggccggggacttttcctccatatcccatccacagagcagagcagaacgtgggctgcgaatggctctgcgattggcatattaaataataatatttacgcgcgagagcaaccaaaaccaaagcagtggcctgctaggggatgtgtaaacaggatatccacacagtatatataaactttcgatgctgaaaaggcaatgcgcgtgaaacttaaaccaacaatcgcgaggcaaaacaaaaacagttgggcgttggcctaagctacttaggcgcgaaatgttttcgtatttcttaggcgcttcttcggctccttggccgttttcgcagattaagccacttagtttcgacggcctgtcgttgtcactgagtaaacaatatttaaatgagtttaaaggggctgcgttgcccagcggaaattgaatttgtaatgaaagcgacgggaggcgaagccactaagtgtcgccttgcatttgccagaccagcgcggcgtatacgcaatatccaggaagagaagaaggaagaacatggcatcataaattgccgtcgtgtgtgcgtaattaatttttacagctcgtattaattgacgcttatgctgctgccgcaaatgtgctaaatttaatggcaaacttttttgcttggtgtgtgtgaccgaggatttaatgacaaattgcattaggagagaagaaacgaaaaaacgtgcccgaatccaatggactaattctgctttctccacgcacattaactttttcaattaagttgtcgatcaaaaggcgaatctgcaaaatacacacacagagacagcttacacacactcgccgacgacagacacgcacatttaaatcaataaaaatcaatcatacgcagtgttgggcggcaggtaagctgggccaaaacgtgcagcataatttaatttacggcacaaaatgctgcctagctggcacaataaaaatgatagacattttgccgccggagtgttgactttatgaaattatattgcgcacagatagaaagaagcattaggcgaaagtaaccagctgcagatgatggtaaaagcatctcacctcagctcaactgagcaattaaatggaaccagcatttatgaaatgagtgagctgcaatcttcacttccagttcactggccatttaaaggactttaagttgcgtagtcgttaaatttatgtatgcacttgccataaatcttggtttaatttcgagcttccctcactcaaccgcatgccatatattttatagaataataaattgcatgtcgaaaatcaatttccattttggtgtgtaatatgcaggaacttccttggttttcttggcttgaaagctgtttttcaggttcctgtttcctattcctaatgtccgctggcagttcaggaaattaaaaatcagcttccacaataaaataagtacatgtgtcggcgtgtgagaggcttcaatattaaatgttttctgttgcaacaactcaatcttagcaggggtgcaagtagttctcgcatttcagcgacagctgctgacacattctgcaatccaacagcatttcgcatttgaaatgagcaataatgaaataccgcatttcgccttcgctcacctgcgatgccacgcccactttgtcccgacaaatcagaagttttgcgtagggaaaatggaaaaactttctcacgtacaaaatctacttttctattacgttttttccaccaactcacccacccacctcccacacgattttcatgttcgattctgcaacgttggcgtttttatttcacgactttctccgggttactttcactgcgccggcacgttgtattcaatttgttttggtaacagcttggcgcaagttctattaaataataaagtcgatttgcacgatgttcacaaaggcaaatggcagcgggcttttctctttctgtattattgttattcgatgcaaatagcgaccaactttctaagaagaatatgaaatacttaccaaaaagccagctaacttttgagagaaacttaaaggattttggtgcttaaaatggacttttcaatccgcattatgctttatcccaaagcagaaaagaaagtaaagcatgcagatgtgtttaaactgcttgctgtggtgacacttaaaaaatattaataactgctttttttattaacttaaaaataacatatcttacagagatatctttttgggcataaatgaattatccaaactactttcttaggccaaaggtattattcccaaaaaaaaagttgtatgaaaatatgacagttcttcttaaaattattcaagctggcgccttccaattaacttttgataaaatttcatcaaaaccccaaaaaaagcgtacaaaggaaagctgaaaccctcgccccattttaaggctgaccaaaatttctcatttgaagggctttatttcgtcttcattgcttaattaaaaacataaacatgaaaaagcatataaagtgaccgccatatgggcagctgcccgccaaaaacacacagacagacagacagacagacacacacacacacacagggtggaggaatgccagccactcactcataaattcacgagcacagaagcaatttaattaaaattaatgtatttgccactctctttctttttttccgtctgtgtggaaaacccttctctgccatttcacattttgcggtttcgcctgactcgattttgatggctgcttatttttggctcggctcggctcggaattcaggaaaaaggccatggtcagcatggagggacagtttctggtgcgacaaatttacgacgatgaaataacatacaatctaattggagcagctgtcgagatactcagtaagtagttagctggtgccattttgttatgcaagcatatgtgggtcataaaatactaactcactactgtctccactcccgcactgtttgtccttgaagatattcccgcagatgacatcctggagctgttcggtaagactttcttcgagttctgccaggactcgggctacgacaagatcctgcaggtcctgggagccacgccgcgggacttccttcaggtacttttgccttatttactcgatatatctggcagttaacttaattgaaggccattttacactcatgcgccatgcatctgcggcacaattgcattggccaatcgacttttaagtcatttttcatgctgctcccttggcagtttctcggtttcggtctcagtctgctcgagttcgacattcgccatcattgataagcattaagtattttgcttgagcgcacacatcgccactcaaacccaaacccgtaacccatttcccttggcgccttttgttgcactcacattcgatttattttcaattttccacatttttcaccgcaaatgcttctcgaatcctttgtcataatgaaaaatgaaattgaattttttcgtctgcaccaccgcaaaatcaacaacaacagtgccacacggagaacaaatgccacaaatgcgggccatcaattcactttgaattccgtggacagcatgattttcattgaagaatattgaagatatcgattgaccttttattcacaatgtataatttttaaaaacaaacttcttgcttggaactctaatatgtatttttgtttttttttttttttcaattagctaagataagaagaaagttcctctatattaattatccatattacctatccgctttcccttttctctctgtgcaacaatcagaatctggacgccctgcacgaccacctgggcaccctgtatcctggaatgcgggctccctccttccgctgcacggagaaggatggcgagctgctcctccattactattcggaacggcctggcctcgagcacatagtcatcggcatcgtcaaggtgagatacgtctgtatacgagtatatgtgcccagtcacagtcccattcccattcccattcccattcacgattctctgtgggagacccattgacgcctccgcttcgcttatatcttatatctctcgctcacaggccgttgcatccaagctgcacggcgtcgaggtggaaatcgacattgtcaagcgcaagggagagcccatcgacgaggccgaaaaggagcgggccatcgcccgggagaatcagcaactgctggaggacgcggtggccacgacgacgacgggatcggcaacggttgtcctggctccttcgtcggatgccgagcgaaacaataatcacaatggcagcaatggcagcaacaataatggaatggccaacaacggcaacaccgtcaacgtgaataacaacaacgatggccaacagattgccagcgagacaggtaacataaaggcaaaggctcggcagagtaaataatgcaaaaaagagtcgccacgattaacatattgcggaattcacagagctggctggcatgacaataattgtaaactgtattgactggccgggccttatttattcatttcattgtaccgcccaccggatataataacgagaaaactttgtgacattgctctgattttaatacaactggctggcttcgtttggcttttatggctaaatgtattatttatcagttaaaaacggtttatgttgaataaaatgcaaatatttcgtatgcaattagtatcaaaaaactttcagatacgccgaaattttattttctgaactgaacaatggaaaaaaaaacccgatttgtttggttgcttatctgagctatatttatattttcctgccaaacttttgcagatccctccattgcgcttagcacgtgtcctatcgcccaggatagcttcgattgcgacggggacaaagagcagaagtgtttgcgactgctgaagaacaagagtgacgacatcgagcgctacgaccacgtgcagttcctgatacgggaaatcaacgtggccgccaagtcgcaggtggatgccaaaaaggacgaggtgcccgacgacatggagttcctctgcgaaggtgagcgttagcctactcaggctaattgcctggctaatacggacgcaaatgctgacccttcctcgtcacacagctccactcatatcgcccgccactttctgcaaggtgttccccttccacctgatgttcgataggcaaatgaaaatcgttcaggccggcaaggctgtgtctcgagtaattcccaggtgagtccttgctaacggtttacagtacgccatttgcttatgagccattgtttgcgattagtggccattagctggatggcgttcggatttcctttttcgcacactgcaaaaaattactttaacaggcgtctaaaagtatgcaactgtaaaaataatactgcacacttttagacaccttaatcaaatatgttagcatcttagtgatttctgtggaatcctcataactgagtttatgcctcgtatttctccctgtgcacccctcagagttgccgaggagaactgttccctaatagaggtggtggaggccatccggccgcacctgcagctcaacttcgagaacatcctgtcccatataaacaccatctatgtcctgcagacacgtcagggggccatgagcagccggcacgagcagcgttttctgagactgaaggtgagcaagggccaacaagccatcaatgtgtctggcacggttatgaaagtcccattccaaaggacccttacgcacagccgccccgtggcattaaacttaatgctcggcctgccacagagtgcggcataaaaatcaattttattgcagtggctcacactcggcacccgaaaataatctgttattcttttgtactcttcaggggcaaatgatgtacattccggaaacggatcggatactgtttcaatgctatcccagtgtcatgaatctggatgatctgaccaagtaagtaccagttaatggggattacaacagggaggagccagcaaccagggatatgagtgctcataatgcaccagtttctagtgtacttgaaatacggttttaattaaagcaatattctttgaaaacaagtaccaatttttccgcaaggaatgattttaagtatcgttcaaccattttaataaagcggctaatgtgtcttaacctgattttagagacacgaccgtattaaaggcattagctcttaaatgaggtattcttaggagatacctttatggcattatactcgcagtcaaattgaaacaaatgcgccttcagctgactgaatttatgggtgacattaaaaatgtttcctcttggcttattttcttcgttcggattctatttgctgcctggcgatttcaaaagtcttaagtaaaacaaaatgcgtgtcatttttccattttacacccacgtgccacatctttgaactcgccgttgaacgtggaatgtgtcgtgtttttttttgtttttaggaagggactctacatctcggatgtgccgctgcacgacgctgccagggatttggttctgctctccgagaagttcgaggcggagtacaagctcaccaagaacctggaaatgctcaccgacaagctgcagcagacattccgcgatctggagagcgagaagcagaagaccgacaggtaaatgacaaatgacagcgccgactccttaatggcgcgcaattctctcaggcgcgaaattgaaattacttttccatgtttctgcattctttctgctacatctttctgctgcttcatcctgacccattcaggctgctctattcggtgctgccaaagtcggtggccaatgagttacgacatcagcgtcctgtgccgcccaaacggtaagaaaaagtcaatttaccctatccctttgggagaaagtgcacagagagaaaaacaaattgtgttgagaccattgtacagcttacaaattgcacttgtacaacatactgtggcattacttttctctctgtgcatcactctcacatgctggaaaatgcaagcaatttgccatatttgtgtccgtttatttatgagaccatacttcctttgccattcgacagctacgactccgtgacgttgatgttctccggcatcgtgggctttggccaatactgtgcggccaacacagatcccgacggggccatgaaaatcgtgaaaatgctgaatgaactctacacggtcttcgatgctctgaccgactccaagcgaaacctgaacgtgtacaaggtgggtcagtcagccctctgcagtggccacttaattacactttttacctgaccacaaacacgatgcaatgccggcccttttttcgggtcagctctcaatttggtccatctaaaggactcattggcatgtctgtgctttcaggttgaaacagttggcgataagtacatggccgtttccggactgcccgatcactgcgaggatcatgccaagtgcatggcacgagtggccctcgatatgatggacatggccaagaacgtcaaaatgggatccaatccagtggtgagtgtggaatataataaattccgaatatatgcacttatttgtcactctgttattttggtgtataatgagagcaaacttcacgtttaggactaacacaagtaaaactcgctaaatttcgccgcaattgtatttgagtctcggcttcgcttttcatcaaattttagcatattttggcgtctttccttttgtgccacattttgtgcagcctttgcggagcaaccaaaaatgcattcacaactgacaacttgtgctcaagttgctcaagtgcccgcggatgaaaagcggggttggggctgggagaatgctgggtttttccagggggccgtcactctaattgtgcgcattgaaagtagttggaaaattgtctcgctcgtgtttttgttcgttcgtgtgagtatgcaactttcagcgtgttcgcgcaatttgttgctgaatgcgccattcgccattcgcaattttccatttgccattcgccattttgagagcaacagcaactcaatggcgcataaatttcaatgtctatcccctcgccccttgcaatctcttaaccctctactggccggattgagtggcaagtgcacgtaaaatattaacaacttgtggcagcaggcaagtgcgaaaaaagttcactcaacaaagtttcacattctatgcgcaaggcgtgggcgcaaagttttggatgaaaaactgcgaaaatggctaaaattaattcaaaattgatgacacacaatgtcaaaggacgcgtcttgtaccatggtacatggtctcggatccttgccagtggccacttgaccgtcaactgtcaccagagacgttgaaacttgtccgaggatggtgacgaggcctcctgcctgctgttacaatctttttttcggcttaaacacttttgctttgagtgctcgggcttaaaatacactgcacacatgcagggccacagataaatgtagttatgaaaagggggggaagcagggacggcggttcatccacaggacgaagcgaggacgagtgtgagggcgaggatgcggatgccccacttgatggcatccttcacaattacagcattgtacgtgtggacaatgcttgtggcttgtcagtcactttttgcacatgtcttggcatctgtatgtatattagggtggctcacagcgaaaatggaaacaaactatattggaatatttgaatatttggaataccattatgtaaatccatattctataaagcagaatatgtttgtgattttggattcttaatataatatcattcaaagagcaaatatgaattttattacattactattagtatattaaataatctaaatataaatatattaaatatatattaatatatatattataaatatatataaatataaatatattaaatatattatattaaatataattaccgactcaccctactgtagatatgtcccaggatctgcgtgcgtgtgccatatacccaccaacacaaacttagcaactcttgcttgggctcgtgtcacttggctttattgtccgagttgttgtttttctgttgctaaaattccattaccttatcgtcttgccgttggctgttctcgtaaggaagtcttcttttggtcctgggatcatccatctgttccgcccaccataagccataagccccaactagtctccatttccatctggcctcgccgcaactgcagtcaagtttttgtggctgtcagtatttcatatttgactgattgcctttggtaatgcagggggaaacccctttcatgcggacgaaaaagaaaactcgggcaggggaattcgagaatcgagtcagcgtttgatagatcgctcgaaatccaattaacaatcgccacgggcaactaatggcaaaaactaggacacgacatccgagcctgttgcactgcccttccccaggatgctctaaacccccaaaccccccttttgcgaccctccccccaacgaacctccctttccgccactggcgtcattttgcgcttcattaaatcctgataaaaagcagcagcagcagaagctagtcattccgcccggcacctccccctccgtttatgaagccaattataccgatgtttttttttatgcaaaaactttgcttccagccctcttttcccgcttttcctgccagtttttctcaactcaactctttgttggctacttcctgtgcttacagtccataaatattgattcggctctcagcaaaaactttctgcagttgctatgtattttatacactcgagggcgaaaccaggaaaatcattttccttactgccatgcatcttggctgatggctaaaaataaaccagcaattttccagaaaatagtttcgaactagaatggacagtacgtaatgtcctttagcattttctggcaaaaagtttgcttctctaattggaaaaaattgtgaagaaaactgtttttgttttccatattacgttgacatttgaagtaataataaataaaaaacaaaaacattgtatagctccatcatttaatcaatagaaactgttttaagctcgatgttgaatcattcatcagcagagcggtgcactggttcaatttgattttgttgcgaattttttcccaactcgactttctgcactttttgccttccaaaagttttgatacttttcttatcgcactccaccgcctaggcgattagtgttatgtaatgtttttctggtaattacaacttttgtccttcgtttttatatctgaactgctggcactttacccattttcacatattatcttggctctgcgtttctgcgaaactctctcagcatcgtcacctactaacaaggacctattgtggtcggggttgagacttgctcttattccctatggtcgccgctcatttcgttttaaatttaattaaagaaaactttttcctactgctgctgcaagtttttggaaagtaattgtggcaactttcggttggtttttgcagctacattccgttgcggttggcaacttttcggggtgttgatgatgggacgttggctggcgaaagtttattagcgcaatgaagtgcctttctaatacgctgcaaggcccgataaattctgttacgaactcagattatacatttatttgctagataaactccttacaaattctacaattctaaattctttgttttggtccttgttttttcagcaaatcaccataggcatccattccggcgaagtggtgactggagtgatcggcaaccgagtgccacgctactgtctgttcggaaatactgtcaatctcaccagccggacggagaccactggcgttccggggcgcatcaacgtcagcgaagaaacctatcggtgagtgctggtgtttgtactgggtgttttttgctatctgggctcgccgggcaaggaaattggcggaaaatcgggatcgaaatcgggtggacaggccgccacgtaggcctctaccgcagcctttttggcctcctccgtatacgctccatcgccggtggccatgaaagccgccaatgcggccttttccggatccgtgacagcctgcaggagctgcgcttgattctcactctcgtcctcgctctcccctgcactgctgattgtatccagccgtcccatctcgcttcccatcttgcatttggccgaggactttcccctctgctgatccttgtcctccgtgtcctgtgcctcaggtccttcaagctcctcggtgagatcgatgtagcgttgcaggcgctttggcaacctcaacgtgtcgatgccgcttggcagttgattgtgcatccgcatgacgtcgcggatacagcagctgtaaattcaagtttcatgttaaagtctttaaaacataaagaaagcgttaatttgtgtcttcctcagcttgattttgtgaacgtgatgtcttgatattccttctcaggattgacgtttttcgagctgctcaagacttttggtatacttttctcgcctttaggcgctgctcctgtcaatctcagcgggatatttcataaattaatttaagttttacacaataagcacatacggcgaacaaaaaaaatccgcacaccaaacaaagttcatgtgcttaaaacttttctcgtgagtgaaaggcagcaagagcgaaaaaacacacgcagcaactttcactaaagttgcccgcgaaactagaggaagaagttaaagtagcggatattggtagcggattctttttggccctttcactttgagccgcagtgaaagcttcctctaaagtttgccagtgtgtggagttggttctaaagtgcctttttgatacagaggggagcagcggcaacttgtccgaaattcttgcgaaagtgagcaccaaattggcgtcataaaacgcacgggaagcttaacaacatgctaatcagctgccaggggtatccaaccaggaactccgcagtttatgtccatgttaatttgtcctgtcaagtttctctgttctggcaatattttggcatttttacggccgccgacgacaaattcgaccaatcaataaagcaagctgacaccgcccgaggggaaaagatgaacggcggaagtcactgagcagccataaaagcaggcacaaaaagcgttgcctacttaggggcgcctctacggaagtcgggatgccggggcgtatgcgcaatatattcgcccatgacggcaatcgtcacattctcttcaagactctgatttcgggcacaatgcgcaatgtaatgcgttatgcatgcattcttagcgggtaccaaagagatttgcataaattgaaatcgcaaaatggctggctacaagaagccgagaggaactgcgacagaacatataaatcaagtgctcatttcgagcacattgttgaagcctcgacaagtggacgccgactcgattgcaaatacagtggctattcacttttcagcaaaggaaaatatgatgagagattaaaactatatttataatttaactcaaagacactcaagcttagtttatataattaatgttcaaagaatgtcagacaaacggaacagaacagatgctttcaattctatatatacacataaaataatttttcctggcctcaacacccatgctttactgtacgaagtgcagggcagaagcgcgagttttcgcatcgcaaacattggccagagaaaaacaaactggcaaacaagctggaaaacgggtttccagctgaaacgagagccaaagtcaatggacatttttgtgacacgtgagccggcggaggcaaatatgtttgtgtatttgtgttcacggcatcatcgggtcaccgagtgctccacaaataagtggcacatatgtgggctgagaccccgcatatggagtcccacaagaaccttatcaattgcagacgacaacttctggaattaaatcgaagaaacttctgaactcaaacagcgatcaacgtggcacggaaattcgcatcgatttaattcattaagttcgccgacatttgactacattgcggccgagtcagtgaagcaagcgcgaaagtttcgacccgacttctggatacaatacatgaaagaagaaggccaacttgcactaagccgccctgacaaaggcggcagggcgagggaaacttgtcaacttttgcccagacagtctgtcagtttgtcagccagtcagttgggctcctgtcttatgcttatttcatttttcgggcttatagccgaattgtctgcccgtaggaagttaagcaagcgtggcggacctaagccaaagtaattgaataaaaaagtgaaacttattatggctgtcagactccattcttcgtggcctaatctccatttccgaccaaaagacgtggacagcccattgttggtcacaagctcgagtgttcgaagcggttcccatcccctggtaagattacaagtcaaagttgataattaccggcataaatgacgtagactgggcactccgtagacctgctctttgccgataatcttgtccattaaaaggcggccatagcgatcgaagaacatttcccttcgggcagcgtataaaaggggctgaaatagaatattagagaaaatagtaagacacactacttcttacatattgcatcactccagaagagataattaatttaataggcatttgctcaccttgaagggcatctcaatcatgaccacattgcgcagcagaatcttgaggcacatgaccagttcgaagctgtaattgcggccatcctcgatgagtttgtcgagcagcgctataattacggaggcgcctccgtctggcggctgcggtgcggcgccgtatctgcaacggatggaaggggcgtgggtggtaagagggcgtgtcagcggtcgggagtgggtaactgtttgcaaatgagatacaagctgccagcacgtagttggtttgcttgtggtcaatgcaaagggtcagaggtcggcgggcgacggggcggcaataaatgctagatgccccgataaacacaatgtacaaatgaaataatgaacagacacgactcgcggttgtgtcagttgcacactagcacacacgcacaggagcagagatgtacacatgtacactgagaaaaaagtgttgtcatttcaaatattttttgagcttaattttaagctttcttagggtgtactgataagtgagataaattacaatgggaatatctttaaaattgtatatacaataaggcttatcaaattattaactgatcacaattttctctcactgcattcaggccgacctgagtggcaaatggcaaatgaagtgcgaattgcaaattgcaaatggcgccagcagtgttgtcactttttaaattgaaaatgtttgtcaaagatctcccccacattcacatttctcgttttctgcctgataagcattgtaatttatatgtttcgcttatttatatgttgtttcaccgccggtacattgtataaatattgtctttttgcgtatgcgtgattatgcactagtaaatcaatttggctgcgaatgaaagtaccagcgaaaaaggaattcatctcaccacattcatttgcatattttatggccaatttcaaatggaaatgcaaaaaagcgcagaacgaaacgcaaattaaaacacacaaaagcgaaacaatatcgaaaatttatggcgcatcagcatcagtaactcgaaaaacagtagccgcatctgaataaaaatcagtcgaggccgaaaggcgtcggcgcagaaagtgaaacagaaacagaaaaaccaactgcaaaggctggcaaaacccacctccaaaaacatccgggaaagcggtggaaaaccggggggaaaccgacagcggggaattggcaagccaaactcaaacatttgccatcaatcgatgccattgcaattgcaatttgcttggtgcaatcagcacagctggcgggaatctcaatatcgtgctgaatctgggatgtacaactggcctctgtctaataatgcgaattctttccacattatgccccttttgaggagtggaattcacttttaatttcttaggataaaaaaaggggcaaataatgttgcaaatcggcagatagggagggggtgctcaagaattcgcccgagaaataattcgctttatggccttttgaaatttatatttaacgaggtcaagtagggagaaaaactattaaagagctcatatattttgaaaaaccatagttctattacttttaacgaaaataaataaagttaaaagagtcttcctaagtcaattctagaaaaaatcacataaaatgtgccactcagaccgaaggacctgcggaaattgaataatttttgcgaaaatcttgatcaaatgaaattccagctgccttccgccagccgtcgacataaactttgacagccgagcatctcagacgggaactttgttgtgactcgcctttttggccagcaatcaatactcgcattttatgcaaagcatcctttttggcgctgcatcaaaaattgaaatcgaagccagcgaaatggtggggcgggtcgtgtgaggcggaaggcgtggccgcggccatatccagttaggaaacaataaattgccgcgacggcgaaagtcaaggacgaaggactcaggatcaggacgaagtcgaaactgcaggtgtttacatataaatttatgaatctcggctgtggacccgagtgcacgctcgtaactttttacaagctgcttttttggacctcgagactcgctggagaccgccttgtgatgcaaatttgctgtggcagcgactttcatatttaatgataatttttccttttattttctctacccgctccttggcttgggtttcgtcgagcgttttcttgtggcttcgcgagcacttgcttatgctaagcgtcttgtattttatgttgcatacattgcggcgccgccaagtggcgaccgctttgcatatttctcgctaattgaagtggcagtcgctggcacttcccttcctgtcccctttcccatccccctgaccggaagtccttattccaggccacgacttacctcagcagtatgagcagcagttcgggagcgttcgcctgtagggcaatgcgaaggggcgaggacttgccgcatgactcaatggggacatcaatgaatctgcaaaaaaacaagaacaaaaagccggattcggataagtcagttagtttttaggctcacattcggagtgagtttagtggacgcccaaatgggcgacaagcatcaaaatgggcttcgcacattagcaggagtctctggagctgagaaaatgagtctgggcgggtaccagacctcaattaagctgctcgcttgttgctcaaagccctttcataaaacgagaagaagcacagagaaaaatataaagcctttccttgtttttacttgaatctaaaagaagagaccaaggttcgtttctcgcagcacactttaagacgccttaaagacggattactgagacctagaagttattcaacttcgacatttctgcaatatttttttctgtgcctaacttgacattgcgtatatgtgcgtaatgtgttgtgtgaggggtgggcgtttgtctccattcaggcattagcatgtacaatgcacttaaagcacatttccggcacagcgcacacatacacacacggcttttatgtctacgcataaaagtaggcaaataaaagagcagaaaccacaataaaccggaagtagaagtaacccacacatcagacgataagcgcactttgagccaccatccagtgacagcttggaaattggcttggcaaattcatttgcgttttattggcggcgataaaagtgagtccctgcaagaatcaagccattccccaatcgcatcccatgacaggttcctcaatagccgtatatagcacctcgtggctggcatattctcctccagtcggaagtgatttgcccccaagtcagacattaacactttaatcagctgctgagtgggctgacaaatcaaatttctgtctaatggtctgcttagcgagtattagccggcgtttcatgttaatgtctttgctatacagtgtgcacttcgattaaatccgatgaaaagagtatgagttctcagcttgtgaagttcccagtgccttggagggtataaattattccgagtgccattaagtcggcaggttatgcaaatgcagtagtgaaataatgtaacttgctattttaagccatttaagccatgcaattactgaattaaatcatgtttttttctcaataaacaattaggttttagtgttttgttaaacacccttttcaggtgttttctttgcaaatccgttactgttgcattagaaccctaacatcgtaagtaaattgtgtaaatctcattgtgagcttttagcttcaacacaattccttttcacgagtgttcactgttctgcgaaaactttggcaatatgctgctccagcactgatttatgcaacttcaacggcatttggccgaaacgtttattgtcacattgcttgtttttctcagctcttgggtcgcacactccacacacacactcccaatcgtacacccacatacatttgcagctattgacgcttattcatgactttggctgctgttttgcgagagggcatcataaatgtcgtcttaatgcttgccagtcagtatgttttttgccttctgtttgtttaagaagcgcaaacagtcaactcggcaatggtatgggtatggtatatccaagggggcgggctgtatctgtgtggattagtgggcgtggtggggttgagcatgcctttgtgcgcttattacacgcatttttgactttaatcctccgaagtgctggcgaacaaagccgaaataacaaaaggtttacatcgctgcctgttggttttcagcttatcgcatcagcgacactcacacacggacctcatgtgcatgtgggagggtcggaaaaagaaggcggaaaatgggaaacccccccccaaaagcaagctgcaaatgaaaatcttaattatacatgacaccagcagaagtgagagaaagccaccgccagtgattgagagccattctctgtaaaagtgtattcgcagtcgtgtctgtggttgtaaattgtcgccatctttcactcaattatggcagtcacacacacacacacactctgtgtaggtgccacaacaatggctgatgaattaatttaattaaaatcctttcatttctctggttacccttcacgttcgtccaccatttccttgcattcccagcgggtatttatagtatcttattgttaccgaaaacattattattgtgtggaaaactggcaagccattaagattgatcggtatctcggcacataatccgaattttaaagtttaatctttaattcttggcgatttgctttgtaagcaacttataatttgctctgatagccataagctaagtgtatagaaaggcttactgtgactgttatgaaagtaagagctctccataaatgtccaagcatacagctagtatgaaaaactctttgggggaatgaagacctcggcatggcacccaggcaactatccaattaacccggctagtgtgaaaatcgctcgaggcagcaaaagagcgcgacacatgaaagagtgaagaggggggagtggggaaaaggggagaatgtcaggacaggatggggaccgggctgaggactcacctgagctgtcgctcctgctcgaagcgcggaatccagacgggcaatgtgagctgttcgcgtgtggcgtgcttcagaaagtaaaccatagcccggacattctcgtgctgcgaacaaaggacatacatgggtgtctattccacggggccaggaatagggtctttctgccagtctcacctgatcctgaaagtcactgcgccagccggcgatgaagtgcggagcatgtggtccaaacagggcgcccaggaaaatgcgctcatatgtcttctcgcactcgtaaatggccactgaattgcacaaaaaggggataaattagtcatgggaacaggaaaatagttaaaagttaatttatataaaacaagccacgtttaataacatttcgaagtgggtaatgccataaaccaaatttgtatacacattgtgaccgattttcccgcgatgcaggcaaattgtcggtagtggagaaagcggttaaataatgtcatcaaatcgcagcagcgcagccataaaaaagctaattacgtggctgcacttgttgctgctttggttttttggctttcggtttcgttggctttttggcacagcccagaaatgaagtcagcggaaaacggaaacggccacaatgtttgccaaaccaaggccagcgggtccaaaaggctggagtcagcaacaaagcaacttggtgagtgaggacaggacaaacaaggagcaagttttattgcacacgagtccagattccctgacagaggcatgccattaattccaggcacttttcctgctcgcaaaagtttacgcagccttttaattagaggcagccaacatgcgtacgccccaaataacttgcaacactttgaggcactttacaagttttacgatgcagcaacaacagagcaacagaacgacatcagcaacactttcttaacgcaattagcagaaacacgtgattaaagtgaaaactgcctgcttatgggcgtaataatccgatgcgatgggatgatatttattaaagtatgcaaagcacacagccacgcccaaaaagcaaacaggaaagtcttgccacacacacacgcacactcactcgcatacgcttacgcacacatacgcatacatatgcatttaaattaaattatttagttggcccgactccacttacccagcagcttgacgaccacctccgagtcccggactccccaatcccagcaggtgcgcagtccgatgtacaggatgttgtgatacttgcccatgaggcagacctggggaatacgcatggaatggagggtgtggtgaaggggctgaatcccaactgaagtgctactttttaaattataaataattgccatatgaagagatggcatttaaaatggaagaaaattaagtttagcagactctgccaaaggaaattaagcccgaaacaactttccatatttatttacactctaaaaggtcaattggatcgcagcagcaggatatacatatttatgcatagttttagtacttttctaaccgttttctagaaagctttattaaattccacttttattcgactcaaaagcaaagcaatgttatttggctaattaatcattggtttccattcataaggcttggtttaaacattaacatttatttaatacgacaacgaaatagactgacttggcttttgttctaattatttatttcgtttttttaagtaccggaaactaattgtcaaatcattattaattaagttgagctttgctaaagcccagtgctagtttgtatggactcttttaagtaaatatttattcatattaactattgaagtttggcacacagaaatgccacattggcaacactcgatttgtacataaagctcacctggccgttctgctccttggccattcggtggtacctcatggccgccgtcaccgcgatggcggccacctcatccgtctgcgagttctggccgccgctgcagcccttgatgatggagctcaggtggtcgaggacatctcgccgcgactggcggtcctgcagtccgttgcgggagatctgctcgaaggtgtcgtcgaagaagcactcgaagatgtagtccatgaccagatggcggcgctgggttcgccggttccgctggtgactggccctattggcaggattccgacgcagttgttcccgcacccgcagacgcagccgtgcccgtgactcagtttcccggcggaaaccgtagaaatgccgtggaaatggcaaccagcagcgaacccacacaaattggctttttaattgacttaccagccgctggaaagcctgtagcaactgcgaaagcatattgcaaacaaaatttaattcactttaagtaggcaaatattttcgattgagctgaattgatgattccctccaaagaattgaaattccgcttcaaaaaaactcccgcaccgctgaagccaaagagtcgcaatacacaaaaaagagagaatttcttttgcgggggtgactctcttgcgctatcgattttttgcagctggcaatgatgtgctgggagaacttttgataaacataaacaactcataatgagcatgcggaatattcattttaatatttttaagcattgcaatcatataagaaaataattacatagtatgtaaagcttattcaaaagctgatatacagttcaattactttttaggcctctttatttccgtgaagctcccagcaaagcaattggcaaacaggtgtttgattaccagccgacaagtatatttctatgagctcttcaaaaaccgaatggaactcgaggactccattgaaactgattcgattcgattcaattcgattggtttttgctaaacagtctattgcactttgaaatttgctggcatttttccgaaccatttattcactgcacgcagcgcactcacacaattttccaccccactcatcagctgccgctggaaaactaaacaaacgaagtccaatttctaagaacgctcagctgtttacctaagcgctcactctcccgctttctctccactctctctttgtacagagagtagcggaggtattaaatacgcgtttcatgagcataaagctaaattagattctaaattggaattttcaatttaaaatatatagtacatatgtatgctctcacattatttttgtgctaaatgggtaatgtttggcgataagcataaaatcaaatggcgcataaaaacgcaggtttttgtgattttgcaatattaaactgaaaaataattggtttgtcattataaggattatgcttgattcaacaaaaatatatttatttcgaaataaatactgatggtgtgctgtttaatgtttcagtgcttttttcggtttaaatcattaatgaatttgattttacaacggaaaactgaaaactaatacaaagtcactcgatacttcattccagagtgaaaccgatattatcataaagcgaaccgctttaagctatctttttagagatttactaatcccccttcaatgaatccattacattttcaaggggatcattttgaaataaatattgcaacaaatattcatatacacggatttaaatctgtaaacaataggagtgttttctcgagctttagccacgtcaaatgtattttaaaacacgactccaattgtcatgtaaatttctcagctacaaaataaattcatattttaaatagcaattgtgcacattgtttacatgtttttctatcaccctttgccaattaatatttgtttatgcgggacatatcaattttcccatacattattcaggcccactcattccattattcgccgtatttgcacgtttaatatttgggctgacaattaagcgctgggtaaatatttaagcactgccataaacattaattaagaacgcacaccaagggatccagagatgatgactgggataatcatgtctggtagggattcctcgggtccttcgccttaatcgcatatgcaaataagtgtcgaaggacattcggcacagtgtaattaactcaggtccattaaaacggtgcatatttgtgctggttacccaggacaacatggcaatattttcacctgaacaggctcacctgagcgctaattaaaagggcaatgcaattgtggccatatgcaggctatccgatgccgcaaaggtagcgaattaattgaattaaattcgtatccaatcagcggcgtattggccgtaaatatatgagtccgaataaatgcaacaatgtgtggttgcactgtggtcgagccaagcggaagcggaaatgcacacaagcctggcgaaatttttatttcgcttccgttttatgctgcactcgattgtgcgggcacatggagcacaataaccgaatttacataatttctggcgatgcaatctaatagctgaataaggggtctcccactgtggaaattacgatggcaatttattggtgtgcagattgagaaaaaaaaacgacccccgagatatacatcattcagagtgcattatggcatcagaccaagtccacaacggaactccctaactcgaatttatgtgactgccaaaggagtcacatctcaaatgttaagcactactattctttgcttactgaatttgcttgcatcttaaagatatagcttatacataacgttctgtctttatttctcttcgtaagtgatattaaaactcggtgattactttgtaattttggatagaattatttactgcgctactctacttaagaaagttttatttacgaaatttcagtttacactatactaaaccccaaagaagaataacagttgagtttacacagtgccttccgccctgaaacttatggcatctgcccctttttcctttcctttttgcaggctcctctgtatggcgatcaaccaggatgattcgttccacttggagtaccgcggacccgttatcatgaagggcaaaccgacgcccatggactgttggttcctgacgcgtgccacaagcagcattttgggaggcacttcctcgaccggaggcagtggcggcggaggaaacgggagcttggattcgccgctgctgcagccagccactccgaccgctggcgcggccacgcccattcccgtagtcgcccagcgggcagcaggacatgccagcgtgtcacgtacttcgtccgcaggaggaggaggaggaggagcggttgtgggcacataggaactgtgcaaggactcgtcctgctgctgctgaaacatcctgtaaagttgccactgcgtgcgtgactccatctgtccgaatgtctgcggccaaatctgcaggtccttggaccacttaaccacttcatttctatgcctttgtgtttgtcatcctgcatcctgcattctacgccctgtgtcctgtgtcctttctcccgcgtcctgcatccataaacccaagtgtgtgttcttggcattgtgtgattgttgctgctggcacattgcggccggagcccgaggaacgtcggatcgttgtgcaaggtaatttatgttaatgctcttctatctgcaaccattcaagccaaccatccgggccaaccacttagcccagtcactttacaaatgatttacatttctcgtgtctacgctggaaaaaccatcatttgggtttaagaactgtgtagattgtattgactatcttttactcactaagtggaaagtatgaatttaacctagctttcacttaaacttgtgctatctatgcaaatgtggttagagtttaacctaatgtgcgcaaatcgtatgattaatacaaagtgttacattcagagcacgtaatttattccacattatcatgtcatgtactgcaatccgtggaaattagcctcgcccttccggggccttatcggaacaaattctaatgccagtcataaagaatattttgtgtcaggacaaatttcaacccatctggccctatccactcggcagtaaactagataagtccaaaacaactcaatataaaagccataatatgccaaacagttaaatatatctctcactcgaactctaaaggattttgtcagcacagccagcgaaagcgcaaagcctttcatcctgccacgcccccacgcctcacgcccactctttatcctcgaaccgaagctggcatttgttttgtgtgtgtttttgtttacaaagttttggccaatcgagctgcaagccaaagagttctatttcagccgaaaataccccaaaaggagctggtgtgcctagaatttagcacatattttgaaaacaaatatttgatatgagcaagcaggcgaaccagctcgaggcactcgctccaatccaaaggaaaagccacaacgcgggtttgtccgaaatagaggattagctacagaggacttcctcccaaccagaacataacta

SEQ ID NO: 1238 - DNA, 2850 bp, DROSOPHILA
aaaagtcgcgcgcgcgtttcgcgtttcttatcatacgagtcggccagtgaaagtggaaagttattgcgcgagtgaaagcaggccccggagaaagaagctaaaaaaaaagcagcaaacacacagataaatcacaagttgcaaataaacaaaagccgagggaatcgtcgtccaataaaaggaatcgcgcggctcaaacaaatttgtgatatgcgtttgaacatattcgttatgaagtgaattaaatacgccagcagagcgtttcaattaagcgaaaaccggaagagaaaaaaagctctaaaatgtatggcttcgttaactacgctttggagctgctggtgctgaagcatttcggggaggaaatatgggagaagatcaagaaaaaggccatggtcagcatggagggacagtttctggtgcgacaaatttacgacgatgaaataacatacaatctaattggagcagctgtcgagatactcaatattcccgcagatgacatcctggagctgttcggtaagactttcttcgagttctgccaggactcgggctacgacaagatcctgcaggtcctgggagccacgccgcgggacttccttcagaatctggacgccctgcacgaccacctgggcaccctgtatcctggaatgcgggctccctccttccgctgcacggagaaggatggcgagctgctcctccattactattcggaacggcctggcctcgagcacatagtcatcggcatcgtcaaggccgttgcatccaagctgcacggcgtcgaggtggaaatcgacattgtcaagcgcaagggagagcccatcgacgaggccgaaaaggagcgggccatcgcccgggagaatcagcaactgctggaggacgcggtggccacgacgacgacgggatcggcaacggttgtcctggctccttcgtcggatgccgagcgaaacaataatcacaatggcagcaatggcagcaacaataatggaatggccaacaacggcaacaccgtcaacgtgaataacaacaacgatggccaacagattgccagcgagacagatccctccattgcgcttagcacgtgtcctatcgcccaggatagcttcgattgcgacggggacaaagagcagaagtgtttgcgactgctgaagaacaagagtgacgacatcgagcgctacgaccacgtgcagttcctgatacgggaaatcaacgtggccgccaagtcgcaggtggatgccaaaaaggacgaggtgcccgacgacatggagttcctctgcgaagctccactcatatcgcccgccactttctgcaaggtgttccccttccacctgatgttcgataggcaaatgaaaatcgttcaggccggcaaggctgtgtctcgagtaattcccagagttgccgaggagaactgttccctaatagaggtggtggaggccatccggccgcacctgcagctcaacttcgagaacatcctgtcccatataaacaccatctatgtcctgcagacacgtcagggggccatgagcagccggcacgagcagcgttttctgagactgaaggggcaaatgatgtacattccggaaacggatcggatactgtttcaatgctatcccagtgtcatgaatctggatgatctgaccaagaagggactctacatctcggatgtgccgctgcacgacgctgccagggatttggttctgctctccgagaagttcgaggcggagtacaagctcaccaagaacctggaaatgctcaccgacaagctgcagcagacattccgcgatctggagagcgagaagcagaagaccgacaggctgctctattcggtgctgccaaagtcggtggccaatgagttacgacatcagcgtcctgtgccgcccaaacgctacgactccgtgacgttgatgttctccggcatcgtgggctttggccaatactgtgcggccaacacagatcccgacggggccatgaaaatcgtgaaaatgctgaatgaactctacacggtcttcgatgctctgaccgactccaagcgaaacctgaacgtgtacaaggttgaaacagttggcgataagtacatggccgtttccggactgcccgatcactgcgaggatcatgccaagtgcatggcacgagtggccctcgatatgatggacatggccaagaacgtcaaaatgggatccaatccagtgcaaatcaccataggcatccattccggcgaagtggtgactggagtgatcggcaaccgagtgccacgctactgtctgttcggaaatactgtcaatctcaccagccggacggagaccactggcgttccggggcgcatcaacgtcagcgaagaaacctatcggctcctctgtatggcgatcaaccaggatgattcgttccacttggagtaccgcggacccgttatcatgaagggcaaaccgacgcccatggactgttggttcctgacgcgtgccacaagcagcattttgggaggcacttcctcgaccggaggcagtggcggcggaggaaacgggagcttggattcgccgctgctgcagccagccactccgaccgctggcgcggccacgcccattcccgtagtcgcccagcgggcagcaggacatgccagcgtgtcacgtacttcgtccgcaggaggaggaggaggaggagcggttgtgggcacataggaactgtgcaaggactcgtcctgctgctgctgaaacatcctgtaaagttgccactgcgtgcgtgactccatctgtccgaatgtctgcggccaaatctgcaggtccttggaccacttaaccacttcatttctatgcctttgtgtttgtcatcctgcatcctgcattctacgccctgtgtcctgtgtcc

SEQ ID NO: 1239 - protein, 787 aa, DROSOPHILA
MYGFVNYALELLVLKHFGEEIWEKIKKKAMVSMEGQFLVRQIYDDEITYNLIGAAVEILNIPADDILELFGKTFFEFCQDSGYDKILQVLGATPRDFLQNLDALHDHLGTLYPGMRAPSFRCTEKDGELLLHYYSERPGLEHIVIGIVKAVASKLHGVEVEIDIVKRKGEPIDEAEKERAIARENQQLLEDAVATTTTGSATVVLAPSSDAERNNNHNGSNGSNNNGMANNGNTVNVNNNNDGQQIASETDPSIALSTCPIAQDSFDCDGDKEQKCLRLLKNKSDDIERYDHVQFLIREINVAAKSQVDAKKDEVPDDMEFLCEAPLISPATFCKVFPFHLMFDRQMKIVQAGKAVSRVIPRVAEENCSLIEVVEAIRPHLQLNFENILSHINTIYVLQTRQGAMSSRHEQRFLRLKGQMMYIPETDRILFQCYPSVMNLDDLTKKGLYISDVPLHDAARDLVLLSEKFEAEYKLTKNLEMLTDKLQQTFRDLESEKQKTDRLLYSVLPKSVANELRHQRPVPPKRYDSVTLMFSGIVGFGQYCAANTDPDGAMKIVKMLNELYTVFDALTDSKRNLNVYKVETVGDKYMAVSGLPDHCEDHAKCMARVALDMMDMAKNVKMGSNPVQITIGIHSGEVVTGVIGNRVPRYCLFGNTVNLTSRTETTGVPGRINVSEETYRLLCMAINQDDSFHLEYRGPVIMKGKPTPMDCWFLTRATSSILGGTSSTGGSGGGGNGSLDSPLLQPATPTAGAATPIPVVAQRAAGHASVSRTSSAGGGGGGAVVGT

SEQ ID NO: 1240 - DNA, 2596 bp, DROSOPHILA
acaagcagctaggataatccaggattagactgcgaagtcactatgctcctcaaggcatacttacgatcttgaacattttgatttgggtggattgtcggactagaaatcttctaagactgatgacaatctatgctcaaatcggtgtttatatatcatcaaaagctgatgcaatgtgcgtattataattaagtcaatgtgatgcatataataaaaaccgtctgggatgcaaattagtcgacttgagatggcttaaccactttcattaggagatgagcattcttagttatttattcaactgaaatattcgccctagtctaaccgaaatgcaaagcaaaccggaccagaaaccagaataattattaagcagtacaatatttaattttctaaaattcaacttcaatatgaactaaacttaagcatagcatagttttcggtgtttcatttggtgtgtggcacgttgacaactctggccaaaagctttgcgggtttttttaaattaaacagtgacatccaaaatattgagatacaacaaaatgtcataggcaactagcacgttaatatgcagtatcacttgcgaaatcgtttattccggtatattgtttattaccacttcggaaccttttaaaatagatgggactgctatcaagtgaagtgtattgggttttttgattttgtacaggcatgattgataaagacttggtcaactcgaaacgtcatcgatgagcacagaatccgaaaaccgtactccatcgcccctacaaaatttctaccgaagcatgtttcatttcggaatctgttcagcagcgcaagacttgttttttgacatttgtatcgcagagtcaagtggagaatttatgggccctgccttttgttggcatcatgggcgtttcgtgataacttagatttggcccaaaaagtaataagcaattcgtttggaaagcaaccaaattgggaatcatataaaaagactctgtcgaccaaagtcagttatcagtcaacgttcgttctcgaccagacagaaatcagccaacatgttcaagtttgtgagtggctcacaggacatttatgaactcgccatctaattggtatcatttcctctatccaggtgatgattctcgccgttgtgggagtggctaccgccctagccccagtttcccgctccgatgatgtacacgctgatgtcctttcccgatcggacgacgttcgtgccgacggattcgactccagcctgcacacctcaaacggaatcgagcaggccgccagcggtgatgcccatggcaacatccacggcaacttcggctggatctcacccgagggcgagcacgttgaggtaaagtacgtcgcgaatgaaaacggataccagccctcgggagcctggatccccactcctcctccaatcccagaggccatcgcccgcgccgttgcctggctggagtctcaccccccagcacccgagcacccccgtcatcactaggactcgtcacccggatcccggaccactccacggactgttctcccgaaacaaatcgcccaagttgtttagctgtacttcttgactttcaaaaaaatacatgcacttgcttatagcagtaaaaatgtgtgtgttcttcattgcactttttaggtagttcctgtaataatacgagcttttatacctctaccttcgctgggaatgcttccttctaccttttatattcgattcactaaatccatttatcaaaaatgagtatatgtgtccataaagaaaagatgtgctgaattaaaaattaattttgtcttttaaaatttgagaaggatctgggcagtctaaaagatctgaaaaacaaaaaagcaaatgtttgcatacaattttattctcactaaaagtctcaatgcattttttttttattttaagtagtatttaaaagccaattagagaagccaataccaatggacaaacttattgaaatagaaaagcaatggtcaatgccacacgagccgattaccctagtatatactcgtagtactaatcccgtggattgccatgcgatgctttttaatgggtgtggggtatcttcatagtcaacccagatttcagagcaccaatcgtatgaaagatgtagcgtattgacttgggttcagttttggtggttatcagtcaacgttcgttctcgagcaaacagaaattggaatctaaaatgttcatgctcgtgagtaacggcaggatacgaacgtattcaatgtctatgctctcgttcacgtggtgatctgtgcagtttttggattgagtggctcatcccccatcccccatccgtaggacgtttcgaaagtgacaacgccgatgtccactaccaatcatacgatgtttataccgatggattcgattccagcagtctgcacatattcaacggaatcgagcgggccgccaaagcagatatcgatggtatttttcagggcactataaaatggatcacccccgagggcgatcacgtcgaggtcacgtacgacgctggtgagaacggataccaggcttcgatcagccttgattccgactcctgcaccaatcccgaaggcgttccactgaccggtacccgagcatccgcaccatcaccaagac

SEQ ID NO: 1241 - DNA, 534 bp, DROSOPHILA
ttcgttctcgaccagacagaaatcagccaacatgttcaagtttgtgatgattctcgccgttgtgggagtggctaccgccctagccccagtttcccgctccgatgatgtacacgctgatgtcctttcccgatcggacgacgttcgtgccgacggattcgactccagcctgcacacctcaaacggaatcgagcaggccgccagcggtgatgcccatggcaacatccacggcaacttcggctggatctcacccgagggcgagcacgttgaggtaaagtacgtcgcgaatgaaaacggataccagccctcgggagcctggatccccactcctcctccaatcccagaggccatcgcccgcgccgttgcctggctggagtctcaccccccagcacccgagcacccccgtcatcactaggactcgtcacccggatcccggaccactccacggactgttctcccgaaacaaatcgcccaagttgtttagctgtacttcttgactttcaaaaaaatacatgcacttgcttatagcagtaaaaa

SEQ ID NO: 1242 - protein, 126 aa, DROSOPHILA
MFKFVMILAVVGVATALAPVSRSDDVHADVLSRSDDVRADGFDSSLHTSNGIEQAASGDAHGNIHGNFGWISPEGEHVEVKYVANENGYQPSGAWIPTPPPIPEAIARAVAWLESHPPAPEHPRHH

SEQ ID NO: 1243 - DNA, 4121 bp, DROSOPHILA
agccatttggcctaggaataacattttttcatgatttagcgttgttgtacgagctgaatttggtatgtgctagataaaaaccagccgttaagcaatttcaaatgtcgggacacgggtgaaataagcatttgccacccgcagtcagttccgagcaggggatgtcttggatgccccgttgcgagcaaccgcttagcaaaaggcaaagccagatattatatgttatcaccagcgatgtattactgcttctacagcacagtgactcaatatacaaataaaggtgagaaaaaaatgcgattctcctttttttgacttgtgcaagagcttttgattttggaaacgaaacgtagcccagagagacagggtatggcgttccgttgtatttcgtgttagataaatcataaagcaaaaataatttaatacacttgcgtgccctggttgtagctctggcgacgaggcgtatgtgcaatgcggcgtgtcggttaatcatttgcttcttttatgagcagccaagccgaataataagcctcaaagaaaagcgagcttaaaggtgcacctcaaactctgttaaattcacggcctatcacgacggcacgacccaacgctcaacgccaactcattatttcccctgcagctctaattagagtcaaatataactagggggccttgaggaccccgtacgctagccttggccatatttaatgcgagctgaaaggtccgcgagttatgcaaatttgccccgcccaccgaatgctccgaacattgacaaaattatgcgcaatcgcgggccagtctctcggctaccaacttccggcgacaaagtcaagtcatggatggacatcctgacctcgcccgcgggtccagccattagtcgtcattaaagatgattgaatgcgagccccgcttttgcattgtataaaaggggcacactcctggtgacaacagggtaggtaaagttgccttggcgtcagttggcagtttgggaaaagcctacacacttaatatttcgatagatacacttatttcgcaatcgtagaagataccacaaatctctcttccgtaaattataagtatgtccaagagggtgagcatcatgttgcccgacgaaatacctgcggctccgtcaggcagcaggaggaacccgatgcccagccgcacactcaaaagttccattaaaagtggatcaagcgctcggacgcaacccgcaccgccagtgttcgtggttgtcaacccggagagcagccaaagctcgcttacctcgggtcagcggaacaacaccagcacgaccagcaacagttcccttaaccaacgaaataaggagcactccgcggcgaggttgtcagtaaccgaagatacggcagccctggacagcagtgccttgcttcaaggtggatcctcaaactctcgtgatacagttaacttcgattcgacctccacctcgatcaggatgttccttaagaacacagtgggccttgtcagggcaggagagtccttcacatctgtaaaacatctctttcacaagttcatcaaacgcagcggttctgtgccaaattccaagcgttcgttgacatcctcctgctcccaggcggtagatgaggaaaatccctatatgagcaagtccaatgatacgcttctgacggactcgcccacccgcactactgtgcccagcacctcccagataacgcccacctcacatttctccaactgctcattcaataacacgaactacgacctttccaacctcctctctgacatcacccctttgactggctacacgccagtgggtctcactgaggaggctgactaccgaacagacacttccgcaaacaccgcattgaacagtgtgacatgcaatttggcgagctcgtcggagaatcctttgggaagcggattcgacaacagtccctcgaagatttctaccgatcaggagaagatagcggacacacaaggacgtcctacttccagaaatcgctttagcagcaaatcttttcgccagaaacttaagacctcgcgctctagttcacccagaaagtcgcccaagatgtcacctcgaaataagcagtcagcacctgcaatggaacccatatttgcaatggttagttcatctgggcctaactcttctgagggatcacggcgatcgagcaaatcgagcctgaggcggaagcaaagtccattacccaacgtaactgccaaaatctcggccacctctaattcaagagcggacttggctaaagcgcccaagtccaggaaagaaaccaccgcccgatcaaacctatcaagaaagagctaccgccggagttcacccagaagccgaagtcgaggttctcgggcaaacgccttagagagcccccttcaaaagagcgaggacacccccgacaatgtagagtacgccttcgctctggtcagccctgaggaggcggggaacagtcagcctgaagaaagtagtgccggtgtcgaggatgcctcctccaagtgcgagacataccaaaaggattgcaattgccaccattgccaggacatgcgtcgggcggtcaagaggtccgactttttcaaatctcccgagggacagaagcggctagaggcgaagctactggccaagaacttcttcatggacctatgcgtagcgtcagaagtgcgccgacaggctcagtccgatctgcatggaaaacgacgtcctccatcagcgcgtctcagttacccggtgagcatctgtggagcgtgcaggctgagcggaggctcgctgtcgttgcattggatcacccatgaccttgacagcgtagaccacttcgacgtttttgtggacaacgtgccaaaccgtagtgtctacaaccggcaggccacctccaccgtgctcgtcgacgtgaacaccaccgagacgcacacgctgcgcctacgagcggtgccggagcgtgggagccgtggtcaggattcctcggtggacaaattcatgtcggaggtggcggccgggcatatgcgtcacgtcaggcagggccagctcttcgccacgtgcttcgcgcacctggacgcccggccgcaacagcgttcactggtggatttctggacggacagcgagttcttgtacatgcccacccgcgaaactcttacgccttcaaaggctcgctgactggcgaaaataaactgatttatgagcagcagtccgttttgggagtggatatgcggcaggaacagctgcgtgggtgaaaattgattaggctaatttagaagtgatgaccaatcggcgcactaaactctcagtgcaaaagcagtggcccggctcccacctgcaccacgttttgcgagatattcaaaacgaatcgtgggcctggtgcggccatcagtcaacgagacatgggcgctaagcatcccgcgcgtctttatcagtggcttgcaggcaggctggcttggcgtggggggactggtactgacgaaggcgtttcgcgctgatctgtcagagattttgggccgcaaagtggcatgattaattatttggcaaatatttggattccgcgctctcagctcagctggcttcaccatggaaataaggaaaaccaaaaatatgcggactggcactttcatagaggaaagaacgggcgagaaacccaaaccgttcagtattttaattaattttcactttcgttggggactagtgagcattccatcgacaatgtgatggacagctgtggcagcagtgccaacagtgctccctcgagaatcagaatctcccgtccacgattcactgggcgcgttctgattgaagcgttttgcatttactttgttttggtttcccttggcgcgtgattggttccgaaataaacaggggcctacttttattatttggataattttcaattatcgctgttatttcccgaagtcagcagttcatgctttcagccctctctagatatatcaatacgtatttatacgtacatatctacatgttgccacgcggcgaaaacacagtttttatggtcgcatctcgcggccactttcaattactttttattatcaggtccacgttcccccctcaacgcatttttatgtgctggaagcagttggctaaatattttaattgatttcatgtggtccacgccagccatttggccaggactcagcccgatcagaat

SEQ ID NO: 1244 - DNA, 2121 bp, DROSOPHILA
atttcgatagatacacttatttcgcaatcgtagaagataccacaaatctctcttccgtaaattataagtatgtccaagagggtgagcatcatgttgcccgacgaaatacctgcggctccgtcaggcagcaggaggaacccgatgcccagccgcacactcaaaagttccattaaaagtggatcaagcgctcggacgcaacccgcaccgccagtgttcgtggttgtcaacccggagagcagccaaagctcgcttacctcgggtcagcggaacaacaccagcacgaccagcaacagttcccttaaccaacgaaataaggagcactccgcggcgaggttgtcagtaaccgaagatacggcagccctggacagcagtgccttgcttcaaggtggatcctcaaactctcgtgatacagttaacttcgattcgacctccacctcgatcaggatgttccttaagaacacagtgggccttgtcagggcaggagagtccttcacatctgtaaaacatctctttcacaagttcatcaaacgcagcggttctgtgccaaattccaagcgttcgttgacatcctcctgctcccaggcggtagatgaggaaaatccctatatgagcaagtccaatgatacgcttctgacggactcgcccacccgcactactgtgcccagcacctcccagataacgcccacctcacatttctccaactgctcattcaataacacgaactacgacctttccaacctcctctctgacatcacccctttgactggctacacgccagtgggtctcactgaggaggctgactaccgaacagacacttccgcaaacaccgcattgaacagtgtgacatgcaatttggcgagctcgtcggagaatcctttgggaagcggattcgacaacagtccctcgaagatttctaccgatcaggagaagatagcggacacacaaggacgtcctacttccagaaatcgctttagcagcaaatcttttcgccagaaacttaagacctcgcgctctagttcacccagaaagtcgcccaagatgtcacctcgaaataagcagtcagcacctgcaatggaacccatatttgcaatggttagttcatctgggcctaactcttctgagggatcacggcgatcgagcaaatcgagcctgaggcggaagcaaagtccattacccaacgtaactgccaaaatctcggccacctctaattcaagagcggacttggctaaagcgcccaagtccaggaaagaaaccaccgcccgatcaaacctatcaagaaagagctaccgccggagttcacccagaagccgaagtcgaggttctcgggcaaacgccttagagagcccccttcaaaagagcgaggacacccccgacaatgtagagtacgccttcgctctggtcagccctgaggaggcggggaacagtcagcctgaagaaagtagtgccggtgtcgaggatgcctcctccaagtgcgagacataccaaaaggattgcaattgccaccattgccaggacatgcgtcgggcggtcaagaggtccgactttttcaaatctcccgagggacagaagcggctagaggcgaagctactggccaagaacttcttcatggacctatgcgtagcgtcagaagtgcgccgacaggctcagtccgatctgcatggaaaacgacgtcctccatcagcgcgtctcagttacccggtgagcatctgtggagcgtgcaggctgagcggaggctcgctgtcgttgcattggatcacccatgaccttgacagcgtagaccacttcgacgtttttgtggacaacgtgccaaaccgtagtgtctacaaccggcaggccacctccaccgtgctcgtcgacgtgaacaccaccgagacgcacacgctgcgcctacgagcggtgccggagcgtgggagccgtggtcaggattcctcggtggacaaattcatgtcggaggtggcggccgggcatatgcgtcacgtcaggcagggccagctcttcgccacgtgcttcgcgcacctggacgcccggccgcaacagcgttcactggtggatttctggacggacagcgagttcttgtacatgcccacccgcgaaactcttacgccttcaaaggctcgctga

SEQ ID NO: 1245 - protein, 683 aa, DROSOPHILA
MSKRVSIMLPDEIPAAPSGSRRNPMPSRTLKSSIKSGSSARTQPAPPVFVVVNPESSQSSLTSGQRNNTSTTSNSSLNQRNKEHSAARLSVTEDTAALDSSALLQGGSSNSRDTVNFDSTSTSIRMFLKNTVGLVRAGESFTSVKHLFHKFIKRSGSVPNSKRSLTSSCSQAVDEENPYMSKSNDTLLTDSPTRTTVPSTSQITPTSHFSNCSFNNTNYDLSNLLSDITPLTGYTPVGLTEEADYRTDTSANTALNSVTCNLASSSENPLGSGFDNSPSKISTDQEKIADTQGRPTSRNRFSSKSFRQKLKTSRSSSPRKSPKMSPRNKQSAPAMEPIFAMVSSSGPNSSEGSRRSSKSSLRRKQSPLPNVTAKISATSNSRADLAKAPKSRKETTARSNLSRKSYRRSSPRSRSRGSRANALESPLQKSEDTPDNVEYAFALVSPEEAGNSQPEESSAGVEDASSKCETYQKDCNCHHCQDMRRAVKRSDFFKSPEGQKRLEAKLLAKNFFMDLCVASEVRRQAQSDLHGKRRPPSARLSYPVSICGACRLSGGSLSLHWITHDLDSVDHFDVFVDNVPNRSVYNRQATSTVLVDVNTTETHTLRLRAVPERGSRGQDSSVDKFMSEVAAGHMRHVRQGQLFATCFAHLDARPQQRSLVDFWTDSEFLYMPTRETLTPSKAR

SEQ ID NO: 1246 - DNA, 7083 bp, DROSOPHILA
atgcatagaggttaaacatatagtggccagtacacgaatccaccagcttgttcgtcttgaaggtgacataatcataaaggagttaatataatattatagccatctaagagtacgttgcaaatttgggttctagaaagcgagccgtatattcccctttcaattgcacgttcttaatccgtatcgctgaaaataaaacacggctaatctaggctaatatactcaaagttaagcgatagttaaaccttatcaattggttattttaaagacccctcagttcgatcgatcgtaaaaatcaattgggagcccattcagtagaagcgcgtaggtcgatcccgaaagaagtcggcagtcttcttttcgtggggtgagtttttcagagtcagccatataactaacatatagcaaattccatgcaattatacattcaaatgtcgaggacttggagtgcgaaattctcttgtttgcaggggtcaaagtgcgcacttgtttacctacgggtataagcacccaagtggcccaatctcgtactcccgatctgcggaaactaacgatatgataagctatcagcggattatttaaagcatgcagaacgggcaaaaccaagaatacacctagcaaaaaggggagaccttttattaagatgaaaactaagtgaacggtcggtagtctactgtgataatatatctaatataattgggcagtcagttatagatagatgtaccttcttagctcagaagaagtttatacccattagttcgaaattcccatcgaacatggatttgtatgagcgaaatggttgaccgcttgagcgactgactgatggattgatggtagctgcgcccccacaagcgcccaaaaaaaaccgagaggccaaagagccgaaaacccattcacagatcaaaacgccgagagccgaagtccccgattcaggttcggcttggaatcgagtgcggcttggttttcagccgaaatggttggctcgatccaaacagtcgagtgccaacttgggcgcaaaacaggcgacgacccaatcccacggctcggtttcgtttcgagatagtttcgttttggaggggagcggttcgaaaaaaaatcaaaaaacaaacggtcgcgttcgtggaaagataaataaatcgaaaaatcaagtgggggccagcatgttttgaaatcggcctttggcatcgacaagcggcaaactgcaactgcaaatgctgcacattatccattaattgggcagataagaagcgtgtgataagcgcacagcgaatataactacggcaattgaagccccaccacgattgaacagtgaatgtgagtgctggagcgaataagccagggtcaggctgcccaaaaaaaaaaggagttcacattgcataaccctcaaaaacaagtaccagcttcccgaaatcagtgcaagtaacctcagatatgtgtgtatagtacatagcctactactcatcttataaaaggctcatcaaacgaaatcttctgtaatttgctcaattggcgcgtttgtccggcgatcagcgtttggcggcccgtatccaagagatacttttccacctccgtatctgtatctttggattgctctcttgctgtagcgagcgttacatttttgagcctccaggcgattgcaaaagtatctggaatctgaaatcgaaatccgcacacgagatacgtgcgccgggccattcgtatctgtatctgtatctttgtatcttgtgctttgtatcttgtgcgatggccctgcagctgatagtcacttcggctctttatggccgagcatatttatttaattttcgttttcaatgtcagccgcgcggtgtgtaaattatgcaaagtgttcggcggattatgggaatcggatcgggtggggtggtcaggtggttgagccactggcactgctttacatgcgcggcaattacccagtcgatttcctacttaacgccttttgcggcaatccgcactgagaacagacaaattctatgtggaacccagtgcgcatacaaaagaagtcgattcatcattaagttcgaaacaaaagcaggcggaaaaaatgggaaacgactttgataggggcaacggtgggggtggtgctaatgcgggagtggaaaaccccaaccacttttggttttaagacgtaccatgttggtcagctgagaagtatctattgttatagcttacccagaatgaggaaggaaaaactaaagatacacggagaattgatttgatttatattataattgaaatatatgcacaagtgacattataaagaacatgtgtattggaattcggagattttcaagaacaccctttctttaatttgaatatttatacgatatcacagctagtggttctattccattgaccgcaactgtacgctagccattgagccgctgaagaagccgcctggtttcgcaactgataaaaaccggttccggagacgctcttcagctgctgataagagatgtcccgtctgttttattcaactgcgattcggctgcttgcattgttattattattattattgttattgttattgctactcggcgcgttattgttattgtcagtgggtctgccggaggtcacgcccgcctcaatctcgaagtgcgattgcgaacggttgcggagcatttgcatttgtccgctttatctataaccgattgacggatgacggccaagtggatcggattggatccagctgtccaactgtcaatcgatggctgctttcatcacctttgcgttttgttgcagatacttgcaacacatgatttgagttgccaaatacgagcggggtatcttcatttctgcgcatttaagttggctgggaaagattgcagatacttataagacaatcacccggaaaaacaactaatcaaaagattgaagtgaagggtatacagctaatttcaaacaaaatactcaagtataaagtcaaatgtattttaatgtttcaaattagtttaacacctattaatttacagcctcactgattcattaatttcattattaggctataagtaattaagcaaacatactgaaaactcacagatactcatactttttgcataggattttagcttaattgcccaaaatgcggttaaacatattttttaattatatcgtggtagctgaatgctaactgctatttgacatgatcgttcgaaaattgtgactagttttatcatggttagttggttagtacttttgccaaagataaactgtttaaattgctataataaataacccgtttttatttaggataggggtgttaccatacgattcattaataaattgataaacatttaagacttatcgtatttgttatatttccagatttaagttaagtgctccatttaacaatggctaatagcaagatggccttcttggcctttctggccgtaagtttcctgtgtggattggttagtgccacctacaaagtgggcgtgggccgcgcggatatcacaggacctccagtggagatcaatttcgtaagcataattaagggtcttcttacagttaagtgatctatatctcgacttttcactgatagatgggctatgccaacatcaagcaagtgggtcgtggcatccacacccgtgtctttgcccgtgcctttgtggtggaggatgaaaagggcaaccgagtggccttcgtgagcgcagatgccggaatgatgggctacggattgaagagggaggtgataaaacgactccaggcacgttatggcaacatctaccacaatgataatgtggccatcagtggcacccacacgcacggtgctcctggcggattcctgatgcatctgctctatgacatctccattctgggctttgtgcctcagacgtttgaggtgatggctcagggactgtatctggtgggttttgacattcaactgaatttgtacggaaacgaaataactaatttatataatagtgcatcaaaagggcgacggacaacctggtggatggtcgcatcttgctgtccaaaactactgtgctaaatgttaacatcaatcgttcgccctcatcctacttgaggaatcccgccgaggagcgtgcccaatacgagcacgatacggataagacactgacccagctgcgatttgtcgacctggaaaacaacctcctgggcgctttcaactggtatgcggtgcatgccacctccatgaacaataccaacagactggtgaccagcgacaatgtgggttatgccgccctgctcctggaaaaggagtacaatccgaacaagatgcccggaaagggcaagttcgtgggtgccttctgctcatccaaccttggcgatgtgtcccccaatataatgggtcccaagtgctcgatctccggcaatgagtgtgatctactgacctcccgttgtcccactggcgagggagattgctttgcctccggacccggtaaggatatgttcgaaagcacccagatcttgggtcaacgtctggcggatgctgctctgggactgctcaacgaacagagccaggagtccacggcacgggaggtcactggagatgtgaggttcatccaccagtttgtggacatgcccaactacaatggcagcacctacaatccgctgagcaggaaggtcgacaagatcaggggatgtcagccggccatgggctatagctttgctgctggtaccaccgatggacctggagccttcagcttcgagcagggaaccaccacggacaaccccatgtggaactttgtgcgcgacttcatcgctgctcccacgcaggaggacatcaagtgccatgagcccaagcccattcttctggccaccggcagggtgagtttttccattaatcaattattattaactaaaaagcaagtctgaaaaaaaacaatagcgattttaaaagaatttctgaaattgcctaaaggtatgcagcacaaaaatcattccatttgtttggaactttgttgagtgttgtgtgcatcagaaaataaatttaaatgtgtttaatagtgcaaaggaacaaaataccaattttggaatagaatacataaatttatgtagtggattttgtttttataatgcacatttaagtggggtaattaaactgaaacgttacgcaaattagttgtcagctcataaaaatcaaggtaaggtagttatagccaggctataggtcatcacttaatgcgcaactgttatttaaaaatctaagtgcactttaagcatatctaacatgtacattatccatatttaaggccacctttccctatgagtggcagccaaagattgtctcggatcagctactaaagatcggcgatgtgatcatagccgccgtgccctgcgagttcaccacaatggcaggacgtcgtctgcgaaaccagattcgagcagctgcctccgccgtcggaggcatcgacaccgaggtaatcatcgccggactgaccaacatatacaccagctacacggtgaccccggaggagtaccaggcgcagcgttacgaggccgcctccacgatcttcggtccccatacccactccatttacatggacgtcttcgaacgcctgaccaaggccatgatgcgtaatgagaccgtggatgcgggtccaagtccgccgtacatgaatgatgtgatgctatcgctgaacaccggggttctcttcgacggacatcccataaacaccgactttggctacgtgaagtcgcagcccaacaaggagtacggcatcaacgagacggtgaaggtcacctacatatccggaaatccgcgtaacaacctcttcaccgagaaaacctacttcaccattgagcgaaagatcaacgaggatcgctggaaggtggcctatacggatgccagctgggagaccaagtaggaagcgccagcttgaggttataaatgttggtacttaataaaatcgttacttttcagaatggtctggcaccgaaccaatacgatcctgggcttcagcgaaatggacatctactgggacatcagtccgcagactcttcccggggaatatcgcattcgccattccggggagtacaagtacatcctgggcggaaagtatccctacgagggactcacgcattccttcaccgttaaggaggactaggattagatatccgtgtggagtgattttataaatattcctggccagacagttgtagggcccatcaaaaacaaaatcaacactgaatccatgtatttatttaccatttgtaagtgacgaaggaaaagctttatttttgcaaacgcgaataaaaaagatgccaaattatgttgaaactaaggagaagtgtttttaattttgatcgaaatggctgttctagtagtcttttgacattgcttcacctttttaccaattacaattcaaattgcccgccaccatatacgatccgcaaacagctgttcgaatgaaatccacaatgctgtacaagtttctctctttcaactctttttctcttttgtggtattaaattgaacttcgaaattcgaaattggtgctcttctcttaaattcgaaacagaaaccagaaattctctctctttctggatctggaagtcggtatttatctatattcgaggcggcagcaaaacaaaatcagttccagtcggtatttctcggcgcgcgcacgcgaattaaacagaaacacaaattatatttttgtagtcaaaactgtgaaaaagggaatttactcctcgggggaccagagaaaacaatccttaaattcgagtctaaacgaaaatatctaaaacaaacgtgatttgtgtgcttccagttagagtgcataaaatgtatctataagatacgaagtgcgggtgggcaatgcaatcgaggtgttctcgttgaattgtaaacaaagaaggcggccagtttcattgacatccattgagatccagcaacaagttcgcataagaaacacagggtaaattaaagaaattccacagatacattttctagaacttctgacgtgttcctcctgccggcatccgtcgtgcactgataacaataatcgagtctttttacttgaatgacgggaatgtgggccatctaaattgaatattcgattttgattagagagaaatgctctgctgcgctgtgacaaaaaaact

SEQ ID NO: 1247 - DNA, 2553 bp, DROSOPHILA
caacttgggcgcaaaacaggcgacgacccaatcccacggctcggtttcgtttcgagatagtttcgttttggaggggagcggttcgaaaaaaaatcaaaaaacaaacggtcgcgttcgtggaaagataaataaatcgaaaaatcaagtgggggccagcatgttttgaaatcggcctttggcatcgacaagcggcaaactgcaactgcaaatgctgcacattatccattaattgggcagataagaagcgtgtgataagcgcacagcgaatataactacggcaattgaagccccaccacgattgaacagtgaatgtgagtgctggagcgaataagccagggtcaggctgcccaaaaaaaaaaggagttcacattgcataaccctcaaaaacaagtaccagcttcccgaaatcagtatttaagttaagtgctccatttaacaatggctaatagcaagatggccttcttggcctttctggccgtaagtttcctgtgtggattggttagtgccacctacaaagtgggcgtgggccgcgcggatatcacaggacctccagtggagatcaatttcatgggctatgccaacatcaagcaagtgggtcgtggcatccacacccgtgtctttgcccgtgcctttgtggtggaggatgaaaagggcaaccgagtggccttcgtgagcgcagatgccggaatgatgggctacggattgaagagggaggtgataaaacgactccaggcacgttatggcaacatctaccacaatgataatgtggccatcagtggcacccacacgcacggtgctcctggcggattcctgatgcatctgctctatgacatctccattctgggctttgtgcctcagacgtttgaggtgatggctcagggactgtatctgtgcatcaaaagggcgacggacaacctggtggatggtcgcatcttgctgtccaaaactactgtgctaaatgttaacatcaatcgttcgccctcatcctacttgaggaatcccgccgaggagcgtgcccaatacgagcacgatacggataagacactgacccagctgcgatttgtcgacctggaaaacaacctcctgggcgctttcaactggtatgcggtgcatgccacctccatgaacaataccaacagactggtgaccagcgacaatgtgggttatgccgccctgctcctggaaaaggagtacaatccgaacaagatgcccggaaagggcaagttcgtgggtgccttctgctcatccaaccttggcgatgtgtcccccaatataatgggtcccaagtgctcgatctccggcaatgagtgtgatctactgacctcccgttgtcccactggcgagggagattgctttgcctccggacccggtaaggatatgttcgaaagcacccagatcttgggtcaacgtctggcggatgctgctctgggactgctcaacgaacagagccaggagtccacggcacgggaggtcactggagatgtgaggttcatccaccagtttgtggacatgcccaactacaatggcagcacctacaatccgctgagcaggaaggtcgacaagatcaggggatgtcagccggccatgggctatagctttgctgctggtaccaccgatggacctggagccttcagcttcgagcagggaaccaccacggacaaccccatgtggaactttgtgcgcgacttcatcgctgctcccacgcaggaggacatcaagtgccatgagcccaagcccattcttctggccaccggcagggccacctttccctatgagtggcagccaaagattgtctcggatcagctactaaagatcggcgatgtgatcatagccgccgtgccctgcgagttcaccacaatggcaggacgtcgtctgcgaaaccagattcgagcagctgcctccgccgtcggaggcatcgacaccgaggtaatcatcgccggactgaccaacatatacaccagctacacggtgaccccggaggagtaccaggcgcagcgttacgaggccgcctccacgatcttcggtccccatacccactccatttacatggacgtcttcgaacgcctgaccaaggccatgatgcgtaatgagaccgtggatgcgggtccaagtccgccgtacatgaatgatgtgatgctatcgctgaacaccggggttctcttcgacggacatcccataaacaccgactttggctacgtgaagtcgcagcccaacaaggagtacggcatcaacgagacggtgaaggtcacctacatatccggaaatccgcgtaacaacctcttcaccgagaaaacctacttcaccattgagcgaaagatcaacgaggatcgctggaaggtggcctatacggatgccagctgggagaccaaaatggtctggcaccgaaccaatacgatcctgggcttcagcgaaatggacatctactgggacatcagtccgcagactcttcccggggaatatcgcattcgccattccggggagtacaagtacatcctgggcggaaagtatccctacgagggactcacgcattccttcaccgttaaggaggactag

SEQ ID NO: 1248 - protein, 704 aa, DROSOPHILA
MANSKMAFLAFLAVSFLCGLVSATYKVGVGRADITGPPVEINFMGYANIKQVGRGIHTRVFARAFVVEDEKGNRVAFVSADAGMMGYGLKREVIKRLQARYGNIYHNDNVAISGTHTHGAPGGFLMHLLYDISILGFVPQTFEVMAQGLYLCIKRATDNLVDGRILLSKTTVLNVNINRSPSSYLRNPAEERAQYEHDTDKTLTQLRFVDLENNLLGAFNWYAVHATSMNNTNRLVTSDNVGYAALLLEKEYNPNKMPGKGKFVGAFCSSNLGDVSPNIMGPKCSISGNECDLLTSRCPTGEGDCFASGPGKDMFESTQILGQRLADAALGLLNEQSQESTAREVTGDVRFIHQFVDMPNYNGSTYNPLSRKVDKIRGCQPAMGYSFAAGTTDGPGAFSFEQGTTTDNPMWNFVRDFIAAPTQEDIKCHEPKPILLATGRATFPYEWQPKIVSDQLLKIGDVIIAAVPCEFTTMAGRRLRNQIRAAASAVGGIDTEVIIAGLTNIYTSYTVTPEEYQAQRYEAASTIFGPHTHSIYMDVFERLTKAMMRNETVDAGPSPPYMNDVMLSLNTGVLFDGHPINTDFGYVKSQPNKEYGINETVKVTYISGNPRNNLFTEKTYFTIERKINEDRWKVAYTDASWETKMVWHRTNTILGFSEMDIYWDISPQTLPGEYRIRHSGEYKYILGGKYPYEGLTHSFTVKED

SEQ ID NO: 1249 - DNA, 4940 bp, DROSOPHILA
tgttccataaatccaggacgcaactggatgcgtagatttatatggaagaggagagtaggggggagggtaaacaaatcgattcacttggagaccccgtgtgccaggtaacatatactactacatgctatatattgtagatataccatctatatgtatacatatgtatgtacccactaattggaatggccgtggctgatgaaaagcagacgcacccggttaatcgggctgtttcactttgatcggtccagttttctcggcttccccggatctccatctccgctggtcccacattccgggctccaatggccaacagacgccattttcgaccgcccatctcactccctcttgtggcggaggtggtggccgccgctacactgagcgcaaatgctaattcaaattttgtaagaaaaatcaatataaatttaatgacaatttgcgagcttgaactttataacaaagttgcagagctttcgagagaagattactcgagttaactctttaagatgctgaccttgacattgacattcgatcacacattatatatataatatattagttgggttctttccaaaaggaccataagttttgatatatagtgtagtattatatagtagcggttaataaaacataggcaattaattaaattaaatcgttaagcaagagccggcgataacctttcgcatcgagtgaagcttaaaccgtgagagaaatgtgcgaatcgagagcacaaaaagcggggagagcgggagacatgggcgggtatattggggggctaaaatttccaaaaataataattaattgtttctacaaatactaatacctttaaatgaataaacgaaatgaataacctggtcatcgctaaaagtttactatgatactatttaatgggtatcaaaaactacactacttatattacccccttttagaaagtagttttgcttacgctcctggtcataaaaataaaagcaccaagctttagtcagctgtgcaaaagctgccggagaatcaggtaaaagccaaagcgagttaaggcaaaaagacagccaactgttgccacttcagcggtgtggaaattagaaagtaatatagtccgtgtttttcacgcaatcatggacctgaaacagcgcacatatctcctggtgaccggtgcatcacgtggaattggccgtgagttcgcccagcagttagccaaacggatcaaagccgagggttccatggtgacgcttctgggacgcaatcaaacccttttgcaggagtctaaggcagagattgtcgccacagtgccagatctatccgtgcaaacctattcgctggagctggaaacggccaaaacggaggactttaccaagattctggaggcatccggtggaaagaacaatttcgagcgagccatagtcattcataatgccggcacagtgggcgatacgtcaaagagggccaaagaaatcggagataccgacttcctacagcgctactaccactccaatgtcttctcggccatttcgctaaactgcgagtttatgcgcgtcttcaagggaatcccaaagttggtggttaatctcagcaccttggcagccattgcacctatatcctcgatggcacactattgcacggtgaaggcagcccgtgagatgtacttccgagtgctggccaccgaggagtccgccgaggacaccctggtgttgaactacgcgcccggcgtcatagacacacagatgaccgtccaggttcagcgagaggcccacgatcccgccgtggtcgccatgtttcgagagcaaagggagtccaagaccatgctgactcccgcccaaacgacggagcgattcatcaaagtcctggaagcattcaagttcaagtccggcgatcatgtggattacagggatgagcagttctagctagttaatcagtatgttgctatctgtggtaatggggtttttcgtattgaaacattaaaatgaaactaaaaatgtgcgcaagtgtttttgctacaacacccaatacatcttaatgaacttcaaagctgataagatatgtgtatgatgtttatgatttacgcattcttaaatcttctttccaacaactcggcatctatttataagaaatatacaattcgtaacaacactgtgggactatgtatagtattctctaatgaaattaaacatgaataatgtagctgggttatgggtaatgttatgtactaaaagaaatcggctgcagtgcgtcgtttagtgggtatcttgagcagatcgtccgtgagcgtggatcccgtatcaatggtaacgttcttagccggagtgctaatcttggcctgctgtttgggtttgggttcacccagtattggcgtattggtgctcctcaccacgccgggcgtaacctttcgttttctgccgctcatcggcgatggtgtgtgccttaatcggggcgtgccgcggatacccagcttacccgtggccagtagctgcgctgccggcgacatgctggccagccgttccatattggtgcgtatcagtggtgagccaatgttacgacgcgccgtatccagagccatttgtttttgatttcgcatcctttcgctgaccctttcggccaaagcgatggcgatgttttcgcgccgagagttctcattaatccggaacgagggtccttgtgtgggccgcaatggggtatcgcctccgtccaggcgaaagggagtgccatcgatctcaccccaggtcattatgggcgagaaagcctctccgggtcgcggtgatggtgaacgcaacaaatcgaagccgcgtaccttcggagtagctgtggcaccaccagccccattttggggcacttcatcattcagctttttagtgtccatttcgcgatgctttgcctcatcgggcagcctggtggcattgtgttggatgctctgcttccgttcggccaactggacgcgctcctcctctgtgtactccacgccatcgggcacgtacataatggaattcatgttggtgtagttccaggtttcgatctttctcagcggatctggctcctcgaattgcgtttctatgctgggcagcattagggcccgctgcagttgctctgcggagagcttctcatggttgtacagtactgcgtatttttggcgcagcttggcctcggccgtttcgatgatctcctgaaagctctggttatcctcgctggtgtacttctgcagaaaggcgtccagcgatagcttcgcggtggtgtccctgccctcggcatcgctcttctcggagccgtccgtggaaaatggtgtgtctgtggcccgggaatttggcaatggggtgttgctacatttcgcctgactcactggtgtctcaaatgtggccggggacatggctgaaatgaaggaattcaaaaagttaatgggtctatctattgaacttggccaatgtataatttcatcagacttgatttcaagtaagatagtagcagacagcgatgtgccagtggtgttcatccaattgagtacaatacccaccattattccgtcggctggtgcttcttcctgtcccggaaatcctgcccagactgtagcgctcccgaatctcggccatttgtacaaagtcgcgccgtgactccgcgtccaggtagtcgttttgggcacgcagccgctccagatcgggaaagaagtcgcgctggatgatcttagacatctcctcgatgtacttctcctcggtaaggatctttggcttgttcttgtggcgcaccatcgccgtgggctttttaaactcggcgagtgctgaattctggacgcgggccacttccatggccaggctgccgggagtgccaggtgtccccggtgtggcaggtgttctagtcgtggcgctcattgccgtttatatctcgcttttttcgtaaataactttgttttgtttagatataaaaagtgaatatttttgtctgccagcaaagtgtgaccgttttaagtttcactcagaataacaaaacgtcggttcaaaatatttccctgtatttttttttaattctcggatgtaaaaggtgaaattaatcagcttaaaagtttcgacttcctttacaataaattggtgagtatgaaccaatttaaatttaaatagaaacaaaatgatattttgctaaactatattaattaaaaactctggcaaggagtacttatcgacgtgttatcgataagtgtggaacgcattcaaatgcgcgctagcatttgaattgaaattttaatgcgattagctagcacttgaaaatgaaatttattacgattttgcaaacattaaagatatatttttaaaacatctggaagtttcgcaagtgcgctgactaacccgctgaacataatttatgaaaatgaatgtatgccaaagagcgacaactttagcgtcgtgaatcatttcaaaacacttttttttctcaactcaccaatagaattactgttgtcgtggtgccttatcgtaaagctgtaggtatatatgaatagggtataaagctcggcaaaactcaaatcactcattgaaccttttctactcccttagttctggttcagctccgtaaccagtcgcaacattcgatcgtcgtgaaattagttacatcagttatcagccatgaagttttacctgttggtgattgcagccctctcgtttttggcctacatcagttgtggtaaatgttgtacctgcctaaatgttgttccaaaataagtttcacttttaattttcatcgggatcgtatttttttttttttaattttctttttgctctttgaattgaaaaacttattgagtgttttatataaggtgtgataagcggtgatatcatggacacggaaataaattcatgataagctatcaataggcgagtttccaaagaaacttttaaaggttcttagctttgtaactgggcaaacatattcttttttttctaagtgtgagtgagccagcaaaaagatgtgaa

SEQ ID NO: 1250 - DNA, 2798 bp, DROSOPHILA
taaaacggtcacactttgctggcagacaaaaatattcactttttatatctaaacaaaacaaagttatttacgaaaaaagcgagatataaacggcaatgagcgccacgactagaacacctgccacaccggggacacctggcactcccggcagcctggccatggaagtggcccgcgtccagaattcagcactcgccgagtttaaaaagcccacggcgatggtgcgccacaagaacaagccaaagatccttaccgaggagaagtacatcgaggagatgtctaagatcatccagcgcgacttctttcccgatctggagcggctgcgtgcccaaaacgactacctggacgcggagtcacggcgcgactttgtacaaatggccgagattcgggagcgctacagtctgggcaggatttccgggacaggaagaagcaccagccgacggaataatgccatgtccccggccacatttgagacaccagtgagtcaggcgaaatgtagcaacaccccattgccaaattcccgggccacagacacaccattttccacggacggctccgagaagagcgatgccgagggcagggacaccaccgcgaagctatcgctggacgcctttctgcagaagtacaccagcgaggataaccagagctttcaggagatcatcgaaacggccgaggccaagctgcgccaaaaatacgcagtactgtacaaccatgagaagctctccgcagagcaactgcagcgggccctaatgctgcccagcatagaaacgcaattcgaggagccagatccgctgagaaagatcgaaacctggaactacaccaacatgaattccattatgtacgtgcccgatggcgtggagtacacagaggaggagcgcgtccagttggccgaacggaagcagagcatccaacacaatgccaccaggctgcccgatgaggcaaagcatcgcgaaatggacactaaaaagctgaatgatgaagtgccccaaaatggggctggtggtgccacagctactccgaaggtacgcggcttcgatttgttgcgttcaccatcaccgcgacccggagaggctttctcgcccataatgacctggggtgagatcgatggcactccctttcgcctggacggaggcgataccccattgcggcccacacaaggaccctcgttccggattaatgagaactctcggcgcgaaaacatcgccatcgctttggccgaaagggtcagcgaaaggatgcgaaatcaaaaacaaatggctctggatacggcgcgtcgtaacattggctcaccactgatacgcaccaatatggaacggctggccagcatgtcgccggcagcgcagctactggccacgggtaagctgggtatccgcggcacgccccgattaaggcacacaccatcgccgatgagcggcagaaaacgaaaggttacgcccggcgtggtgaggagcaccaatacgccaatactgggtgaacccaaacccaaacagcaggccaagattagcactccggctaagaacgttaccattgatacgggatccacgctcacggacgatctgctcaagatacccactaaacgacgcactgcagccgatttcttttagtacataacattacccataacccagctacattattcatgtttaatttcattagagaatactatacatagtcccacagtgttgttacgaattgtatatttcttataaatagatgccgagttgttggaaagaagatttaagaatgcgtaaatcataaacatcatacacatatcttatcagctttgaagttcattaagatgtattgggtgttgtagcaaaaacacttgcgcacatttttagtttcattttaatgtttcaatacgaaaaaccccattaccacagatagcaacatactgattaactagctagaactgctcatccctgtaatccacatgatcgccggacttgaacttgaatgcttccaggactttgatgaatcgctccgtcgtttgggcgggagtcagcatggtcttggactccctttgctctcgaaacatggcgaccacggcgggatcgtgggcctctcgctgaacctggacggtcatctgtgtgtctatgacgccgggcgcgtagttcaacaccagggtgtcctcggcggactcctcggtggccagcactcggaagtacatctcacgggctgccttcaccgtgcaatagtgtgccatcgaggatataggtgcaatggctgccaaggtgctgagattaaccaccaactttgggattcccttgaagacgcgcataaactcgcagtttagcgaaatggccgagaagacattggagtggtagtagcgctgtaggaagtcggtatctccgatttctttggccctctttgacgtatcgcccactgtgccggcattatgaatgactatggctcgctcgaaattgttctttccaccggatgcctccagaatcttggtaaagtcctccgttttggccgtttccagctccagcgaataggtttgcacggatagatctggcactgtggcgacaatctctgccttagactcctgcaaaagggtttgattgcgtcccagaagcgtcaccatggaaccctcggctttgatccgtttggctaactgctgggcgaactcacggccaattccacgtgatgcaccggtcaccaggagatatgtgcgctgtttcaggtccatgattgcgtgaaaaacacggactatattactttctaatttccacaccgctgaagtggcaacagttggctgtctttttgccttaactcgctttggcttttacctgattctc

SEQ ID NO: 1251 - protein, 501 aa, DROSOPHILA
MSATTRTPATPGTPGTPGSLAMEVARVQNSALAEFKKPTAMVRHKNKPKILTEEKYIEEMSKIIQRDFFPDLERLRAQNDYLDAESRRDFVQMAEIRERYSLGRISGTGRSTSRRNNAMSPATFETPVSQAKCSNTPLPNSRATDTPFSTDGSEKSDAEGRDTTAKLSLDAFLQKYTSEDNQSFQEIIETAEAKLRQKYAVLYNHEKLSAEQLQRALMLPSIETQFEEPDPLRKIETWNYTNMNSIMYVPDGVEYTEEERVQLAERKQSIQHNATRLPDEAKHREMDTKKLNDEVPQNGAGGATATPKVRGFDLLRSPSPRPGEAFSPIMTWGEIDGTPFRLDGGDTPLRPTQGPSFRINENSRRENIAIALAERVSERMRNQKQMALDTARRNIGSPLIRTNMERLASMSPAAQLLATGKLGIRGTPRLRHTPSPMSGRKRKVTPGVVRSTNTPILGEPKPKQQAKISTPAKNVTIDTGSTLTDDLLKIPTKRRTAADFF

SEQ ID NO: 1252 - DNA, 4026 bp, DROSOPHILA
tcccctttcaccctccggccgaacagacgacctgaacgccatcctcaacactattaacacggccataacttacgtaaatattgcggttatggactattatccgctgatcatatacgagaagaaccaccactattggccgtttatcgacgacgctctgcgaaaggcggctgtagaacggggcgtggctgtgaagctccttatttcgtggtggaagcactcgaatcccagtgaggaccggtatctcaggtcactgcaggacttggcatccaaagaagacaaaattgatatacaaattcgtcgattcatagtgccgactgattcgagccaggagaagattccctttggccgtgtcaaccacaacaagtacatggttacagatcgagtggcttacatcggaacttctaactggagtggagactacttcacggacaccgctggcattggactggtgctaagcgaaaccttcgagaccgagaccactaataccttaagaagcgatctgcggaatgttttcgagcgggactggaatagcaagtacgccacaccgctggtataatcgcacaacgttgtaatgtgattattccgatgccaatgttattttaactattttagctcccgacaattgttcaatcctattcattgcttttattcagttttgatcatgcgtgaattcaaataatacgcgaatttacgaattggaataatgcaagtatttaaagtatggagatacagtgagcttgaaatcataacgtaataaaattcattctttcatatcctgctcgcagtcacatagtttccttctgatttgtaacatgtgtacaaactgcctaactcggcactaacccagctgcctggctagtcactaaatatatgttaaatactctttgcaactacatataacatttgcacttaataaatgttgggcgaacgcctttgtcgtcttcgtgataatcgctatccatcaaaaggagcatgggtataacagaggccagctcctcaatcacttaacatgggcaccccgcctgagaaagttattgctggcgatgctcttttcgataaccgcttgtatgaaggacacgcgttcaatgagcgtgttgtagatcagcatcaaacaccgcgcatcgatggctgttaagtagaaaattagtcttgctacattcaatcaaaaggcctatccctgactcacctgcataaagaatctgctcgcgacgcagcggtctattggcccagtttgagcactggtttgatttgttcagtttcttgccaaggcatgccaatgagagatccgtaagggcgtctcctgcccggttaacattgccgaagggaagttcaacgccgaagcgctgcttttttaactccaaccagagattgcgaaggtccaagtagtggtgaggcatttgaaggcgcagttgcaggggcagtgaccgctgcaatacactgagatcactgaccatagagaaccccaccttacggatgttcacgttattaaagatattcgcgcccagcaagcgccagtgttccgagcgtaagctctcccgcgccaggcaatcgatcaggtagacattgtggccggtggcgatctgtagcacgcacagctgattgtctccgcacacgctctgcatccattcagaatccaggtatatgacgcactcctgctgcagatggtataacatacgatcgaactcatcagccttgttcacaatgataaggcactcgtcgggcaggtccatggtcaggtacatatcacatctactcgaaggacagcgttccttgccgggggattcccagcctgacgcttttccagcaccgttttgcgatacctgcgtctcgatctccaacggacaatctttcgggtcaatattgaactccgtgtaccagtagatggcttcagaatgagctccagcagaggccaaatactttacgaagtccgtgcgcagctcgtggttaaaggcatggacgctcacaacctcccggaaactggccaggttcatgcgcgtcttctcgtactcgcggtaaaggtaatgcaagtagctgcacgtcttcgtgaacttatagttgggcgtgacggcgtcgtcaaaaccatacttcttggccagtcgcgccacaatcttggccataggccgatagctgagcacgttatgggaaattttgagatttttgtaccgactgcaagtgaagatagaattagatgaattgcaagaccagtttttcaaatacatactcgagtagatgctcgcagagctctaaaaccgacttctccttgtgcagcaacgaatccaagaacttgacaaagggcaacctctgctgtgtggcatggtccagatattcctcggccagtggtagtttctcaattgcaatcagcgggaaagccagttccagcatgtcgaactcgtgcgtcaactgcagactgatggaccattgggtgacctctttgtaaagcccgttgtccaggagttcgcgcaacttgggaagcagtaggtcgcggatctgacgtagactgtaggcatggataacagcattgttgagggccagcaagccggaggtcttgacaaagttaaaggctatcatgctggtgttgggatcacagccctcgccaagatgcgggaaatccttgtggagcttgcaaaccgtgtccagcacaaaatgtgacaagctcttcgtcttgatgttgctgctgtctgggcagttggcgaagatcttcagggccaggagcaaaggatcctgatggcccattaaagcccttccaaattcctggcgcagatgtggcgactttttcttgctatacatgttccacttctcgcggaacagcttaaaaaactcctccgcctttgcgtccaaggtggcgtcaaagttacagccgtcgattccagcacctgtcgtgatgtcctccaagcgcttgatcttcaggttgctcattaggttctccatgttctcctcgtccgactcaaagccggcgggtattgcgttgtacatgtggctcttgcgtgccatttctcacgggtttcccgtgccactgcagagcgaagcaagtgcaattgccaattgcaaatgcaattgacggtaaaggcgaacaaacttcgatggaaatatcgatttcaaaaacatcgatgtttcagtgaccgcccaaaacaacaccaaacgtcagcagaaaccgccaaaagttatagatttttttaaagcaagattatttttttcgcagattaatgccttgttgctagaaagctatatatatatatatatatattaatattaaatatatatttataattagcaattttttatacagtgaacaaggtacatgaaatccgccggtgcaaaattatttacaatttttactttgattggaaaatttatttattaaatttgcttggaaatacggcaatcatttgtattgcaggattgaaatccaaagaacaactatttgataaaagtctagctaaaataataagtattatagttattctaactgtgttgcctttgaagtccaactggcaaatgagttaatgagtttttattttaattaaattgttaaaacttgcctatttttactatagctgtatttagctctattttcctaacgcattggcagcactgcccacaattcagcagcgtggcagccccgttgaacagcacacgtgcatttttgttttagtttgcacgttgaaaaatgaagctggctacgaaaaaaattaagaccctgggcaaatccaagcctgacctaagcaaaaagaagcccgccaaggatgccatcaggaagacgaaaccgcaaacaacctctgaaacgaaagttactccaagaaacccgaagcagaaagtcgccgaaccagtgaagaatgggaagaccacaaaaaagggatttaagaaatcccacaaagaggagcttgaagggcttaaagatatagacccagaattttatgatttcttaaaaaataatgataagaagctactggactttaatttactggacacagatgatgatgatgatgaagagggggatgaggaagacaaggaagatacggtaactaa

SEQ ID NO: 1253 - DNA, 1913 bp, DROSOPHILA
cttcgctctgcagtggcacgggaaacccgtgagaaatggcacgcaagagccacatgtacaacgcaatacccgccggctttgagtcggacgaggagaacatggagaacctaatgagcaacctgaagatcaagcgcttggaggacatcacgacaggtgctggaatcgacggctgtaactttgacgccaccttggacgcaaaggcggaggagttttttaagctgttccgcgagaagtggaacatgtatagcaagaaaaagtcgccacatctgcgccaggaatttggaagggctttaatgggccatcaggatcctttgctcctggccctgaagatcttcgccaactgcccagacagcagcaacatcaagacgaagagcttgtcacattttgtgctggacacggtttgcaagctccacaaggatttcccgcatcttggcgagggctgtgatcccaacaccagcatgatagcctttaactttgtcaagacctccggcttgctggccctcaacaatgctgttatccatgcctacagtctacgtcagatccgcgacctactgcttcccaagttgcgcgaactcctggacaacgggctttacaaagaggtcacccaatggtccatcagtctgcagttgacgcacgagttcgacatgctggaactggctttcccgctgattgcaattgagaaactaccactggccgaggaatatctggaccatgccacacagcagaggttgccctttgtcaagttcttggattcgttgctgcacaaggagaagtcggttttagagctctgcgagcatctactcgatcggtacaaaaatctcaaaatttcccataacgtgctcagctatcggcctatggccaagattgtggcgcgactggccaagaagtatggttttgacgacgccgtcacgcccaactataagttcacgaagacgtgcagctacttgcattacctttaccgcgagtacgagaagacgcgcatgaacctggccagtttccgggaggttgtgagcgtccatgcctttaaccacgagctgcgcacggacttcgtaaagtatttggcctctgctggagctcattctgaagccatctactggtacacggagttcaatattgacccgaaagattgtccgttggagatcgagacgcaggtatcgcaaaacggtgctggaaaagcgtcaggctgggaatcccccggcaaggaacgctgtccttcgagtagatgtgatatgtacctgaccatggacctgcccgacgagtgccttatcattgtgaacaaggctgatgagttcgatcgtatgttataccatctgcagcaggagtgcgtcatatacctggattctgaatggatgcagagcgtgtgcggagacaatcagctgtgcgtgctacagatcgccaccggccacaatgtctacctgatcgattgcctggcgcgggagagcttacgctcggaacactggcgcttgctgggcgcgaatatctttaataacgtgaacatccgtaaggtggggttctctatggtcagtgatctcagtgtattgcagcggtcactgcccctgcaactgcgccttcaaatgcctcaccactacttggaccttcgcaatctctggttggagttaaaaaagcagcgcttcggcgttgaacttcccttcggcaatgttaaccgggcaggagacgcccttacggatctctcattggcatgccttggcaagaaactgaacaaatcaaaccagtgctcaaactgggccaatagaccgctgcgtcgcgagcagattctttatgcagccatcgatgcgcggtgtttgatgctgatctacaacacgctcattgaacgcgtgtccttcatacaagcggttatcgaaaagagcatcgccagcaataactttctcaggcggggtgcccatgttaagtga

SEQ ID NO: 1254 - protein, 625 aa, DROSOPHILA
MARKSHMYNAIPAGFESDEENMENLMSNLKIKRLEDITTGAGIDGCNFDATLDAKAEEFFKLFREKWNMYSKKKSPHLRQEFGRALMGHQDPLLLALKIFANCPDSSNIKTKSLSHFVLDTVCKLHKDFPHLGEGCDPNTSMIAFNFVKTSGLLALNNAVIHAYSLRQIRDLLLPKLRELLDNGLYKEVTQWSISLQLTHEFDMLELAFPLIAIEKLPLAEEYLDHATQQRLPFVKFLDSLLHKEKSVLELCEHLLDRYKNLKISHNVLSYRPMAKIVARLAKKYGFDDAVTPNYKFTKTCSYLHYLYREYEKTRMNLASFREVVSVHAFNHELRTDFVKYLASAGAHSEAIYWYTEFNIDPKDCPLEIETQVSQNGAGKASGWESPGKERCPSSRCDMYLTMDLPDECLIIVNKADEFDRMLYHLQQECVIYLDSEWMQSVCGDNQLCVLQIATGHNVYLIDCLARESLRSEHWRLLGANIFNNVNIRKVGFSMVSDLSVLQRSLPLQLRLQMPHHYLDLRNLWLELKKQRFGVELPFGNVNRAGDALTDLSLACLGKKLNKSNQCSNWANRPLRREQILYAAIDARCLMLIYNTLIERVSFIQAVIEKSIASNNFLRRGAHVK

SEQ ID NO: 1255 - DNA, 3647 bp, DROSOPHILA
acttctgtgaacacgtccactcgattgctcatctcccatgcgaatgaagaaattcatagaaaacacgtagcctgttaagttcggtgtctaaaagtgtgcagagattttagaaagtcttagtcctgactttttggcccagcattgcatgcttttagttgccttcttttaattactggcactttcaatgctttcaaaacgatatgagcaatgtaatttgacttgtgaatattggttcactttttatcctactatgctctgggtctagctcaacaaacaaccgatgggcgtggccgggggcggggcggaagtgcggccatattgtgttgagaaacgacacgaaaaaacaacacaaatgggtctcgccctcgaggcaagtgacaggctttctgtcacccaaccactcatctcgcactccccctgccagttgctcctgctcccggtggcacacatgtgtcgtgagatgcaaatttaaattcctgtcgccgacaggacctcaaaagttgaggtcgcagtggaggcggaggttaaagtcggattctacgacaactgacgggcagaacttattagtggggagccgggttaaatgatagcctggacctggacgcaaatgaataaataagtgagcagcttgcaaactttggaaacaatccaatcgacttgatggcccagcagtcccagtaactcaggaagttcgaggtcaggtggtaaactttcaaagaaactgtggcatactttggggccgagcctcgttggctcgctgggtttgggtatcgtatcgcacttaaggcccatttagaccctgatgaattaattgtgcggccggtcaagtgcaaaactcttgactttaaataatgtgctgtttgtttattcaagtagttatgacccgtttaatggttcagtcgctttgatgttctttagttgcaggttgaagagtttgtataggagtttttctgttcaaatgggaagttgttattaaggccagtatttttatttctttcaggcaacatagagagcgcgctgacaatgaccaacgagctgctccaactgctgccccaccacgagagagccaatggaaacaagcggttctacgagaaggagattgcccagcagctgcagttgcggaaaatgaagggcgacgatggcaccgatgaaatgcccaagtccgatttggtaagtaaaaggtaaccgtacccaaagattcctacgacttagataacccaattgcagcccgtggccaagagtgacccggccatctttgatatgacagaacgaagggcttacgagatgttgtgcagaggcgaactaaagccatcaccatcggatctgcgatccctgcgatgtcgctatgtcaccaacagagtgcccttcctgcgtctgggtcccctgaaattggaggaggttcacgcggatccgtacattgtgatctatcacgatgccatgtacgacagcgagatcgatctgatcaagcggatggcccgcccgcgattccgcagggccacggtccagaactccgtgaccggagccttggagacggcgaactacaggatcagcaagtccgcctggctaaagacccaggaggatcgggtgattgagactgtagtgcagcgcactgcagacatgactggcttggatatggactccgccgaggagctgcaggtggtaaactacggcattggaggtcattacgagccgcactttgattttgccagggtgagtttccgagtttcctccattagttacataccttaaataaagtagaaaaaccttattaaaatgcgttttaatcctttctagaaagaggagcagcgcgcctttgagggtctcaatctgggcaaccgcattgccaccgttctattctatgtaagttgctttcactccgttttaagtataataatccgatgtgtacgcgtgtttttttttcgtatttatatgcatgcgcacatcccacacacaaatggtaaaactctgtgcatttttacattatttgcccaagccagcagaatcattagtgaggcttatttatatagagatatgcgtaggttgcaatgccagtgaatgaaattccaaagccgggaatgcaaaagaacgcacagtggctgagaaacatatacaaaaaccaaggcaaccttacaaatgtggcttctcatttataatagatacttttattttgctcaccaagctattgtaagtcggtgctcaatggtgctgctttgaattggtaaacaaaactaattggttttacaaaaatatgtgtgctgtttaaagattaatgtaatcatatagcatcatcatattaacttttccctacttcccttttttcctccttattctcagatgagtgatgtggagcagggaggagccactgtcttcacatccctgcacaccgctctgtttcccaagaagggaacggctgctttttggatgaatctccatagagatggacagggcgacgtgaggacccgccatgccgcctgtcccgtactcacaggcaccaagtggggtgagttctgcgccatttactagtcaccatagattaatctttaccatattcactggcgcagtgtccaacaagtggatccacgagcggggacaggagttccgcagaccctgcgacttggaggaggatcacggcgagttcgccatctaatccggagtctagtatgcgtatgcaacgaatctttagtgcgaaatctcatccttcgtcatcggccatcgacttcctattgtaaataaagcactcaggccgaagaaggtcgcatctgttctacttatcggttcatcgtacatgggaaccaacttcaacctagctgtatcctagactcgtatggaatttatctacttttgtatatttgcctagtttaagtagtacaaaaaaaatgcaataaattcgaattggaaatcaaacatgttgatatacatattggcaggattggcaggctaaagctggtagaaaatgctataaacagtagtaatctaaaatatagcatttagcttcttaaactaatgaaattgttgtttaaatctgtatactgtaagtatctactcaccagtggaaggaaaaactcgaaattgaaaggacatcaacggcaggggggcactccgatccggctctgatgttcgattagtgggtggcgatttatcagccggaggactcatccatcaagtgcgccaagtggagctccggctgcatcagctgttagccgatacaaggggtttttgtgcgggtgagtaaataccaatcggattattcttgcggcatatgcctcactgcgttgcatactttgcggtgctccggaaaccaactatcgaatttggcctgaaatgtgaaaaggccaagggaggcgaaaaatggccggccattttgcattcggtattagccaaaataaaatatattagcctgaattttaactaggatgataggatgtactggctaagctgtcatttataataaaaaagttggtttcaacggaagcctattataatagacgaaaattgtgagtgaaagctgttatcagttcatcgtggccaaataaatacaaacatcatttaaagtcgtaactggttatcggcacaaattcagtttgatttataatagttcttaacagatttcttgggtacattggcatttttttttgtaccgtataact

SEQ ID NO: 1256 - DNA, 986 bp, DROSOPHILA
gcaacatagagagcgcgctgacaatgaccaacgagctgctccaactgctgccccaccacgagagagccaatggaaacaagcggttctacgagaaggagattgcccagcagctgcagttgcggaaaatgaagggcgacgatggcaccgatgaaatgcccaagtccgatttgataacccaattgcagcccgtggccaagagtgacccggccatctttgatatgacagaacgaagggcttacgagatgttgtgcagaggcgaactaaagccatcaccatcggatctgcgatccctgcgatgtcgctatgtcaccaacagagtgcccttcctgcgtctgggtcccctgaaattggaggaggttcacgcggatccgtacattgtgatctatcacgatgccatgtacgacagcgagatcgatctgatcaagcggatggcccgcccgcgattccgcagggccacggtccagaactccgtgaccggagccttggagacggcgaactacaggatcagcaagtccgcctggctaaagacccaggaggatcgggtgattgagactgtagtgcagcgcactgcagacatgactggcttggatatggactccgccgaggagctgcaggtggtaaactacggcattggaggtcattacgagccgcactttgattttgccaggaaagaggagcagcgcgcctttgagggtctcaatctgggcaaccgcattgccaccgttctattctatatgagtgatgtggagcagggaggagccactgtcttcacatccctgcacaccgctctgtttcccaagaagggaacggctgctttttggatgaatctccatagagatggacagggcgacgtgaggacccgccatgccgcctgtcccgtactcacaggcaccaagtgggtgtccaacaagtggatccacgagcggggacaggagttccgcagaccctgcgacttggaggaggatcacggcgagttcgccatctaa

SEQ ID NO: 1257 - protein, 320 aa, DROSOPHILA
MTNELLQLLPHHERANGNKRFYEKEIAQQLQLRKMKGDDGTDEMPKSDLITQLQPVAKSDPAIFDMTERRAYEMLCRGELKPSPSDLRSLRCRYVTNRVPFLRLGPLKLEEVHADPYIVIYHDAMYDSEIDLIKRMARPRFRRATVQNSVTGALETANYRISKSAWLKTQEDRVIETVVQRTADMTGLDMDSAEELQVVNYGIGGHYEPHFDFARKEEQRAFEGLNLGNRIATVLFYMSDVEQGGATVFTSLHTALFPKKGTAAFWMNLHRDGQGDVRTRHAACPVLTGTKWVSNKWIHERGQEFRRPCDLEEDHGEFAI

SEQ ID NO: 1258 - DNA, 5067 bp, DROSOPHILA
gtaaagaaactgcagcgtgcctcccttaaggatcccgtaaaggtagaggtgtctaacaagtatcagacggttgagcagctgcagcaatcatatttgtttatccctgtcaaatacaaggatgtgtatttggttcatatccttaatgagctggcaggcaacagtttcatgatattttgcagcacctgcaacaacacggttaagacagcgttaatgcttcgtgcgttgggattggctgctattccgctgcacggtcaaatgtcgcaaaacaagcgactagctgctttaaacaaattcaaggccaaaaaccggtcaatactcatttcgacggacgtggcgtcccgcggcttggacattcctcatgtggatgtcgtcgttaatttcgacataccaacgcacagcaaagactacattcaccgcgtgggaagaacagcaagagcaggtcgctccggcaaagccataaccctcgtgagccagtacgacattgagttgtatcagcgcatcgaacatctactggggaagcaactgacactgtataagtgcgaggaggatgaggtgatggcccttcaagaacgagtagccgaagcacagcgcactgcaaaactggagctgaaggatctggaagatacaaggggtggtcacaagaggggcggggacacccacgatgattcggagaacttcacgggcgcacgcaaacgcatgaaaccgatgggcggcactggcggtggtggaagaaagagctttggcaaaaagaattggagcaagggcaagcagaagagataggtcagatcagtctcgatttttattagtgctactctaagaataatgtaataaaagttttaaatagaaagtataacgcaaattttactttattgatatttgtaataatcaaataggaacaataatttgataacttaatttattcaattatgtgcatcaataatgaagagattatgatatatgtcaagtatatgttagatacttttcattcattttcatttgcttaatcaaaattatgtatattgatcgcatattcattggaataatgaaagctagggtttggcaaatatccaaaattaggaactgtggtgtgtggaggctgaatagcagcaggtggtgcaagaaacgaggccgctcctggcggcccctggcttgcgctcgcactttcattatgcatgtagctgtagcttttcgatgcgttgcttaaaatcgacataatagtttcgttggtacgaatagaatttggatggagggtgatcaacttaagggcgtttgcaaatttatctgagcagtctacggaggatttaagtatggtaatcaagttcttatggggtatctcaaagttataatccttgtccagctgagttagcttatcgcaataatcctcccagttggcgttggacagaatatttagagtcgttagcatcagatcccgatatttgtgagctttgcatggcaaccacacatgctccattatccttttcactgcctctttctgcataccgcacttactgagagcttcatagacgtgtgccagtaggggagctgaaatgcttttgtacaagcggcagtcgaccagcatgattagcagatactgccagagattgcgaaatttgaagatatccacgaacgaggtgtagtaggtctgaaacaggaaaaagcttcgtatcgtttgtcggtataggctcagcaaagtgtcctcgtccatcctcatcagtcgtttctgtacttcacccaaactgttcatcgtatgatcacaattaatagagatgcatttgttgtctacactttgcatgcaccttatcccaaacacatctttgatccaattaacaccatcttggttggaggtggaaaagtatacttgtggtataacctgttggctgttggcgctgaccagagtagctgccgattctggtgctacacgatatagtggagcaaatactgggaatgtttctttggcccgtcgggcagcagttgcttcgtcccgttggttacgattggattcagctaagggttgatgcactagtgaaggcggcgcaggctttgccaacaccttattcttttccaactcttcattctcgtagatggaacgcatcacggagggctgtgtcttcagatttttagcattaagtttaggaatttgaaacgattttatgctttgcattttttgtgcgttttctttttcgattggcttaagtgtttctgtggaaggctcgggtttgggtaactgctctgcagttttcgcttccttcctcggttcgtcctcaggcacattctcatcgtcgagtccattccaggaggcagccaccgagagcacatcatcatcgtcgtactcatagtccaacttttcattttctcccataaagatgtccattaaatcgaatttgtgtacctccactgtcgatggtcttgtcatattctctaagaacttgctggtatggaccagctgggtatcgatctcgacgctggcttccttgccgtccacgggactaggtaattctatggcgaaacccagtggctgacccacttgcattttgtttggggaatagtcttgtgatctctgggctggcatcaacgttttggcgcttatctgcggtaacaaaaggaagttattaggtgacgttaaaaccataatgctgcttactaattttacgctattgttccttatattgtttggcgacaagctactttggacttgagatgtctgctgtccagatgcttctgagatggttttggcctgctcacttatcatttcgtgagttgattgcttgtcctgagtctttaaacctgtttgcaattgaggtaacgttttttttccctgaggaggggctctaactcgtggtttctgctgtttggcagattttttaactgattttcgaaggggctctgctacttgcttgcctagatcggttaaattagttaatattgatggctcccatgtgagctgctctttcttattttgtgcgggacgttctccttttagctttactttctcaggagcaggactacaatcttcattgcgagaaaggaaaagggtattcagtttattgcttttcatcttttgcgacaattctgaaagcggcagttggtcatcagagtcgtcgcttgattccgtgtactcgttattgagcagaaatggcggtggagtctggggctgctgtttattcttaggcttgtccattattttattatgtactttctcggtttttttctttaagcattgtaaactatatctgggaacacgcttgattattttgcctggagaagctttgtaatcttgcgtctgaccaacagaatgtccacgttgcgttattttagacgcactgttgggacttaatataagaacatttggaagagcacatgaatttttcgtcaagtttggagcattggtctctctggtcttgaaaatatttttgttgggagcacaagcacgtggttctcggtttttgcgcgaatcatcagttggtgcacatgtatctggccgcttcttcgtacttgagagtttatctctgcgcttggaaatttgagctttggagaaaatggaagtcgtatgattattactccgcttccagattttagcatatttggagttaccaggatttttatacttagaatttttattcgaaacacttggagatctttctccattaccaggatcacaacctgttgaacctgttgaatgtgacttgctgggactcggatgttcacgcggcgcggtggaattgatgggttccaggaaaacaggggactctggaagtgtggaccccggtccatgcgggttttcttgcagggctttcctcggtctgaccaagagctcctttctcagcggtatgctcggatcctgttagttgataagaacaaatattaaacgagtagttctcggataaaattttcagaattcttacgcagctggtttggatacagtagggctttctccaactttcgaggaaccccttgaaaaaagtattccattcctgctctgtcttggaactcgtccccaacgtggtcagaatatgctgccagcaggacagtttttggctcatccttattttgtccaacttttccatgatcacgccatgtgtgcttgcgcattaactttaacagttcataccagtgtgaccgtgaggtcgggtaagcggtagttaaataccagaaggtcctatcaaaaggctttttgccattatgtaaacaaacttaactgtgttgcccatctcctaatttatttacaatttttaaaaccaaatattgtgaatacacaatttgtatccttgagttattctgacatcactcacatgtgtccgtacacatccataaaagttacggttttttttcgttgagattatctgtaaaggaatatttcttgaaaaagtaaagcaaaaaatctaccacatccacgagttggatttaaaacaaaaagagaaggttttgttcttcaaactattggaagcgtttggtcagttcccaagaagcgaaagtttcccagaattggagcttagggctctcaagcgacaaacctaaaaccaaagcctttgcctaatcgcttagaggcgttagccttaaggaattgccgttaatgggtaattcactcaagttcggtaagtactgcaattggctttaaagcaacatagaagagaaagcgcaccaaaatcaagcatcatcataagtgagtaaaggataaaggttaattaaatgaaaaagctcacaaaaagtagcttcaatctcgtggaaccgagaaccggccaaaatttggggtacaacaaaaaagaataggcaaataaggggaaactaataaagctcgaatagcggaagaaaatagaaatcgatgacaaagtcttgtaattcgcaagcgcgccaattccttgtgaaatgtgagcaatgttgaatatcgattaagttgaatatcgaattgccaacgatctggcaacattgtactcttgtttcatatcatatcgcatcatattcttatctacagctgtgttcataaaaatagcagtgcttgggacctgcgagtttaagataaaaaaatcatatgattttaagttttaatgtgtaatctttttttataatatc

SEQ ID NO: 1259 - DNA, 3003 bp, DROSOPHILA
atcatggaaaagttggacaaaataaggatgagccaaaaactgtcctgctggcagcatattctgaccacgttggggacgagttccaagacagagcaggaatggaatacttttttcaaggggttcctcgaaagttggagaaagccctactgtatccaaaccagctgcgatccgagcataccgctgagaaaggagctcttggtcagaccgaggaaagccctgcaagaaaacccgcatggaccggggtccacacttccagagtcccctgttttcctggaacccatcaattccaccgcgccgcgtgaacatccgagtcccagcaagtcacattcaacaggttcaacaggttgtgatcctggtaatggagaaagatctccaagtgtttcgaataaaaattctaagtataaaaatcctggtaactccaaatatgctaaaatctggaagcggagtaataatcatacgacttccattttctccaaagctcaaatttccaagcgcagagataaactctcaagtacgaagaagcggccagatacatgtgcaccaactgatgattcgcgcaaaaaccgagaaccacgtgcttgtgctcccaacaaaaatattttcaagaccagagagaccaatgctccaaacttgacgaaaaattcatgtgctcttccaaatgttcttatattaagtcccaacagtgcgtctaaaataacgcaacgtggacattctgttggtcagacgcaagattacaaagcttctccaggcaaaataatcaagcgtgttcccagatatagtttacaatgcttaaagaaaaaaaccgagaaagtacataataaaataatggacaagcctaagaataaacagcagccccagactccaccgccatttctgctcaataacgagtacacggaatcaagcgacgactctgatgaccaactgccgctttcagaattgtcgcaaaagatgaaaagcaataaactgaatacccttttcctttctcgcaatgaagattgtagtcctgctcctgagaaagtaaagctaaaaggagaacgtcccgcacaaaataagaaagagcagctcacatgggagccatcaatattaactaatttaaccgatctaggcaagcaagtagcagagccccttcgaaaatcagttaaaaaatctgccaaacagcagaaaccacgagttagagcccctcctcagggaaaaaaaacgttacctcaattgcaaacaggtttaaagactcaggacaagcaatcaactcacgaaatgataagtgagcaggccaaaaccatctcagaagcatctggacagcagacatctcaagtccaaagtagcttgtcgccaaacaatataaggaacaatagcgtaaaattagtaagcagcattatggttttaacgtcacctaataacttccttttgttaccgcagataagcgccaaaacgttgatgccagcccagagatcacaagactattccccaaacaaaatgcaagtgggtcagccactgggtttcgccatagaattacctagtcccgtggacggcaaggaagccagcgtcgagatcgatacccagctggtccataccagcaagttcttagagaatatgacaagaccatcgacagtggaggtacacaaattcgatttaatggacatctttatgggagaaaatgaaaagttggactatgagtacgacgatgatgatgtgctctcggtggctgcctcctggaatggactcgacgatgagaatgtgcctgaggacgaaccgaggaaggaagcgaaaactgcagagcagttacccaaacccgagccttccacagaaacacttaagccaatcgaaaaagaaaacgcacaaaaaatgcaaagcataaaatcgtttcaaattcctaaacttaatgctaaaaatctgaagacacagccctccgtgatgcgttccatctacgagaatgaagagttggaaaagaataaggtgttggcaaagcctgcgccgccttcactagtgcatcaacccttagctgaatccaatcgtaaccaacgggacgaagcaactgctgcccgacgggccaaagaaacattcccagtatttgctccactatatcgtgtagcaccagaatcggcagctactctggtcagcgccaacagccaacaggttataccacaagtatacttttccacctccaaccaagatggtgttaattggatcaaagatgtgtttgggataaggtgcatgcaaagtgtagacaacaaatgcatctctattaattgtgatcatacgatgaacagtttgggtgaagtacagaaacgactgatgaggatggacgaggacactttgctgagcctataccgacaaacgatacgaagctttttcctgtttcagacctactacacctcgttcgtggatatcttcaaatttcgcaatctctggcagtatctgctaatcatgctggtcgactgccgcttgtacaaaagcatttcagctcccctactggcacacgtctatgaagctctcagtaagtgcggtatgcagaaagaggcagtgaaaaggataatggagcatgtgtggttgccatgcaaagctcacaaatatcgggatctgatgctaacgactctaaatattctgtccaacgccaactgggaggattattgcgataagctaactcagctggacaaggattataactttgagataccccataagaacttgattaccatacttaaatcctccgtagactgctcagataaatttgcaaacgcccttaagttgatcaccctccatccaaattctattcgtaccaacgaaactattatgtcgattttaagcaacgcatcgaaaagctacagctacatgcataatgaaagtgcgagcgcaagccaggggccgccaggagcggcctcgtttcttgcaccacctgctgctattcagcctccacacaccacagttcctaattttggatatttgccaaaccctagctttcattattccaatgaatatgcgatcaatatacataattttgattaa

SEQ ID NO: 1260 - protein, 991 aa, DROSOPHILA
MSQKLSCWQHILTTLGTSSKTEQEWNTFFKGFLESWRKPYCIQTSCDPSIPLRKELLVRPRKALQENPHGPGSTLPESPVFLEPINSTAPREHPSPSKSHSTGSTGCDPGNGERSPSVSNKNSKYKNPGNSKYAKIWKRSNNHTTSIFSKAQISKRRDKLSSTKKRPDTCAPTDDSRKNREPRACAPNKNIFKTRETNAPNLTKNSCALPNVLILSPNSASKITQRGHSVGQTQDYKASPGKIIKRVPRYSLQCLKKKTEKVHNKIMDKPKNKQQPQTPPPFLLNNEYTESSDDSDDQLPLSELSQKMKSNKLNTLFLSRNEDCSPAPEKVKLKGERPAQNKKEQLTWEPSILTNLTDLGKQVAEPLRKSVKKSAKQQKPRVRAPPQGKKTLPQLQTGLKTQDKQSTHEMISEQAKTISEASGQQTSQVQSSLSPNNIRNNSVKLVSSIMVLTSPNNFLLLPQISAKTLMPAQRSQDYSPNKMQVGQPLGFAIELPSPVDGKEASVEIDTQLVHTSKFLENMTRPSTVEVHKFDLMDIFMGENEKLDYEYDDDDVLSVAASWNGLDDENVPEDEPRKEAKTAEQLPKPEPSTETLKPIEKENAQKMQSIKSFQIPKLNAKNLKTQPSVMRSIYENEELEKNKVLAKPAPPSLVHQPLAESNRNQRDEATAARRAKETFPVFAPLYRVAPESAATLVSANSQQVIPQVYFSTSNQDGVNWIKDVFGIRCMQSVDNKCISINCDHTMNSLGEVQKRLMRMDEDTLLSLYRQTIRSFFLFQTYYTSFVDIFKFRNLWQYLLIMLVDCRLYKSISAPLLAHVYEALSKCGMQKEAVKRIMEHVWLPCKAHKYRDLMLTTLNILSNANWEDYCDKLTQLDKDYNFEIPHKNLITILKSSVDCSDKFANALKLITLHPNSIRTNETIMSILSNASKSYSYMHNESASASQGPPGAASFLAPPAAIQPPHTTVPNFGYLPNPSFHYSNEYAINIHNFD

SEQ ID NO: 1261 - DNA, 3750 bp, DROSOPHILA
cataggttctgggatcttgacgttcatacggccggaaagacggacattggtcggaaacgcttccttttacatattacatacttttcaaagaatctagtctacccttttactctacgagtaacgggtataataatgatttttagtattagtccatatgtttaatggaattcatacatatacattcagacatatacatatgtacattaaaaaaaaagagaaaatgccatatgtgagcgctgtcagatgcccgttactcatctgataaatttaaaaacaataaatataccttcatatatatgtatatgtacgtttaaaattgataaggtaaaaagtaaacaaatcatttcccaaaagtgatgacgtgacaggtttggtcgagtcagttttgggtggattgtgggcgttaaagtaggcgtggcaacgggacaacaaacttgctgtacgaatatgtatttgtatagtatctatgtgcttaatctcaacctccttgttttgatagttccagatatcttaacatatgtacatatgtaaaaaaaacttttttgctttgttttaaacagctgattgggtcattgcctgtgttcgatatgattcttggaattgctaattgttaaaatcagcggtgtgaatacttgagatggcttcccaattacgtatgggtaacaaataaatacataacccttgacgaaaacataaatacaaaataaataatatttaaaattatcattcatttgtttatatatacatatatatatatgtatgttgcatgtatgaatggatcggtcaccagaagaaattgttcagaataaaagagagagtaagagcgaaccatatacacgtgttggtgagctaaactcgttcgctttgttgacaacaggaaagatcataaaggcattaaaggtttttggatatgattgggagatatggttatcacccacgtcggagtgcagataacggccaccacggagcgccacagtttcactccagtggtgcggcggaggcttgcgatgagtaagcctccttatcttgggagcgtttttattctgaattctctccgagtctttcagttcagcgagaaccgtcgagcttcacaaagcaactacagcgcagtgcgtgaaagccagtttaagacagaaagctcaacacacgcaaaccggagtcattatgggttggtggagcaagaaaagcgagacggatcgcagtcagcccagccaggaactggtggcgcaggacccgcgcacacgagtccagactacgagtgcagccacggagacgaccaacacagccgtgcaaaactcgaccataacggacaacaacaagcagacggttacctttctcaccacccgccagacggtgacgcacacgcagcgggcgctgatcacggagacgacaacgcgacgcacgcctagtcaggcggagttagaggctctcttcgcaaagataaagatgggcggtgagggacccattggctccaccaccaccactacgacgaccacctcctcgcgctcccgaccgcccagtttgaacggcgtctcctttcgctccacacaacccttcaaagccacggcaagcaatgctggcaaacggtcaagcaccttagtcaagaccgagcagacgacagtgacccaaaagaatgggcgcacggtcacccagcacctggagactcatagagtggacctcaagggaagtcgacctaaggcgacctgggcgtcatttgcgtccactgcaaacagctcaacatccagctacgtctcaccttatcgtcagaagccaagcatggccataacttgcacatctcccaacatcaagacaccaaaaaccactagctccacgtccagttccagtgccagctccattacgagtccgcccaaaccatcatcatctgtatcctccatttcaagcattttcaagtccgctcccaagcaagttgacaagccgctcagttctaccgcaactcccaagcccttcattagtctgggatcgtcaggaggcaccaagccgaaggtcactgccgtcgcgcaatcccaagatgcccagggcacgatttcaacgagcctgggtatctcgaaatcaagcctgaccaagaacaaactcaagcccgcccgggtgtatatcttcaaccacgagcggttcgataacaagaacgaattccgaaagggaagtgcccaggatgtgaaggtcttgcgcgccacctttgagcagctgaagtgcaaagtggaagttattacagatgcaaccctggtcaccattaaaaaaacagtgcgaatgtgtaagaggagaagtgtagtttctcggcttaatcaattaatttttaaattttgcagtgcaaaccaaggactttgaggacaaaagcgctctggtcctcgtgatcctcagtcatggaacgcgccacgaccagatcgcagcaaaggatgacgactactccctggacgacgacgttgtttttcccattttgcgcaataggacgcttaaggacaagcccaagctgattttcgttcaggcctgcaagggcgactgccaactagggggctttatgaccgatgccgcgcagcccaatgggtctccaaatgaaatcctcaagtgctatagcacgtacgagggatttgtatcttttcgcacggaggacggaactccttttattcagacactgtgtgaagctcttaatcgatcggggaagacttcagacatcgacaccataatgatgaatgtgcgtcaagtggttaaaatgcaatccaagtaagaaactccacgtgtttatatatgaccccataaataattattaaactttattttagagaccgccaaattccatctgtcactagcactcttacctctaagtacgtttttggagattatatttgaccatagatcttaaatctaagacacgccattaaatatcaaaattaatatatatgtaaatagcacatggatagatgtatgtacatagtatatagcacatagcgtctggtccacgtagtgacgaagcgtaccagaagaaggtgatatatacgaagaaatgaaaatttgcgatggttgtccgatcttagcttaatataacaatcgagaggtagctcacaaactaaagaggcggtaaaagtgtgaggctaaatattaaaaaaaaattagtctggggtcggaattgttaaaggaaaactattttcggtaaccagaacctgaaaatatgaaaaacttttttttattttggtcgattttttaagaacggtcatcgcatgtaaaatgttaaaccgtgtgcccttgaaattttttaacttttattgtactaaaaattaacgttttaatgttattataaaataaaaacagttattttttctcaataccaatataatgacccattcttaccaataaattaggtatgaccgtttgctaactctaatttagtgtaatggtaccaatgataaatgccatacagctaaaagaatatatgtaacattagttttgtatatatgtatattctacacaaaaatgttttgatgtttcaaccaaattttaagattcatatatatatgcgcattttgttgtagatgattagcgaaaaacatgtttcgaaaaattttaatataccgatattcataaagggcaggcaataatcgaatgactttttggtgatgtaaaatggcaaaatcactgcgcggttctctgaaaatcgctgaatacctacatatgatatctatttgtatacccgttagttgtaagcaaaatatacaaagtatatgaattctttatcaggat

SEQ ID NO: 1262 - DNA, 1695 bp, DROSOPHILA
gcttgcgatgagtaagcctccttatcttgggagcgtttttattctgaattctctccgagtctttcagttcagcgagaaccgtcgagcttcacaaagcaactacagcgcagtgcgtgaaagccagtttaagacagaaagctcaacacacgcaaaccggagtcattatgggttggtggagcaagaaaagcgagacggatcgcagtcagcccagccaggaactggtggcgcaggacccgcgcacacgagtccagactacgagtgcagccacggagacgaccaacacagccgtgcaaaactcgaccataacggacaacaacaagcagacggttacctttctcaccacccgccagacggtgacgcacacgcagcgggcgctgatcacggagacgacaacgcgacgcacgcctagtcaggcggagttagaggctctcttcgcaaagataaagatgggcggtgagggacccattggctccaccaccaccactacgacgaccacctcctcgcgctcccgaccgcccagtttgaacggcgtctcctttcgctccacacaacccttcaaagccacggcaagcaatgctggcaaacggtcaagcaccttagtcaagaccgagcagacgacagtgacccaaaagaatgggcgcacggtcacccagcacctggagactcatagagtggacctcaagggaagtcgacctaaggcgacctgggcgtcatttgcgtccactgcaaacagctcaacatccagctacgtctcaccttatcgtcagaagccaagcatggccataacttgcacatctcccaacatcaagacaccaaaaaccactagctccacgtccagttccagtgccagctccattacgagtccgcccaaaccatcatcatctgtatcctccatttcaagcattttcaagtccgctcccaagcaagttgacaagccgctcagttctaccgcaactcccaagcccttcattagtctgggatcgtcaggaggcaccaagccgaaggtcactgccgtcgcgcaatcccaagatgcccagggcacgatttcaacgagcctgggtatctcgaaatcaagcctgaccaagaacaaactcaagcccgcccgggtgtatatcttcaaccacgagcggttcgataacaagaacgaattccgaaagggaagtgcccaggatgtgaaggtcttgcgcgccacctttgagcagctgaagtgcaaagtggaagttattacagatgcaaccctggtcaccattaaaaaaacagtgcgaatgttgcaaaccaaggactttgaggacaaaagcgctctggtcctcgtgatcctcagtcatggaacgcgccacgaccagatcgcagcaaaggatgacgactactccctggacgacgacgttgtttttcccattttgcgcaataggacgcttaaggacaagcccaagctgattttcgttcaggcctgcaagggcgactgccaactagggggctttatgaccgatgccgcgcagcccaatgggtctccaaatgaaatcctcaagtgctatagcacgtacgagggatttgtatcttttcgcacggaggacggaactccttttattcagacactgtgtgaagctcttaatcgatcggggaagacttcagacatcgacaccataatgatgaatgtgcgtcaagtggttaaaatgcaatccaagtaagaaactccac

SEQ ID NO: 1263 - protein, 506 aa, DROSOPHILA
MGWWSKKSETDRSQPSQELVAQDPRTRVQTTSAATETTNTAVQNSTITDNNKQTVTFLTTRQTVTHTQRALITETTTRRTPSQAELEALFAKIKMGGEGPIGSTTTTTTTTSSRSRPPSLNGVSFRSTQPFKATASNAGKRSSTLVKTEQTTVTQKNGRTVTQHLETHRVDLKGSRPKATWASFASTANSSTSSYVSPYRQKPSMAITCTSPNIKTPKTTSSTSSSSASSITSPPKPSSSVSSISSIFKSAPKQVDKPLSSTATPKPFISLGSSGGTKPKVTAVAQSQDAQGTISTSLGISKSSLTKNKLKPARVYIFNHERFDNKNEFRKGSAQDVKVLRATFEQLKCKVEVITDATLVTIKKTVRMLQTKDFEDKSALVLVILSHGTRHDQIAAKDDDYSLDDDVVFPILRNRTLKDKPKLIFVQACKGDCQLGGFMTDAAQPNGSPNEILKCYSTYEGFVSFRTEDGTPFIQTLCEALNRSGKTSDIDTIMMNVRQVVKMQSK

SEQ ID NO: 1264 - DNA, 9340 bp, DROSOPHILA
acttaaagcgtattaaatagcgctatacggagccacacacattgattgccaacacagattattggatcttggttcgtcgtacggacgtatgactgtgatatatataaagccccgtcagctgacttggccaacaagttgtcccgctccagagagtgaaaagcggtcatttaggcgtggactggatgcgggactgtggatgggggctatgcgtgtgtgtgcgtgacaggcggaaacgtgtagtattatatgcacgacgcaattatgtaataatcatcatgatagtaccttaagccgagcaagtgtaatccgtcagtcagccgaacttaacgaggcgtgatcttctccacccgttcaaggtgcctcctgcccggtcgcttcttctggtcagctttcattgtgacgatggtgggtctatccgcaacgatcgaagctagaccccagaggaatctgcagcacatcgccgtggtggagaatgccgcctgggaaaagacccttccgcagcagttccagaaccccttctacaataccccaagggtgagagatgccctggccagatccagttggtttggacccggcgaggaggtggtgagtgtcaaatgtgattagcttattctgattccccttaaaatatcctcccaattttcctttaggtttatgaccgccaggctgaaaaaattcctcgcatggaaatctacaatgtgttgtctcatgctggtttgataccacgccggcgttttctttaaattatgaatatttcaataccgcatatctgttgtaaaattataaaaataaaagtcagtcattagtgtaggaaaaattgaagtgtgattgtgtggtggtatgtggagccgaattagcaactacattccaacaggtgggaccacctgggtatccaagtaaaaaacacatttttgtaataaaacttgtattatctcgctgtcttatacaaaaatagaagaattaataattggttaggaacaactaaatgatttgtttacgttcaaatcctcagtttcgtcctcaacgccgtgatggtccttaatcgattatcaaggccctgcaggtcagtttctccctcaagcggcaggtccaccagcttttcattttgctccagcagcgttttccgggtgtccagcgtgttccttgcctcctcacccagctcctcgtcctcgtgctccccatcactgtcctggtgccccaccccattgccattgacggttaccccattggtcaaggcggcatcactcgcggcagatgatgagtgcctcgaggtggagtccgccggaataagcagcgatttcacgaattcgccacaaatcaggctcatggcaggcatcgtgtgggcggaaagattgacaaactgtaacacaaaatataacattaattgacattgaccttgctgaagttcaaaaactgtgttactattggctgtgctgcccgatttttttgagagtaaaagtaactagaaaaaatataaagtttttttatacatcaaactaggtagcatgctcaaaaagtgttaaatgataataatgcagtgctcttttaacgattgtgcattaattattgacctcatgtagttgagaactcaatcaatgttagtttacctcttgtagagtactatcacgactgtccgtagcttttaatagggcgaagaaccaacactatcaagtgtgtacgtaaaacttgattttttgggtgtcgagattgcggttcaagttcacgtgattgttgttcggctttctgttttgtcattgctgagtctttaaaatgtgccgagtgatatgtgtctattaaccttcgcgcaagcgcttgtcgcctgtggatatcgttgatccatttcagtgcaaaccaaacaaaattggcaaaaacaatccaagtgcacacatgtctgtcaatttgttaagtggcaagatgcaaaatattattgttttttccaggaagacacacttattgatgactcaaagcgataagcctgagtttagttcagcttcagaaaccgactaaaactggtataaatcgtcgaagaaatacggtaactggcaaaagtaattaaggcaagtagaatattgctcgtagtaacagtgatgtgaaaacttacgacgccgaacaaagcgatcttaattattggcccaacgcaatcgagtgctattggggaaaactaaagtgtcacaagcacgcaatggaaaattctcgcaacaagcttcaatggtaaatataagagaaggggaagagtcggtgggcttaattcatggcacaatggcacaggaattaggaacacttattatgaaataaatgtacgaaacatttagaaaacacgaaaccataatccttatttggtaagtgcacagttataacattgtatatttaagcacagaaaaattcagttttaatttcttagttttacttagctgcgttagatattattttcatgttctccgtaaggtatataatgtattttgttttttttttaactgaaaaccatattttgatataccagaattcaaaaggaaaacttattctataatacataaagtgggaaaactattaattttaatctactgtttaatattgaatctaatgatttaagtatccgtcccactgtgcagtggtgggtggcggttcgtttgcaccagcccctcgttgcccattcacaatgggagcactggcaagtgcacaagtcatcgtggcaaagagcacaaaagagcgagcttcactcgactcacagtaataataaaaaaaaaaataagaatttggagagcggacgaagccgaagcccgtgccgaagccgaagtggatgttcggagccgaagtaccgagctgcgagtataaattgccgagagccgcagcgacagctcaacactttaccgttgtgctccgcagcaacaaccgttagccggaaagaagagagccggaagcgcgtgccgctaaagtttacggaaataaaggcggacaaaggttcatcctcgcctgaaactgacaaagtgccagaatccagattaaacgatttacgagcgactaaaaaaaaaggaaaaacatttcgggcggtgcagtgtgcattgcaaaggcattgcagaactctaagaacacatctcctccgcacccgcatccggaaacggattgggaatatcggaaaatgtggcccaactttttggctgtcgtttccctactgtgccttgcattcttcgcttgggcaaaagctggacctgtgccaattgtgaatgaggtgagcggaagacagggggccgacggggcacggcgaaaacggagtagtacagcagggggcacgaatttggggcaatgactttactcgcattccaaaataaaatggatgccagctgcactctgcaggaagtgcaaactcgctaattaaaagtgggcgtcgagtaccgcgagaactacagagtgcagagtgcactcttaattaaaagattgcgtttgaactcagaacagcgtggggaacaaatccataacaagaaaacattatatggcaagtgaaggttcagcaacataaataatttacgtaacatctgccacacatttcggtgaaacacctacttcaaaactaaacacttgtatttcaaagttattacacgattaaaaacccgaaactgcaaccgaggaaaatgattagaatattttctgctacaactaatatcatgggcctatcatcaatgtatctaactaaatattcttgtatgccatctggaaaacttgccagcatattagtcattagtgtgcctggttgtaaaggataacaaccaggattttcgtgcacgtttgtagcgtgtgtaattaatcttaagttctacatacatataggagagaagactttttatttttaagactcaacgagacagccgtttatataatattccatatgaaaacgatcccttatcaattcccatgaagacttgacccttgatggaataaacaaagtaattaatgtattataaaaataacaactgattaccgcaatgatctttggaaggactaccccaatttcgaggagtcaagttcagctgagtgtttaaatactaaccaatatttttgtctaatcattattttagaattctgggtatcatgtgatagaacgtcttatgtgaagatcacctccgggagatctttgcaaaaaccctaacggcaagagcttaaatctaatattgttcagttgctaggccgctttaactcacacgatttacacaacacacaattgaaaggcggttccaaaaataaaacgcgctttaagaaaactacgttataaatctcaatggaaattatttaaattaagttgaacactgtttgggcgcagataacaaagcacaaaagaaaaccgcaactaaaaaacaaaaggcacaaaagtttggtgactcgtggcgaaacaatttgacgtcatattgagggaaaacaacatgtaaatgccatagaaaccctttccgttgttggtgcgttttcataatattataccgttctttaaaacacaatatttgccaagattaactatatttcccccatataacgactcttccagcaccaacaattgatgccgaaagtgcctcaatggcactgcctgcgctactttaagcatgatgtcctgatgatgcgccgctgtcgccacttgcgagtccctacagcgccacgactgggcgatgtcctcaagcgaaagaagaaatagtataaggcccacagacaatcgtccacaatactcaaaacgactgaaccagaagatcaattaaaagaacattttttaaaggatttctaaccagaccaaagctaaatcaaatatatactaccaaatatacaatttctggaacttagtataagtctaaccaattgtacttcatagttgagtaagatttcaataaaacgactaaatatataaaattgcaaatttgactgggaagatggaagcaaacaatgaggataataaaaatgtaagtatactaaactacggcattgtaggcattttaaaatttaaacttaccgcgttaacggcactgtgttcttcccgtcccacgatcagtggtccgtttttctccaaggattcaccggaagcctgctgcggcttgatcacatggattccgaaagtcgcgtgcttcaaaataatgtctgttgcggcgggctgagaaaaactgatcggtgtaggcgcatcatccgacggactctgacccggtagcgccaggtaagcgatctcctgcgagtgggtcagcattagcagcgttgactgcgcctgccagtcgatattaatagagctctgcctgggctgtctcctaggcaaccaggccaagccatgtgttttgggtagattactgcgctgatagaggggcagcggaacatttggctgaaacacatgcactgaaagattaaaagtaatggaaattaattaaaaaccaaaagaagataacataataaacttacactcatcgtttttagtaattacagccattaagttggtgagcggatcaaaggccaactgacgaacggatagttttaagcccgcctgcaatcgcaacgttagcaaattccatatgagcaccctagattcagtgcagaccgccaccagatgagcctgatccccagctccaaattgcacatgtgaaatctgcgccagcccctgcaagggagccgcgctagcagggatttttttggctttagtgttgggtttactgttgccattcagcttacatttgcctgttttttcctttttcggcttactactctcatccagctttaggacactgaacaggttcataacatcttgtggcactaggttctcgaatttctgccgccgattgttcacatgacttagtcgctgcttagctttgtagcggtgtcgcgtgtgcaggcgatgcagtcggaactccaatttccgaagcctcagcttcgtggcttgtggaatcacagctctttgctggagatgctggaacaacctttgccgatgggccaatgggacagaacattcaactccaaagcgacgcagcagttgcaatttttgatgcaagccgagttccggcattttcattatgtacttaaataccgtctccttggtggtattgtctggttcactcacaagcttggctttggcaggaggacctactatcaaatcctttgcctgctgtattaaattttcatcattactatttagcagcgttttcagcagagcccacaactgctgtctttgctgggtaaattctttcctagcaccattaagtggagtttgggccaatctcagttgagctttggatataacaccatctaagccgggaggacagctgagggtttggagaggaagccgtggattcctcgcatcataaagtgccaaagtgttgccataacccacggccaacagagacccatcctgggaaaaacacaaggaaccaatcggaaggtttcgataactagtctgcgccaggcaactccacatcgttccgcgcttataaatgttttctgaatccgtaatgcaccatactttgaccacgttgtcttcgccagcggtggcgcatcgcaaattatccacttggaactgatttgaaaagattattgccttaaaaccattttcatgaggtagttcaatttccgtattcagaatgtaactgcaagaaaaatataatttctttgtttattattgatctaaatgaattgtcagcttaaaagttacctctgtagcctttcattataatgccagaatttcaagcgaacttccgcaaagttcactagatcattgtacacctctccggtagccatccaattgatattaaaagctgctcgtgtaatacgcgtattgtagataatgtgatttgcctcctcattatgaacattagtatccaccacgcgaagctatgaaaaaaaataaataatatttaattataaaacttatgcatgaaacttcataggcactcacattgtacagcaaactcttggtgtaagccgaataaaactgtaaatgtcctgatcggccatttagtaccagagtattggtcctcggattcaaacgtagtcccaaaggaaacttactttgtcccgtcttatccttggtctcgtatgtaaaatgctgaacagtggatttaattatgttatcactgccactaatcagctgaatggcattgtcctctgtgcaaaccaatacattctcgttgtcatcgctaaccacaatatgacggatcacactggacattctcggcagatacttgcgatagccaggcgaggccacagtccacttgaccaggacacactcatgaccaccgctgtagatgctcacgccagatggcgaaaaggctaaactggttacctccgtgtgatgccagtgaaagagcgtgttggtcatcgagtcttttttctcgaagtcccgccacacaaagatctgcccctcggaatcggcggttgctgccaccatttcgcagggactcatcttcacacaggtaatagtatgttgcttggcgctcttgtaacggcaaaatgtccaggtctcatagttcacaaaatatatgtagaagccctgagccaggacaatgtacttgaactgtccttttcccacgtctacgaggggaacgcgaagcctgaaaaataagaagtatttaagacatgtcagattttccaatatttttcagattattagcaatgcattaagaaaagatagtatttggaaatgaaaacaaaaggtcggaacttacttcagcttcaatccgcagttgacatcaatcttttcacccgtgctcgtgttaaccacaaaccatttgacctgttcaccagctttccccttagcggtgacaaaggcgcaggctgtatcgccacctttgtagagatccataaggtggcaggttaaaatagtatctccaggacccagcgtcaaggacacagtctttttcagcacaccagctcgccagttccaacggaccagctctccggtactcgtacaccctatcagcagatctggctgcttcagatccaattccaaactgatcagcggcgccgtggcatcatccaggactcgggtaagttcgcccgtactggtggcatagacctgcacctttgtcaaacaccgcacgaacatgaatctgtgaaacaggaatcaggatgttacatacttagtactatatagtattagtttgaataataaccttccatcgggcgagaatacaggcgcatgttccacaatgttaccgccagccagaaactgcaactccaaacggtcctcgtcgtcgaaattcatgatcttacagtcgagcactcgatgctctcgtaatcctctgtgcttcggcactgtctgtatgcaggagtttatctaaactaactcttttttaaccacttttcgtgggttattctaccatcaaaattcaatcacatcaatgcacgtgtagctcagtgtgcccgcgcactgggcgccaagaaaacatactgctggcaatatactgaaacataccacatagtgttattggtcactcttgggtgctcatataaaacttggatttcaaagatatagaaaaaaaaaagaaataggcaattcaataaataaaaagaacgcacgcaatattttcgaattgcgtgacaaccttcaaattcggcgaataaagaaatactgttagatttgtattatgcgtataaaaagcatttagaaaataccactgcttcaaaaatactggttccaacgagcagttctctctagttctctggtacatgcgaaaaggctgcactgtatatttctatacgagtttgtaaatggatttattccggccccgaaaacctgtcagtaatagctaggcgacggaatttgccgaggattcaataccggaaaataaagcggccagaaaagaggcttcgcgaagcaagggaaatgcagcaaggcgaactccggcgcaaaaaaacaacaacaattgctgacatgtgcaacgtagcatgcaaaacggggattttccggaactacttgcgggcaagtggccaaaggacctggatgtcggtgctcctggtgctcgtccttatgggtaccttcacagccgcggaacccctgaaagttatatacgcggtcaacgctggcggagatgagcacaccgatcttaacggggtccaatacgatgcggatcctctcaaaggagttggaatagcttcggactacggcaaacacctgctgatgatcggccgggtacaggaacatgacgaggtgctctacaggaccgagcggtatcacaccactacatttgggtacgatttaccaagcgatggcgatggagattacgccttgataatgaagttctgtgaggtatactttgatgcgccgcagaagaaggttttcgatgtgctcctaaaccgcaagcacacggttgtccgccagctggacatctacaac

SEQ ID NO: 1265 - DNA, 3080 bp, DROSOPHILA
tgattgaattttgatggtagaataacccacgaaaagtggttaaaaaagagttagtttagataaactcctgcatacagacagtgccgaagcacagaggattacgagagcatcgagtgctcgactgtaagatcatgaatttcgacgacgaggaccgtttggagttgcagtttctggctggcggtaacattgtggaacatgcgcctgtattctcgcccgatggaagattcatgttcgtgcggtgtttgacaaaggtgcaggtctatgccaccagtacgggcgaacttacccgagtcctggatgatgccacggcgccgctgatcagtttggaattggatctgaagcagccagatctgctgatagggtgtacgagtaccggagagctggtccgttggaactggcgagctggtgtgctgaaaaagactgtgtccttgacgctgggtcctggagatactattttaacctgccaccttatggatctctacaaaggtggcgatacagcctgcgcctttgtcaccgctaaggggaaagctggtgaacaggtcaaatggtttgtggttaacacgagcacgggtgaaaagattgatgtcaactgcggattgaagctgaagcttcgcgttcccctcgtagacgtgggaaaaggacagttcaagtacattgtcctggctcagggcttctacatatattttgtgaactatgagacctggacattttgccgttacaagagcgccaagcaacatactattacctgtgtgaagatgagtccctgcgaaatggtggcagcaaccgccgattccgaggggcagatctttgtgtggcgggacttcgagaaaaaagactcgatgaccaacacgctctttcactggcatcacacggaggtaaccagtttagccttttcgccatctggcgtgagcatctacagcggtggtcatgagtgtgtcctggtcaagtggactgtggcctcgcctggctatcgcaagtatctgccgagaatgtccagtgtgatccgtcatattgtggttagcgatgacaacgagaatgtattggtttgcacagaggacaatgccattcagctgattagtggcagtgataacataattaaatccactgttcagcattttacatacgagaccaaggataagacgggacaaagtaagtttcctttgggactacgtttgaatccgaggaccaatactctggtactaaatggccgatcaggacatttacagttttattcggcttacaccaagagtttgctgtacaatcttcgcgtggtggatactaatgttcataatgaggaggcaaatcacattatctacaatacgcgtattacacgagcagcttttaatatcaattggatggctaccggagaggtgtacaatgatctagtgaactttgcggaagttcgcttgaaattctggcattataatgaaaggctacagagttacattctgaatacggaaattgaactacctcatgaaaatggttttaaggcaataatcttttcaaatcagttccaagtggataatttgcgatgcgccaccgctggcgaagacaacgtggtcaaagtatggtgcattacggattcagaaaacatttataagcgcggaacgatgtggagttgcctggcgcagactagttatcgaaaccttccgattggttccttgtgtttttcccaggatgggtctctgttggccgtgggttatggcaacactttggcactttatgatgcgaggaatccacggcttcctctccaaaccctcagctgtcctcccggcttagatggtgttatatccaaagctcaactgagattggcccaaactccacttaatggtgctaggaaagaatttacccagcaaagacagcagttgtgggctctgctgaaaacgctgctaaatagtaatgatgaaaatttaatacagcaggcaaaggatttgatagtaggtcctcctgccaaagccaagcttgtgagtgaaccagacaataccaccaaggagacggtatttaagtacataatgaaaatgccggaactcggcttgcatcaaaaattgcaactgctgcgtcgctttggagttgaatgttctgtcccattggcccatcggcaaaggttgttccagcatctccagcaaagagctgtgattccacaagccacgaagctgaggcttcggaaattggagttccgactgcatcgcctgcacacgcgacaccgctacaaagctaagcagcgactaagtcatgtgaacaatcggcggcagaaattcgagaacctagtgccacaagatgttatgaacctgttcagtgtcctaaagctggatgagagtagtaagccgaaaaaggaaaaaacaggcaaattgcatgtgtttcagccaaatgttccgctgcccctctatcagcgcagtaatctacccaaaacacatggcttggcctggttgcctaggagacagcccaggcagagctctattaatatcgactggcaggcgcagtcaacgctgctaatgctgacccactcgcaggagatcgcttacctggcgctaccgggtcagagtccgtcggatgatgcgcctacaccgatcagtttttctcagcccgccgcaacagacattattttgaagcacgcgactttcggaatccatgtgatcaagccgcagcaggcttccggtgaatccttggagaaaaacggaccactgatcgtgggacgggaagaacacagtgccgttaacgcgtttgtcaatctttccgcccacacgatgcctgccatgagcctgatttgtggcgaattcgtgaaatcgctgcttattccggcggactccacctcgaggcactcatcatctgccgcgagtgatgccgccttgaccaatggggtaaccgtcaatggcaatggggtggggcaccaggacagtgatggggagcacgaggacgaggagctgggtgaggaggcaaggaacacgctggacacccggaaaacgctgctggagcaaaatgaaaagctggtggacctgccgcttgagggagaaactgacctgcagggccttgataatcgattaaggaccatcacggcgttgaggacgaaactgaggatttga

SEQ ID NO: 1266 - protein, 982 aa, DROSOPHILA
MNFDDEDRLELQFLAGGNIVEHAPVFSPDGRFMFVRCLTKVQVYATSTGELTRVLDDATAPLISLELDLKQPDLLIGCTSTGELVRWNWRAGVLKKTVSLTLGPGDTILTCHLMDLYKGGDTACAFVTAKGKAGEQVKWFVVNTSTGEKIDVNCGLKLKLRVPLVDVGKGQFKYIVLAQGFYIYFVNYETWTFCRYKSAKQHTITCVKMSPCEMVAATADSEGQIFVWRDFEKKDSMTNTLFHWHHTEVTSLAFSPSGVSIYSGGHECVLVKWTVASPGYRKYLPRMSSVIRHIVVSDDNENVLVCTEDNAIQLISGSDNIIKSTVQHFTYETKDKTGQSKFPLGLRLNPRTNTLVLNGRSGHLQFYSAYTKSLLYNLRVVDTNVHNEEANHIIYNTRITRAAFNINWMATGEVYNDLVNFAEVRLKFWHYNERLQSYILNTEIELPHENGFKAIIFSNQFQVDNLRCATAGEDNVVKVWCITDSENIYKRGTMWSCLAQTSYRNLPIGSLCFSQDGSLLAVGYGNTLALYDARNPRLPLQTLSCPPGLDGVISKAQLRLAQTPLNGARKEFTQQRQQLWALLKTLLNSNDENLIQQAKDLIVGPPAKAKLVSEPDNTTKETVFKYIMKMPELGLHQKLQLLRRFGVECSVPLAHRQRLFQHLQQRAVIPQATKLRLRKLEFRLHRLHTRHRYKAKQRLSHVNNRRQKFENLVPQDVMNLFSVLKLDESSKPKKEKTGKLHVFQPNVPLPLYQRSNLPKTHGLAWLPRRQPRQSSINIDWQAQSTLLMLTHSQEIAYLALPGQSPSDDAPTPISFSQPAATDIILKHATFGIHVIKPQQASGESLEKNGPLIVGREEHSAVNAFVNLSAHTMPAMSLICGEFVKSLLIPADSTSRHSSSAASDAALTNGVTVNGNGVGHQDSDGEHEDEELGEEARNTLDTRKTLLEQNEKLVDLPLEGETDLQGLDNRLRTITALRTKLRI

SEQ ID NO: 1267 - DNA, 2944 bp, DROSOPHILA
aaaatatatatatatacaaaaatttgttgtgtttgaattgaattaagagcttatcaagaaaaaaatttcagtgactcataatacactactctacaagtttaaattgaatcaacaatttaactttcattgctcaggtttttagtaacaatgtttatataagtttaggtataacaaatgatttaaatataagatactgtatttcacattgagacgaaacaatccaccgaaaatcataaaatataagaatgttgcattttatttttaaaaataaagatgccttttaagaggaataacttaaatgtctttaatacctttgaatttaattatatggctaataaacacaaacttaaagcttaaaactgcatcgaattgaatgcggttataaatgtacttatatatctaatataatctgctaatatggtttacatggtatatctttctcggaaatttttacaaaaattatctattcatatatctcgagcgtaagatatttatcagtttatagataacatctttaaatttgggtgattaaaaaaaaacattgctgcagggcatgtttatgtacacatttcagtataagtcccaagttaaaatgcaatgtaaaaacatataaaggatattaacttcaaacccaaaggattgcagagagattgcagcacagctgtaatcatcgcaacaaggcaaccaaaacgagactctcgtagcgttggcatcatattcgatctttggaagagctatgattcaagccaagggaaacaactgccaaaaaatagaagattgcgacgagcggaaagcagagtggtgcaccacggtgcataggtgcataggaggttggttgtctagagatctgggcacgatggcgagacaaagatgcggcgcaaaatcggaaatggagatggatcacgtagccggccatggcgggcagcgattataggcgctataaagagccggagtcatcgccagacagcgagcagtagacgatccacacgtaaacggcaacatgcaactcggtctctggtttggcattttggccatcgccgccacgccggttagtagcttttatccatggcattcgcattgggcatcccgctaatctcgcaaactctctctctctctctcttacctcctcctcattagctggtgagcgctaactatggtcccgctggcggacacggacacggacatggacatggacagtacctgtccggtcccaatgccggactcgaggagtacgtgaatgtggcgtctggtggcaaccagcaggctgccaatcagatcgcctcacaggccgagatccagcccacgccggaggaggcccgtcgtttgggtcgcgtccaggcccaacttcaggccctcaatgccgatcccaactaccagaagctgaagaactccgaggatattgccgaatctctggccgagaccaatctggccagcaatatccgtcagggcaagatcaaggtggtgtcgccacagttcgttgaccagcatctgttccgctccctgttggtgccatcgggccacaacaatcaccaggtgatcgccacccagcccctgccaccaatcattgtccaccagcctggtgcaccaccagcccatgtgaacagcggcccaccgactgtggtgcgcggcaatccggtgatctacaagatcaagccctcggtcatctaccaacaggaggtgatcaacaaggtgcccactccgctgagcctcaaccccgtctacgtgaaggtctacaagcccggcaagaagatcgaggctccactggccccggtggttgcacccgtctacagccagcccagggagtacagccagccccagggttatggtagtgccggagctgcttcctccgccgccggtgccgcctcctctgccgatggcaatgcctacggcaacgaggctccactgtacaacagccccgcgccctatggccagcccaactactaaggtgctcatcctgggcatgggttgctcctcagctgcgacagctggtttaatttaaatttttgtttttttttttctttgccgaactactgagcgcaaataaatgaaaaaaaaatacttgaaacgtaaacgttttgtcatcaattattttcgaccggaaggggctacctgagtggcaatgaagcacacagattaagcacatatttatgaatatataaatatatacgaatgcatgagagaacaaaaaattatatctagttttcttcaaaaataaataataaaggggaaaatggtataaagtatgaacataaaattatgaacgagtataaataagtttgtaattgaaatctctacggtcatacaagtattttaactattctataaatatgcataaacatggtacgcattttatgagatacaattcgaaagatattggatagcattatcatgcatgaaattatttcacactcttgtgatggtagctatcttattccagttatcgtttaattgcaaagaatgggatcaaaaggtcatctttatcaacatattgttgattccggaatgaataataaataataacataactatgaattaatggagcaactataattttacggcctcttttcttttaaacaaagaatatagcacttttaatgcattaaatacgtatttaaaccttttcttttgaaacgccaaattcatattagagtttcataagattgttttaaaacataacaacataataattgaagaattggaaatctttttaggtgtttgtaagcctttgaattcctaattggaatagctaaagatccatatttcatcttcaaatctctttgcaactagagatttattttatctggcaattattaagtatacatttttatatggtactttaaactgatggtttaatcagttacatggattttctaaattaaaaatggtcatgtgaagatagccactcttctaacaatctaatcacatttatagtaagaaatacaat

SEQ ID NO: 1268 - DNA, 855 bp, DROSOPHILA
atgcaactcggtctctggtttggcattttggccatcgccgccacgccgctggtgagcgctaactatggtcccgctggcggacacggacacggacatggacatggacagtacctgtccggtcccaatgccggactcgaggagtacgtgaatgtggcgtctggtggcaaccagcaggctgccaatcagatcgcctcacaggccgagatccagcccacgccggaggaggcccgtcgtttgggtcgcgtccaggcccaacttcaggccctcaatgccgatcccaactaccagaagctgaagaactccgaggatattgccgaatctctggccgagaccaatctggccagcaatatccgtcagggcaagatcaaggtggtgtcgccacagttcgttgaccagcatctgttccgctccctgttggtgccatcgggccacaacaatcaccaggtgatcgccacccagcccctgccaccaatcattgtccaccagcctggtgcaccaccagcccatgtgaacagcggcccaccgactgtggtgcgcggcaatccggtgatctacaagatcaagccctcggtcatctaccaacaggaggtgatcaacaaggtgcccactccgctgagcctcaaccccgtctacgtgaaggtctacaagcccggcaagaagatcgaggctccactggccccggtggttgcacccgtctacagccagcccagggagtacagccagccccagggttatggtagtgccggagctgcttcctccgccgccggtgccgcctcctctgccgatggcaatgcctacggcaacgaggctccactgtacaacagccccgcgccctatggccagcccaactactaa

SEQ ID NO: 1269 - protein, 284 aa, DROSOPHILA
MQLGLWFGILAIAATPLVSANYGPAGGHGHGHGHGQYLSGPNAGLEEYVNVASGGNQQAANQIASQAEIQPTPEEARRLGRVQAQLQALNADPNYQKLKNSEDIAESLAETNLASNIRQGKIKVVSPQFVDQHLFRSLLVPSGHNNHQVIATQPLPPIIVHQPGAPPAHVNSGPPTVVRGNPVIYKIKPSVIYQQEVINKVPTPLSLNPVYVKVYKPGKKIEAPLAPVVAPVYSQPREYSQPQGYGSAGAASSAAGAASSADGNAYGNEAPLYNSPAPYGQPNY

SEQ ID NO: 1270 - DNA, 13634 bp, DROSOPHILA
tactttgacttaaaattttcttcaaaatttgtgtatacccgttactcgtagagtgaaattatacactagattcgcgttgaaaagtatgtaaccggtagaagtaagcgtttccgttcatattttagttttagtttattttcttgatcacaatacatagccgaattgatctggccttgtctgtccgtccgtccgtttgtttttttttttttctaattttgttcccattttctgtcggtattccaaaaaatctctccttcgcatttttacttgatgagtaatggatagctgatattcggttaactcgactatagcattctctcttgtttttaagctattgtaactcaagaattacgagttcacgaagacattaatacaaatataaattttaggtgtttattaaaaagtattagccccgttcagaaataacattccaattccaagactggtcacaacaatagcactattaagatcaataattttatataatatatttagaacataaatttgttttttatacatagaaattatatgaattagttcaaaaactcgtgtatatctacgctaaatgagctaaaatttattacagctaaaaaacgagtaaacgtataacaaagttagctttcagttttcgtattggacagctcctttcagcgattgtattcatataagtacaaaaataatggcttaagacatcgtttacattaatccgcttggggagtatagatgactactggcaaatcggaaatgcaaaacattaccttaacttaagaggcattacaaaaatacaattcgattaattaaggctaaacgctttccccttcaatctactttaactaaatataatatcactagattcgtagcttagactaagtattggttcctcgcggccaaaacgccaaaaacacgaaattcaattacacatgctcgtacctccacgttggaaaaagaataatgtaaatacaacaacagcagtggatgatgcgcccttggtgttgggcgctcaaaggactcgctcccccagcgacggtgtcctttggatgagcatcgagggtggcttcgccggcagagtaacgctacttagctcagcatccaaagcggcgatatcggcggccgtcaacttggaattggagttcagcggtacggtgggaacggctatggagctgggcaggccgtgtggggaggcgtcgggcaccaggcgcttcaacaagccacccacgcagccccaggggaaggtcctgcgaaaaacaaggagggtgggtgagtaaaggtgggcccaggcaaaggtaaatattgtgcattatttaggagaaacacattaaagcgagaccattaggcatgtggacggggtgcgctatgatttggggtaggggctacctacccttctctagggcttttcctttgctcgactaaagaaaatattggtaacaatggaaatttgttttgtatatttttacaccagattttataaacgatttatttatagctcagtggtagcttaagtaaagcaatttgtatttcaggcccaaaaggaatattactttcattgctaacactttttttttaacagtgtactggacgagcgagcactcctgcttagatctgcattttattttgcatctttattattgatgcggcaaatagggatgtggtcacgcttttatatcgtggatttcctatattatttgggagtgccacataaagtacacattaaggttttgttaaactttcgaattttacccatgatactgcgaaaaaagatattggatggaacaagttcttgtgacttcaagtgatttgcttttgaacaaaatactgggcagatgctatattctttattaatgctagtgattttccctgacaaaagagagcccatcattaaatcaacattagctgcaacacctgcaccctttcccactaaccacgtatgccacgtattcctcctcgacagcgaacacggcattaaataaactcaaattaaaatattcaagtcaagcttttcccattaggggcctacaagcaccttacaaccattatggcgcctaattaaatgcggcaaattatcattattaagctggggcgaaagttcgtttgtttacataccacttgaaggagaggaggaccttcaggaaaccgggaatgacggccagtttctcgttcttcctgatggccgcaatgacacgatcggccacatcgttgggattcagtgtgggtacccatctgcaatcatttacccagtcaaaacgtcagttcgggtggatggaggtcgggatccggatctggatcggggtggtggctttggtactcacctggcattcacgtcgtcgaacatgccagtggcctggatgaagaaggggcagatgcaggtggttcggatgttcgtatgtccaaggacttccagctccagcctcaaagcctcatcaaagccaacctgtaattatcggtaactcagaaggggattcgcaggggcgaaaataaagcgcactcaccgctgcgaatttactcgcacagtaatcgaccaatttgctaatgcccacatggccagccagcgaggcgatcgtggcaatatgtcctcgatcattctcaatcattttgggcagaaacgcttttgtcgtctgcaacattgaaacaccggcattagcatccacattctggccacaaagtggttttatggacgtcgacgacttacccaaaagtgtgccatgacattcacattgaacgaccgctcgatcagatggtcaggtgtatccaaaaggtgcagcccagatacaacgcccgcattgttgatcaacagagtgatctacaatgtaaacgtaaaagtggccaaagttaattttattcgaattaaatccactatcatgaaatggaaaatcgtactctattcgttagcatagccaaagaatctgactgcatttggcagattgctcaacttcttgtcatgccacaaactccaaaaggccgaaaaataaattcttttttaactggtaaacggcttagaggtgtgcctaagacattcgcttcgcttttcgttcataaagtatttgatttacaatctgcccaagaaaatatatttcgaaggtagtttttccaagccaatcaggcttttcaagtttagacaaatttcgtaagattcgatcgtcagtttttgaaattacttgccaaaaagtgaaatccttcaaatggcagccaaccgtaatgtcgagcatgtcaaggtcttaatgcgaataatgtaagatgcttgaaaacttaaataacaactataactcattttgtccctctgaaacctagctaaataagttaacaacaagtgcacaacaatgatcccatttgagggcgagttcaagtgcaagtggtgtgtggggcaggggcaggtcatacattgcgtatgagcgatttcaaatttgccccgctgtaaccgggcaaaaacatttaacgaggcgtgcattaagcaaaagcagcaacaacagcggcgaaccaaccattaagacaaacaacaacatcgccaggccattaaaaatattaaatgtaatatttcagagggcttcgagcaatagtaaaactgagaagaaaacaacaacagatttgaaaactaaaaaagacagcaaaaagcaacgcgtcatctgcataacgcatgacttactaagcagttaaattttgttttgcttttttgtagccactgctttttatttagtttttgtgactttcaggttcagcgatgttgccgcagtaattatataactctttcaaaatgatggctttgtgtttttatccctttagtgttcttgcttcttgcttttatgcttgagtttctgacatcattttaaccacttttctatcgtttttctcctatagcagtaattttagcaaataatttgggacttttggcagttcagtacactttggaaattgacctggacatgcatgagaaatatcttaatgatggcatttcgtgcttgtgacagcagctatagagcaattaactgaaattcaagattataaacggagcgctctgtagaccgggaatgtgggaaacttttattgaaagtgattctaggcacctacagctagaaataaacgaaaccataacttgaaatttagagctaagcccacaaaaaccttctcttgattaacatattttgcctaattactctccctttagttaatgaactatgactactcatcgtgtctattaaatgtgaagaaagttctaattaaaggaacaaaggtacacaacaaacaacaaaacatttctataattagcaagtaaattgattaaaataccaccgcgaaaagtcgcaaccgaaaatgtggggattactttgaatatctctcacttgcatggctgcaatgtctggaactgccccagattgtgataaatgagcagatcgaatgcgaaatggcaaccagtttgtagaagaccggattggacttggcttctgcattttttgccgccgtttgtgtaatgtgcaacaatttctcaaggttgccgcaacgatgacgatgcgctcatgcatacaaattttctcctctccgccctgactttggcttaaatttatgacatgaatatgcataaatgtgttgctacggggtgtggcagccactgttgcaagtcttggatggtgccggcttacatgtgttccgcgctcccaagaagcaggctgggttctggccagcataaaggccattaaacgcccctcagcaaacaattatatgacgactagtctgatgccacattaggcgctcgactgtaaacagcaattactggacttttatgcttcaattcccgcacgcactttccgcctttcgccctgagttgagaaatatggacaatacattgaatattcgacagataacatggacaaaataaatgtttctttactcatacgagtattgtcgagtatcgaatatgtattgtattgaattccaaagccaattaaaatgaagtattattttaaatggccagacaatcaagtattgaattatatctgcaacgattgtatatatattatttatgcatacttacatcaccaacttcgtctctgatgacatcggctgccttgtagacctcctcctttttggatatatccaccacatagcccttgcaatagccacccgcctcttcgacaatttggacggtttccgcaatgcctgccaggaagggattatgatgaaattatttgatgacccacttgaatgtcgcgtgatccaaagactcacccttcttgttgatgtcccagataacgaccttggttcccatttttcccagtctctcagcaagaaggcgaccaagtccgttgccaccacctgtgatcagtgcaatgtctgtgttgagctccttttcgggatagccgaaggcaatgtagtaaagatcctaaagaaagcgacggaaaattgaatttaattacaataccataaaatagcttttttcgatgctacgctatgcaaatgagcttgtcgcctaagtcttttgttttctcgtctcattcatttgctatatagacgtatgtatgtcggcccaccaaaaccgatacgagtcacgcgtatgcaaatagagacaaattcaaagtttacacaatacctaaaggaagtctaaacaaagtgtaaaattgtaaacaacttttgccacttggcatctgcgtgttaatagaccgcaatttgctgccttggaaaacctattgaaggcggcagtgggcgaggcaagcagttcacctcaattgccccgcaattaattgatatatgtaggtagttcaagaaatttgcagaaaaaacgaaaaactttatgcgcccgtttagtgtcaataagctgtcaaaatttatgaccatcgcgcctccctggcggccgaacataaattgctcgaaagggaaaggcgaaacaaaagattgaggcggcgaacttaatattttacatgttgcacagtagcactttctgcgttgcacgcgggggcatcccataaattttcatgccacacgcgaacttgccgccagctattcgccccatccgctcagggcacctggtttcctgggatggtgcctttgcacctgagactgaacccgtgttcgaacccggtccggcaagcgtgtccaattattttgacattaacaatgaatatgtcgcaactttgttgcttttgatatagtaaaatgatggtgtccctagtaataaatatgtagacctaaagaaaatttttttagccgattaattaatagttttgtataaagaaaatagtatatatatatatatatccatatatatatggatagtataaaaaagtaaataaatatttgcttaaaagctttataagcatcgatgtgttcttatcatttaacatgatgttgttgaatgatatcttttacaataatatcactcgataaacgataagtttgtatatttttatgaatatttcctaacaaatacaagagtaaatggctttcggtgcatggaaagtaaaaatctccctttatttctttattgcaaacgttttcctgtctccccgaaaaaattatacaaaaattaatcaaaggaaacttgttaccggcgacttgtgcaggctaaagtcgctgacaacaatgatgatgggctgcttttggcccttttctttccatgctgctgctgtcagctcgttgacagacattttgtcacataattcaacaggcaatgtgctcttttcccggctcaactcaaataagaaggacaggaagcatgcaattataatttatacataatacgataatcaacataatgggagcagcgatttcttttcatgttttgatgtggcataataagacaaaagtatgcaaattgaaatcaaattaagtggacaagaatgaaagagaaagaggtacgcgagatcacggaaatttttcgagacttttattcaacaaatgtaaattttgcagacaagtttcaaaatttggccgtgtcatttgagaatttgttagtctgctgaaaatatttccccgacataaaatctgccgagtcagcacagcgtccattcagttgggtttattggtcccgcagcatttgatgctagtttttgtctgtcttctgattttctggtgattgtcaaggttcaacgcttcgacctttgtaacatacggaaggccacagatcggattgatcttggatgaactgttttttattcgatttacctggtaggaaattttttaaaggtctttgctatttgaaaattttatttgtaacggaagcttgtacatcatgggcctagaaataatacaagcttattatgaatcaatttgatcgttatatagcttttttaaagtgtggaaaatgattaacatttgaagattagctttttggtttatattacagcttggatggctgccttcactgatttgcttttgaaaggtgtgaagagttcccaagtcgctgcaaccaatacaacaagtactagcaatccaatctcgagtcataattgaacacagttgcacaaatggaaaaatgtttagttcattagagctatttaaacattaattaacacgatcttcccccttcattagctccgttaaattgcttttgagttctctcatgtctgtggatttcgaaaatcttgcataatatatgcaaactaaatgccaaatgtacgatctccggatctgaggctcctttcgcgcgcagacttctaaggcgctaagccggctgggctgtttccattcccgccatcatcattaccatcatcatttgtggtagctttgctcttagccagtaatcaaatgtttgcagacaaaagcaaatggacaaacttgtttcgctctctcagttttttcggtaccaagagaattgcgaaaatatcaacaagccgagtcgccgatgtctggttaacatggttaaggtggttaacgtggttctagagccagccgaaagtgaaaccgaataccacaagctggcggcctctttcccaaccccaaaagcttgatatcgaaaatagtctcaactgctgtcagccaaattggctcaaattttgcccacttgttgagagtcgggcgaaaaactcaaagtggctttgagtgcactttacgcgcatgagccaaaacaaaagacttaaggcacgaacttgccacaaaacattgtaagcgccaatgcaatgttgccaatgcacaaacacttggcagaccgcctcgttgccccttcccctctctgagtcacccctccgaatgaccttctttgccgaatcgctttaaaacaagacaccgacagttgcagtaaaaataaaaaagcaacagcagcaatattaggcgcatcgaagattcggtttgcttaacctataataccctacaaattgtcaaataaaaagtttaatattttagtttagtcaatacgattataaaataataatttaaatggaatgaaagtgtttgatagatataaatcaattatcttcctaaaatggatttgagggatagtagagacactaacatttttgcgattcgtctaaaactttaagttcttttattttaaaattctccccattatatataacaaacaaaaacaatttacatatttcaaaattcaattaaaaaaaactcattttaataattttacagagacctaatttatttagcaaaacaataaagtgcgatacccccagaaaagtgcaaaggcatcagaaaataataataaacctgaaattgaacccctccgacaacaaatgcaaaaaacacagctacgttaagctttagcattgtgtattgcatttgaatcgagtagcctgctctcccctcccgtcctcttatacacttgaaagttttcagcctgcctgaccaattgaccaatgattttgcactttaagttttgtttgctcatgtctggcttctcatcgttgttttgcttctttgcgctttttgctgtttttatatggctgtcatcggttgacggcacggccttcaatggcgattttcatttatagatttgtgaaaaactagtatcataataaagatttctaacagtgcatttgactaagaggcacgcgctcataaatcgcacaatcgagttctatgcgatatcggctactgccacctgtggattgagtgactgagttgtaatttgtctgcaaaagcggatatttgccaagccgaactcagctgcaacggatatgtcgagtgattagctcgaagcacatttattttgagacaggggaacttgcagtgtcattttcagttctgtgaaaattaaggctatttcgggtagtcagcattttgtattggtatttggtattgtaaaagtaccattaccatataagtataatagacacacagacatcgaatatacaagattataacattttgttatttgatattatattttcagaaatataactattcaatttgtaaaagttcgttctcaaggcaattaatgaaaatattttgcttcctcaaataattttaagtgcttgcttgctgccacaacttgacgttttttcacgattatgtacgatggtcagccagacagtatcttttctgtttcttgtcacgagtacacattacacccgcccagtaacccaattttcaggctgacacacacactggcagcgtaaatcagtcgagtgcacaaggccgcatgcgggttatgaacctgcaaccggcccggtctctaagccaacaattgcgacttgcggcttgcacggcttgcgaagaggcgatctaaggcaacggcaacccatccagtagtaagatattgtgtttagctatttgccttttggggggccgcaaacactttcggtttcaattgcgtttgcgtttgcgtttgcaacgcacacacaagacccaacgaatgcccgcgaaattgcggtggctgttgttgttaccaccaaatacaatacaatgcgatatgtgtgtggatggatgtgtgggtcttgcggctagctaataaaaacaggctctccaagtggccagcaccgccaccacgggccggcaaaatgcaaaagttgaactaggtcaacaagccaaacgctgcggcgcagttgacagcgacttcggcagcgcgcagtaactcagctgaattgactctcattacatgcgccggcactcggagaaatatgcccctatttggtcggaagacctttttattcttattaactaaaactgtctggaactaacattaaaaatgatacttccattccaaatatatgaaacatttaaaatgttgttgtgaagcattttgatgataaagtttggtatcatgtcacagtttatcaaacgaattccaaaaaaatatacatcacagaaactatattaacaaaatttaaagtaaatttataactgtgtaacagagcccacataagttctcctcccatcaaacattcaacttgtaggtggaacttccagcgcaagtttgttgcccaagtcttttgttaaatgcatgccagcaatgcattgacataaatcgggctaataataatccatgggtatccacccagtaaccgattgttaattcaatcacaacaaccggcgtgtaatttgcacatctgccaactatcgttgacaagcaagtcaagcggatagcgtttagaatcatcatttaagagtttaccaaatccgtgaattaacatgcaaattcatttgactttctgagtcgctggttttgcattcggcatgctaatgtcaacagtttcgaatcgtctctatttttatggccctctcccagcagctgaggaataccgatggaagtggctattgtgccacacatatatcccgatcatatctcactaacccctggctacaaaaaggttttttttttaccttttttgcggtaaagtgaaaatataattaccgcaaaccaaggcttgcgtaataaaattgaaattgcttttattgtcttttatttttggttatttaaaaaccacttagcgtgtcagagtgttagtttgagcccgatacgggtctgggcccaattttcaaatttccagcggtctttggcgcctatgaactgattcattgactctattggcctaatatttgtggttgtagttctcagagtttgtactctcactcaactgtgtaaatcaattagatatgtgaccaatcacgcatttaaaattcggattattgttatttcagctaggtttttaataattatagttgctggcaacgcaaatccaagcacattgaacgcttctttttgtttaagttcagttaatgggcaatttctatttttcaaatatcgaatttgagtaataaatatttttgatcaaccgtctagctcatgttcatattgtccgaggctagtttatggccttgatttaacatggacatgataactcaattcctaactggttccggccatccaatccccttcccgatggcatctcgaatgccaaattcgcaagtcaaaataaattatcgttcacagtctgctttacatcatctcgggcagtccctaaatcaccagaacccctccctcgggtccacagatacgatctgaaaactcgtctgcgctggatcttaatgccttaaatctctttcacggttccaattaaacggcacacgtgctgccatcggcaatgcccattacctttggccatatatcacacacatcacatcctttccgctgctaattaaataagttaatcgctggcgctcgttgtttttgccagccatgcgatcgccagactttcaattctctgttatattctcccaaaaactttgacacatttggccaagtggcgaaggtaaaaggcgtttactaaatcgcacaatgctgctaatcaagcaaaggcaacgcgaaggtaaattattcttcgagcagaggaagcaaataagtctcaaccgtttttttattaaactgttttaaacaaaagtgagaaggtctcgggcatgcagcacttcgagcgacaatacggtctttcatttgatcgctcaaaaattaggaaccttttgtttatgggtattttttatttgctgataattaaagctgaagcaaattttagatttgcttaattaaatcaaaacgcctggaaggtcaaaggcagctttttattgaattctccgtttatagagctgtgaatctttttgaattttaactttggagttacattcaccttaataaaatcgtttcttcatttatattgacaatatttgactaagtaaacttttgagacttgcctgcaggatgtatccaatgcagcagattatgaaccaggccacgtccgcaaaggcatcccaggtattccacaggacttgacgccagccatcggcagcgggagcgactggctccgttttttgatggaccactccattggcattggggtgggcgtgtccgttggccaggatttgcgcatcctcggcggacagctcgttgttgtttttctccatttttgcacagactgtcactggatttgctcgattcgaatttgatctgtttagatttcgggtaattaagttaatcacacttcgctaagacacaggttttcgttttaattagctttcgatttatgtaatttcgcgtagtttttgcccgttaatttaaatgcagacgaaacacaacggcgagcagcagacgcgatatattaatttgggtttgttttttagtttgtttctttgcttattccgtatatagttttggatctggggactttgcctgattttgtcggatttttccgcactgcacgtccgctctcgtgagcgtagcaaacgaatttgaacgttgtgggctcgaaaggaatgaatttcgacttcttattttggcgcgctattggatatatagccggcgtcgacgtcgactgcgctgcttaccgctcgccgctcggccgaagtcgcgcttgtgacgtcatcgagcttgagccgcagcttcggctgggattatagttgttaatatttttcttatttttgttttgctcgcggctcggttcttatgctgctttcggctgcgcttcgctttaggctatttatttcccagtttgctttgtgtaattatttaaaataatcaagacttatgcttctacgtatttttcataaatttatcacgcggcgcaatagagggtcggcgtgaacatggctaattagcgttatgaaacacgaaagataaattacatcgcttgggtgatgcattttcgtattatttcttaaaagtttagttagagtgagtataccttcggggccctttcattacgcatatttgttataagaactgagtaaatgtgcattagcaccttaaatcaccttaacacctcccacgtggctcattaatttagtaaaatgacctacgtttactaattgctaatttgaatttatttgtttgcatattgcttgcaataaaggagctgtatgcatgtgtgcatatgacttattttgattcgaaatagcaaaatgtgaaattcggaattattggacgagaaagtggcttacaaatttagacattattttaaataggtaattgtacaaaaaatacacgcattttatgtataagtaataataattttgaactcttatgtaagttttgcaataactcatcatcaagcccgactttaacttcttatactgccgttactttcccctcaaaaccaacatatgttattgtactttatttgtgcctcggatgaaagtcgactgcccgtaaatttggttaaatgcacttatggccaacttatatcctctttccttcttgtcgacatcgcaatgcacct

SEQ ID NO: 1271 - DNA, 1510 bp, DROSOPHILA
ctcacgagagcggacgtgcagtgcggaaaaatccgacaaaatcaggcaaagtccccagatccaaaactatatacggaataagcaaagaaacaaactaaaaaacaaacccaaattaatatatcgcgtctgctgctcgccgttgtgtttcgtctgcatttaaattaacgggcaaaaactacgcgaaattacataaatcgaaagctaattaaaacgaaaacctgtgtcttagcgaagtgtgattaacttaattacccgaaatctaaacagatcaaattcgaatcgagcaaatccagtgacagtctgtgcaaaaatggagaaaaacaacaacgagctgtccgccgaggatgcgcaaatcctggccaacggacacgcccaccccaatgccaatggagtggtccatcaaaaaacggagccagtcgctcccgctgccgatggctggcgtcaagtcctgtggaatacctgggatgcctttgcggacgtggcctggttcataatctgctgcattggatacatcctgcaggatctttactacattgccttcggctatcccgaaaaggagctcaacacagacattgcactgatcacaggtggtggcaacggacttggtcgccttcttgctgagagactgggaaaaatgggaaccaaggtcgttatctgggacatcaacaagaagggcattgcggaaaccgtccaaattgtcgaagaggcgggtggctattgcaagggctatgtggtggatatatccaaaaaggaggaggtctacaaggcagccgatgtcatcagagacgaagttggtgatatcactctgttgatcaacaatgcgggcgttgtatctgggctgcaccttttggatacacctgaccatctgatcgagcggtcgttcaatgtgaatgtcatggcacacttttggacgacaaaagcgtttctgcccaaaatgattgagaatgatcgaggacatattgccacgatcgcctcgctggctggccatgtgggcattagcaaattggtcgattactgtgcgagtaaattcgcagcggttggctttgatgaggctttgaggctggagctggaagtccttggacatacgaacatccgaaccacctgcatctgccccttcttcatccaggccactggcatgttcgacgacgtgaatgccagatgggtacccacactgaatcccaacgatgtggccgatcgtgtcattgcggccatcaggaagaacgagaaactggccgtcattcccggtttcctgaaggtcctcctctccttcaagtggaccttcccctggggctgcgtgggtggcttgttgaagcgcctggtgcccgacgcctccccacacggcctgcccagctccatagccgttcccaccgtaccgctgaactccaattccaagttgacggccgccgatatcgccgctttggatgctgagctaagtagcgttactctgccggcgaagccaccctcgatgctcatccaaaggacaccgtcgctgggggagcgagtcctttga

SEQ ID NO: 1272 - protein, 399 aa, DROSOPHILA
MEKNNNELSAEDAQILANGHAHPNANGVVHQKTEPVAPAADGWRQVLWNTWDAFADVAWFIICCIGYILQDLYYIAFGYPEKELNTDIALITGGGNGLGRLLAERLGKMGTKVVIWDINKKGIAETVQIVEEAGGYCKGYVVDISKKEEVYKAADVIRDEVGDITLLINNAGVVSGLHLLDTPDHLIERSFNVNVMAHFWTTKAFLPKMIENDRGHIATIASLAGHVGISKLVDYCASKFAAVGFDEALRLELEVLGHTNIRTTCICPFFIQATGMFDDVNARWVPTLNPNDVADRVIAAIRKNEKLAVIPGFLKVLLSFKWTFPWGCVGGLLKRLVPDASPHGLPSSIAVPTVPLNSNSKLTAADIAALDAELSSVTLPAKPPSMLIQRTPSLGERVL

SEQ ID NO: 1273 - DNA, 3365 bp, DROSOPHILA
cgggctcgctccgccgccaaaaacaagaattcgatttaattttattttcagcaataaagccacaaattcaattttcgcgccacgcatcaaacaaagtcgcgcttcccggccctgcctcgtccttcgtccttcgtccttgtcctttgacttccgaccacgcgatggcgtggagaccctcctccgatgcggcgtctgatctgattgcccaacggctgttagttgccacggagatggagtcggagtccgcggcggtatcaatgacgcccacgggaaaaaacgggcggggaaatgtcataaggcaggaaaacacacaaactgattaagagcgagaacctttgatgagtcgatgagtccgctgacaaggctaactttccggcccggggcctccatttccatcatcccacctccgtccacatcttgaataaatataacatcaaaaggtgaccaggacaatgtgacaggagctgggtgtgggcaaattttgacgatttggcggagaagttatctaatcaaaggaaggccaccatttaacgaactgggaaactagtgacgatcacatcgtcgcatttccattttataaaatccaaaacattttctagtagaaattttccgaagaaaaaattcgtaacttacctgaacattttataactggttaatactaaattgtgaacaaatttcgtaggagtaacaattcactattttcaaattaaatgttacaccataaaaggttcttattctttggctgcaacataaaatgtcaaaataacatacatttctatttaaaagtaaatagtcagacaaactcaattggattgatttcatttgcatatgtattttgttttgtgctcaattaaacaccatttttaacataagcctaaagctatccgtatacctttagtaatttatttctgtggagagcagtccacgtagtaacgaaacacttcagcacaccgtgctatgactcaaatacgagtgaccgaaagttatcttattccgtaaaatgcaatataaagtgcctgtgtgggtaaaatattttgataatgcgttccagattttattaaatgcatttatattgttaaaagttaaatcattttttgtcacaaaagtcacaaaaatatcaaagcttttgtagatgccatcgtcactgatgttttgcttcattatcttgcctattcaagaccccacttaagagacttaatctcatccacaggtgctgtgtaacacgggcggcctcgagcagatcccgctgcgccagctgccggcgacggtggagaacctggcgctgaccaagaacaacttcccgatcatcaagccggattcgtttgccgggctgcgggcgctgaagaagctctcgctggacgggaacaacatcacgcggatcaagcagttcgccttccgcggactgccgcgcctcaaggagctatcgatccagtacacgccgctgcagatggtggcccagttcgcgttcgccgggctgcagaacctgtcgaccatcctgctgagccacaaccagatccagcggatcgagggcaacgccttcgcaggcacctcaaacatcaagctgattctgctgaccaacaatccgttaatccgcatcgacagctcggccttctctagcctgaccaacgtgggccatctgatcctgccctcgggcatccgcagcatcgagcaggacgccttcttcggcatggacacggtcggtctgctgaagctggcctacatggacctcaaggaggtggcgcccttcaccttccgcggcctctcgaatgtcctgctgctcacgttgcaggaatcggatctcggtgtgatttgtgcagacgccttcaccggactcacccaggtggagacgctgcagatcctgaacaacaagatcgactcgatcgaggagctgaacttcactagcacggcggccataaagcacctgaaattctttggcaaccacgtgctagagactccagatcccaactcaatcatcgtggacggggtggagcacctgcagctggtgagcaatcacttcccttgcggctgccatattcacaccctactcgacggaccgctggccgagggcgcacacaacctgaccgactttctgcagaagaactactgcatctcgccgctggaggtcaacgggcgggtgatgagcgagctggacatcgactccattggccgctgttccgaccagctgaccaagggtaatctgggcagctcagcggcatcgctagccctcggaatcaactcgatgctgcttatcgcggtcgccagttgtgcggagtggcgtcacgtccgtcttctggctaaccggctggcccagctcctaggacacgtggcctggcgacggcgccggaaaaggcgaaagggcaattaggcggaggtgtcctacacacagaataccgaaggtatgtatccggatatttccgacacaaaagacacaatatcatttaacgccaatttaaatagttatatttaatgatccttcgagtcggaacacgaacaattcgtattgccaccgattgttttgttaatatcatacgtaggttgtaagtcaagcaacacctgctcaggttcagtttaagtcgcagaatccctgaggaccacaaaattctgcctcttatcccccttatttcaacctttttggccaaccggcaaatggaaaacggtttcaatagcctctcatctttaaatgcaatcgcaaacatggccaacagagtgtttagtcatcgtcataagtattccacgcagccccatccaatccaatccgctggtccccccaaaaccaattgaactgcttgaaaacccgtgccgtgctgcagtgcagccaacatcagctctcggatacagtttcattgtggggcgctttaagagtgtgctgcagggtggtttgccgggttagcatacaaaacgaaaacggaaattacaaattctattcactcgcccgactgtggcactctaattcgtagccgtagctatagctggagctggagctggagctggaaccctagccccactccaaaagtgcctaggccagagtggagcgtggatcgtagagcgtgagcgagagtggaggaagcggtcccagccccaaggccacccaatcgcctaacccatttagccttgcagccggacacacggacaggcgggcagacggagaaactttgatggagacgttgggtccttaggagcaaggccaggccattcttcagccgcttatcgcaaaggatttagatttatctaacttgattatgaggccggacagggcttctttgcgcccttgccttgccccttgccccccccccccccccccaggaagccaatgaaaaggggaaaggcattcggatcccggccggcctaaaacaaatgcccagaaa

SEQ ID NO: 1274 - DNA, 1179 bp, DROSOPHILA
atgcaatataaagtgcctgtgtgggtgctgtgtaacacgggcggcctcgagcagatcccgctgcgccagctgccggcgacggtggagaacctggcgctgaccaagaacaacttcccgatcatcaagccggattcgtttgccgggctgcgggcgctgaagaagctctcgctggacgggaacaacatcacgcggatcaagcagttcgccttccgcggactgccgcgcctcaaggagctatcgatccagtacacgccgctgcagatggtggcccagttcgcgttcgccgggctgcagaacctgtcgaccatcctgctgagccacaaccagatccagcggatcgagggcaacgccttcgcaggcacctcaaacatcaagctgattctgctgaccaacaatccgttaatccgcatcgacagctcggccttctctagcctgaccaacgtgggccatctgatcctgccctcgggcatccgcagcatcgagcaggacgccttcttcggcatggacacggtcggtctgctgaagctggcctacatggacctcaaggaggtggcgcccttcaccttccgcggcctctcgaatgtcctgctgctcacgttgcaggaatcggatctcggtgtgatttgtgcagacgccttcaccggactcacccaggtggagacgctgcagatcctgaacaacaagatcgactcgatcgaggagctgaacttcactagcacggcggccataaagcacctgaaattctttggcaaccacgtgctagagactccagatcccaactcaatcatcgtggacggggtggagcacctgcagctggtgagcaatcacttcccttgcggctgccatattcacaccctactcgacggaccgctggccgagggcgcacacaacctgaccgactttctgcagaagaactactgcatctcgccgctggaggtcaacgggcgggtgatgagcgagctggacatcgactccattggccgctgttccgaccagctgaccaagggtaatctgggcagctcagcggcatcgctagccctcggaatcaactcgatgctgcttatcgcggtcgccagttgtgcggagtggcgtcacgtccgtcttctggctaaccggctggcccagctcctaggacacgtggcctggcgacggcgccggaaaaggcgaaagggcaattag

SEQ ID NO: 1275 - protein, 392 aa, DROSOPHILA
MQYKVPVWVLCNTGGLEQIPLRQLPATVENLALTKNNFPIIKPDSFAGLRALKKLSLDGNNITRIKQFAFRGLPRLKELSIQYTPLQMVAQFAFAGLQNLSTILLSHNQIQRIEGNAFAGTSNIKLILLTNNPLIRIDSSAFSSLTNVGHLILPSGIRSIEQDAFFGMDTVGLLKLAYMDLKEVAPFTFRGLSNVLLLTLQESDLGVICADAFTGLTQVETLQILNNKIDSIEELNFTSTAAIKHLKFFGNHVLETPDPNSIIVDGVEHLQLVSNHFPCGCHIHTLLDGPLAEGAHNLTDFLQKNYCISPLEVNGRVMSELDIDSIGRCSDQLTKGNLGSSAASLALGINSMLLIAVASCAEWRHVRLLANRLAQLLGHVAWRRRRKRRKGN

SEQ ID NO: 1276 - DNA, 3747 bp, DROSOPHILA
cgtacatgtggaataaagattaaaaaaattatattcctgcaaaatatttagatgaatacattgcatatattggaaatcgaaaacaagttcattttaaaattgtgggcttgccagttttttgtggcttgtggacgttagagtgaaagtggcgtagttatacaataaaacaaacttgcccgaagtaggcgtcactagaatttgcatgattagttttaacatcctaccaatatagttccagagactttgatgtctatgctaacattagtacatcgccaggtcgcctcggctagagatgttgatcaagagcgaattccctattgggaatgttgtttgtatctgtttctgtccaacattagaaaatattctcagctgcaaggcacatacgtacgcaaggtacatacgcaaattataaaaataacctaagtattttatatatatatatttgttaaaatccaactaaattcatgtccttttaatataaaagttatttaaggctgatttcatgtcacacaacactttttgaaatatgttctgaaattgcaacttcctggaaaactctacatagcttaatgcaaaagctttcacagctagttaatgaaattaaaaacaaaaggttgagataccgggccacttggcaaaacgctctgtaaacggtgtaatacattctgaaagttagcgtcgaaatgatagtgctatacatcggttcataacatggatttccctgtggtgcaggtacagcatttggcggtattttcaaaacccttttggtcgaattttgagaacactgcataatttttaaatgcattttcaaggattcttagatcatttctaatttgttgataacacgtcagtataccaatgaataaaaaattttaaaaaaagtccgctctccagtcttcaccgtttccaacttatcgcacatttattgttggtggagtcacttcggaagtaaaaaagaccataattttatgcgtatatggtcacactacttttcaaccactttaactcgaaaaagtaggcgtcggtcaattcaatcttaaagcgtctgtcattgtgctaagtgtgtgcagcggataactagaaactactcctacatatttccataaaaggtaagactcctgcccaacacttttttttgtctgtgcggtcattattattcctttctggaaggggtcggtcccgtctgcgttcttttttacgttagccgctgtcctgtctccttgtttttttagtgtacacatccagatttcttttctcttgcagatccaaataaaatttctacaaaatgtgtgacgaagaggttgcagctttagtggtcgacaacggatccggcatgtgcaaagccggctttgccggtgatgacgcaccgcgtgcagtttttccttctattgtcggccgtccacgtcaccagggcgtaatggtaggaatgggacaaaaggactcttatgtcggcgatgaggcacagagcaaacgtggtatccttaccctgaagtaccccattgagcacggtatcgtgactaactgggacgacatggagaagatctggcatcacactttctacaacgagcttcgtgtggccccggaggagcaccccgtcttgcttactgaggctcctttgaaccccaaggctaatcgcgagaagatgactcagattatgtttgaaaccttcaacactccggccatgtatgttgccatccaggcggtgctttctctctacgcctccggccgtaccacaggtatcgtgttggactccggcgacggtgtctcccatactgtgcccatttatgagggctacgccctgccgcacgccatcctccgtttggatctagccggtcgcgatttaaccgactacctgatgaagattcttactgagcgcggttacagcttcaccaccaccgccgagcgtgaaattgtgcgcgacatcaaggagaagctgtgctacgtggccttggacttcgagcaggagatggccacggccgcttcaagctcgtccctggagaagtcgtacgagttgcccgatggacaggtcatcaccatcggaaatgagcgattccgttgccccgaatcgctgttccagccgtcgttcctcggcatggaggcctgtggcattcacgagaccacctacaactcaatcatgaagtgtgacgtcgacatccgtaaggatctgtacgccaacactgtgctgtccggcggcaccaccatgtacccgggaatcgctgaccgcatgcaaaaggaaatcacggcgttggctccgtccaccatgaagattaagattgttgccccgccagaacgcaagtactctgtttggatcggcggctccatcctggcttcgctgtctactttccagcagatgtggatctcgaagcaagagtacgacgagtcgggcccctccattgttcaccgcaagtgcttctaagcagtagtcgggctgggcgtggtcgttcctcatcgaacacacccattgcagacaaaggatgggagtcaaaagtattgggcatgagtacattaataccgggagcaggcgcacaacacttccgctccttcagaagaatgcattccattcacttttatacacagttgtacacgacgcataagcaaaccatattgtgttctattcgaaattcaagttcatatgcacataagcatttataaaactgattcatgtttggcatttacattacttccatgcattcctacatatgtattaaaagcaaacttaccataccactaaaatacttgtaaccgcttcttaataataaagcgacgaaaagaactgaaaattccttttgtattattctattattttttccaccaaaaaagctagcatttggctggcatgagtaagaggcaatctgagaccgtgatattccgatggctatgtgctcattccactggcatgcagtggcggaggcgtcagataaagcgctaaccaataaggcatgctttgcttttgtgtttaagtcagatgggagcaagcatcggtttgcaggaagtgccttgataagccagtttatggcctgcagtttctgtcgaatcggatatatgtacatttgagcatagggtgtgattcagtttggactcgctccgcttatcacccgaccccacccagtctaagcggtatttttacgttgattgattgcgagtgaagcaagtgaaacgccaaaagcagctgcatcagcgttaccttataaggaaatagtggaggaataccgcaatcgcactcgcactggccactgcaaatcgagaccaaaacaaagccatgttgactcactcacgaatgttcggagtagttttcgttgtcatcaattggcattgtttgcccgattttgttgataggtggggcccggcccgccccatccgattatcacttgggtgttgaaacgtagagaaattcatttgggggatccctagcaaatctgctggtgatctggacaagcgcgttgaccaaatttaatgaactgtagccagaaagtagattcgtaagaagagcgcatgcgtcgatcgtcgatgtccatatatggaggccgttatagacttcagtcactgcaacaaatgcctaactaactttattgctgtaaacaatatattttgggtttctacgctggaagctggctttaaataaatgtattttccaaatccatcgataggtagatttgttcaatacaatttcaatactttaaaaataggaatattttcacataacttttcgatttctggcagttatcaacattttatggcgtgtgtcat

SEQ ID NO: 1277 - DNA, 1593 bp, DROSOPHILA
tttaactcgaaaaagtaggcgtcggtcaattcaatcttaaagcgtctgtcattgtgctaagtgtgtgcagcggataactagaaactactcctacatatttccataaaagatccaaataaaatttctacaaaatgtgtgacgaagaggttgcagctttagtggtcgacaacggatccggcatgtgcaaagccggctttgccggtgatgacgcaccgcgtgcagtttttccttctattgtcggccgtccacgtcaccagggcgtaatggtaggaatgggacaaaaggactcttatgtcggcgatgaggcacagagcaaacgtggtatccttaccctgaagtaccccattgagcacggtatcgtgactaactgggacgacatggagaagatctggcatcacactttctacaacgagcttcgtgtggccccggaggagcaccccgtcttgcttactgaggctcctttgaaccccaaggctaatcgcgagaagatgactcagattatgtttgaaaccttcaacactccggccatgtatgttgccatccaggcggtgctttctctctacgcctccggccgtaccacaggtatcgtgttggactccggcgacggtgtctcccatactgtgcccatttatgagggctacgccctgccgcacgccatcctccgtttggatctagccggtcgcgatttaaccgactacctgatgaagattcttactgagcgcggttacagcttcaccaccaccgccgagcgtgaaattgtgcgcgacatcaaggagaagctgtgctacgtggccttggacttcgagcaggagatggccacggccgcttcaagctcgtccctggagaagtcgtacgagttgcccgatggacaggtcatcaccatcggaaatgagcgattccgttgccccgaatcgctgttccagccgtcgttcctcggcatggaggcctgtggcattcacgagaccacctacaactcaatcatgaagtgtgacgtcgacatccgtaaggatctgtacgccaacactgtgctgtccggcggcaccaccatgtacccgggaatcgctgaccgcatgcaaaaggaaatcacggcgttggctccgtccaccatgaagattaagattgttgccccgccagaacgcaagtactctgtttggatcggcggctccatcctggcttcgctgtctactttccagcagatgtggatctcgaagcaagagtacgacgagtcgggcccctccattgttcaccgcaagtgcttctaagcagtagtcgggctgggcgtggtcgttcctcatcgaacacacccattgcagacaaaggatgggagtcaaaagtattgggcatgagtacattaataccgggagcaggcgcacaacacttccgctccttcagaagaatgcattccattcacttttatacacagttgtacacgacgcataagcaaaccatattgtgttctattcgaaattcaagttcatatgcacataagcatttataaaactgattcatgtttggcatttacattacttccatgcattcctacatatgtattaaaagcaaacttaccataccactaaaatacttgtaaccgct

SEQ ID NO: 1278 - protein, 376 aa, DROSOPHILA
MCDEEVAALVVDNGSGMCKAGFAGDDAPRAVFPSIVGRPRHQGVMVGMGQKDSYVGDEAQSKRGILTLKYPIEHGIVTNWDDMEKIWHHTFYNELRVAPEEHPVLLTEAPLNPKANREKMTQIMFETFNTPAMYVAIQAVLSLYASGRTTGIVLDSGDGVSHTVPIYEGYALPHAILRLDLAGRDLTDYLMKILTERGYSFTTTAEREIVRDIKEKLCYVALDFEQEMATAASSSSLEKSYELPDGQVITIGNERFRCPESLFQPSFLGMEACGIHETTYNSIMKCDVDIRKDLYANTVLSGGTTMYPGIADRMQKEITALAPSTMKIKIVAPPERKYSVWIGGSILASLSTFQQMWISKQEYDESGPSIVHRKCF

SEQ ID NO: 1279 - DNA, 15428 bp, DROSOPHILA
tgttatatgtaagtctctgtctcatgttgcttttgaccttgttttataagaaatataatatcgctatcgtaatatagcttaggcagaaaatcactaataaggcaaattaaagtgaagggcactgtgtgggacttctgaaaatacataatgcaaacaagcttactatttaaacttgacaacttatatatctcagagttcgtttaagccgtgcataactcatatacgttgtataggcaaattataagccctagaatattactttttttagatatactttcacgagagctttttctttcatgacgaattgaagtaggtgacactatctttcacaaagcttataaaattatgcctacacaaaggataaaagaatacaaaaataaaacaactgaaagatttttaaaatatttcttgttatttttatataattgtagtattgtattaaacagacaaataaagagcgtataagtgtgctggagatacattcagttttttgatccatgtggcataaacaacaaattataaataataatacatttttaactgagtcacaaaaaaatataagtcaaacgaaataaaatatgaaatggaaaacgttttaaaattataagaaaacactgggtaaaagcttttcctcgtttaatattagtactgaacatgtttatagtgctgctcaatttccacattattaaatttataaatccattgaaatataatatgtttacagatttgttaaataataaaataaaggtgcttggtagtacaataaaaccacataaaattcggccaatgtatagacatttttttgaagaagcagtctacaagtttcgctggttaaataaccttggttttcgttggattagttttaattcgttttggttttcggtatattcaccttaagacgccgatagcttaacttgaattttcatttctttctttttcttgcttttattcatgtgtttttgttttcttttggcatgtgccacaattcctattcaatacataattctttttgataaaggacaatttgtaaatgtttgacgcaatttaatgaaatttcgaatgtgatcaaaaaatgtattaaaaacattttaaatgtaattgttatatttttaaataacggagaacatggtgacattgatctttcgatttggttacaaagtagcacaaacattagttcactatggtataaagtaaaagattatataaataagttcaatgagcagaaaatcctaatttggtaagcaagaggatgctactgtattcttcatttttcttttaacgttttcgaagttttctgctgttaaaagtttaaaagttgtacgaaatttaatttaagaatttaagaacgtgagcaaaaattttttttaaagcatttcaaaagtaaatatttaatttttaaataacagaacacttggtgacatttatctttcgttttcgttacaaaatagcacaaacatttattcgctctgcgttcattacagtagttcattattttttgaaataaaatgatttaataatatgtagcaagaaatcgagggtataatcgtatataaataagttcaataagcaaaaattcctaatttggttaccaggatgctattgtattcatcgtttttcttattacgtcttcgaaatttttttctgttcgttttaaacactttttctcaatatgttttcagtattaataaagtaattttaggtttgtgtgatctggaatttaggatacatattaaaaatccaaaaggggcacttcagcattatgggcagggacatcttgttcgtgaagcttttgctcttcaataatcttaacctcttctgctaggccctttcccttaagcttgaccacttcttccgcattgatctgaccattaggtgttgggacacattcatttgatggtgctaccccttccccgcccatcaaagtagaattccgagcttttaatacagccggcgatgacttagccgtgccatctttggattgcggtgtcaatggcttggaagcagctttgcctggtgctgcctttaatggtgatgacttcctaagagaggacgtagttgtagtagaggagcttccaggaaccagcaaacgacgagatgtactcccattgttataggttaagctagctgaatgcgtaaactttggagctgagcgagctgtgaaagattttgtgatagttgcggtagcagtggaagtggtggtagagctggtattcttgcccaatccattggattgctgcttgttagggctacgagtagaaaatgaaggggtacttgtgctaggcacctttcgcacagtggtggtggaggaaatggtgctgcgcggcgacaaaactttaggcttgactggggctgtcattgtggccgcagggcgaacttttgttgaagcagcgctgccaggagcagatccttttgcatttgtaactggtcgtcgagcagttgaggaggctacagatcctgttccacttgttgctggtctgcgagcgttggtactgaccaaagggcgaagtgttgtcctggttacattatcagatgcagtaccacttgcagtcggcttgttagttatggtcttggcccctaaagttaccttgctcactggagctgtagctggtcgtgtgccgcttaacttggttggtggtttaactgttgatcctacattactgcttagtgactttcggggatttccagttagtgaagatgtagtcgaagtttttgtagctatactggtacttttgattccaaggcgggcggtacttggacgtggagcggccgacttgtttgccccgtaaacagaagtagaactcgctgtagtcttcttcattacaagggtttctgttttcgattttgcactagctgctgtagatcctgctttggtggctgagtgggttttggtagcaccaaccacagcacctccagccactgtagcaacagaagttttttcagacaaacttttcgcaacttcgacatctttttccggttctaaaatatcttccaaaggtttattacttgcgataacatattcatcaaactgagaaattgactgcccatcggcagcagttgacactgactcctctggagcaacagagcgcagtttctcctccaaagcagaagtcagcagttgctcatctgtagtatcaggcaacagtttctcctttgaagccgaagaaagcggtatctcatctgaaacagaaataggaagtcgctcttcttcaacaacgaagttcttttcagtgccaagattttcaacctgggcaacaacatctccaacagggtgcagcagctcctcctttacaaaggcttgttgctcactcctatgatcctctacttcatttgaagacttactagcaactttatcacatatagcaaagtcctcggaagctggtataggcatacctcccacatcctccatcattgtattcgcctgctctatcaccaggtgggcgggcgtgaagggctgggcaaacggattaataccttccggtggagatgatatttcatcaaagttttgagtttcataaccagaaactgattcaaaaacagcattttcctcgtcgttctgaaaaatacagcatttgtgtggggtaaatatttgctagtatttaagaaaatatctatgcaccgctcttagaaataactttttcggtgcttcattgttatgtagctattagacattacaaaaatcatgaatgaaaataaattaccactaataacagtagaggtactaccgataaataagtaatgagaaaagaccgaactatagcattttttacgatcttgaaaaagaataagtatttattaagtatttgtataagtgcttcttctcttggcttgctttttgtaattttctcacaaaggagaaagcatgaatgcaaagcatatgagtgtttgtcaggctgcttttttgggcttccaacacacattttcgagttttggcacgcgcacatttatttccaaagcatgccaattattacaatgacatcagcttgccataaaataacttgtgaagtaagatagttagttatttgcaaagttaagtgcaatgtcaaatttcgtctaaatcgaaacttcagctcatcataatgtaggcagcagtttctcgacactatataatttagtttttcatttgatacacatgagacgacaatattatatagcttttatattacaggcggaaaatgactagctaattaatgatcatacaagttcttatggggtatacaagtgtgtttatacccgttagtagtggagtaaaagcgtacactagattcgttgaaaagtatgtaacaggctgaaggaactgcctaaatttaacccacacaatttttcaaaaagtgtcgatattttgtttaatttttattagtcttgtaaatttctatcgatttgccaaaaagttttttcacgacacctacaaaccccggggaacttgactatagcattctctcttgttttattacataagtattgaaagccaaatgtagcttaatttgtttgtaagttggacaaagttgtaatatataattattgaaagccaaatgtagattcaatttttttaaagtttgacaaggttttaaaaaattcttttgttttcgaaatacatatgtattttcaaattgacaacgaaaaaaactacaacctaccggtaaaaacaacaacaaacaggaaaacattcaacaaaaaccataaaaatgcggatgggaaaggtctctgttactttgagtagttaaatagcgttagctttggactctgccaccgcaggtgtcgggtaaatgtgatgaatggaagggcggctatggaacttttccgctatcacgcgaagactgtatctcagcaccaaaagcagtgcgctctaaaactctaaaatgtcattgaccagtaaatgccactagagggggcaatttgccatcggacggggctcgttcccaactccctgttgatgttttccacttttagctcacttgctcgatgggcggctgactttcgctagctacacttaaaaacagcatctgcatattatgtttgaataaaccatctttattaaactttatctataaatatttgtatatcgtaatacacaaattgtttctcctaaaataaatcttgttttttttttatattgaatatactatgaacaagaaagaaagctatgttcggcaaggcgcatacggaagaagaacaaaaacaacgaaactttgattcattctaatattttcgtccgattttaagtaaaaattatattgtcaaaaatctgctgtagaccgaatatgaaaaacgtatgactagaaacgaggcaggcactccgaatttcttcttaattttgtattaatctttttctttttcagtttccttcgttttgaccaccactccactcacggattggactgttgctcaagcgtaatggggttaaaagtgagctgaagcgaacaagaccaaaaggcatataatacaaaacggggcttagacagacaaaagctcttttagagtagttcacatttatatcatttgtttgtcatgactcatcgccaaatttacactatagtattttttaaaaggtgttttttatatgcgaacattgtttgaaacatttcatatcagttcctaatgttgtctgctcatagaaaattagccggccggtaaatttgtttttctatgctttttgctgatcttttcattctctcaaaaaatgtataaccaaacaaaaacattttgaacgccataaaaaaaaatattttcaaaccctataatgggcttgataaacatcacaatgcggttggcatgtctgtgtgaatttatatccatttttgtacttgaagaaacggaagaatgaaagactggcaatgatgagtaactcacacttacttgctcactagctcgtacgtgtttgcatgagtgtataatagaagggagtgtgtgcttgccaaaaagctgcaaagagaacgcaacgatgacatcaacaatttttcgtaagcgaccaaaaatagtgccaatttccatgtttgatgagtaaaatataataagaaataaaaaattgcctataatttctcggtaacttctttagagggggcagtgcacactttagtaaggtatgttaggaaatcaaagtaaacatttaaaatgtttatggcgcatacaacgaaataaccaacaaaaacaaataaataaaaacatatggagtatattttcttaaaattgggaaataaacatatgttaagtacaaattaatataaaagatacttcaaattttaatgtttatattacttcatatacaataaagtatggtgtttgaataagtatatatataaagtttgtatccctttccctcctttttagcattcaatacttgatacggctcgttcaaaatttaaaaaggtcttgagtaagacacaaatgggagtgagacatagttatgtatgtatgtagctatagagtccaaaaaaagaatgcaataacgacatccagggatatttactaatggagtaatagatacaaaaatttaaaagcaaaaaggttgaagccgtttctcttgttttgttttggtttatttacatatgtaactcatatttcaaattacttttctttcggcgatatttaaaagttgatagggtaaccccgttttttattttcattattaaatacaagacattctactatcaagacacatttatttacgtaaataccaatgtaaatatgcctttaactaacgacaacgtaagactacgttcaacatacaatcaatcagcattttatgtcattcgatgtcgtaataatttaaccgtttcttgtttccaatcaaagaaatttaataaaaatgttattcaaaacgaattcttcatcgtaagtaaattaaatttgagcttaagacatttcgttggcatgcatttgtcaacaaatactaacaatttaattactctaccatatgcaacaattttgctttccttattaaatgtacttcgtacatcatactacgtcaccggctttaaaagtaattgtcccaaattaaaaaaaatgtttgtgcactgaaaggtatggaaaaattaattttaattttaatttaatttaacaaaattaaatatagtatacaatactaaatctaattaaatttaatgagtaattaaaaagtcaattataaataaaaattttaatatgtattccaaacactatatcccgcatagctaagatttccgagatcaataacaaattaatactaatcgcaaggaatgccacttactccatacacaggtatacatattgctaaaacaaaatatacacgttttcaagaaatatgacgaaagataaagatttttacacttcttcacattacatttacttctgtgaaagctaaaaaattacccgaaaacgaatattgagattggaaaaaagagagataaatacatttagaaagcaactgcgctacatttggatactcacattagaacggagtcgcagccatgaaattggctggctttcttggccaactcggacctgaagtcttactataaaacactcaaagttaagcctccgtattaaaatgaaagcagtaagttgcacgataaaagaaaaaatggggacggaaaattaaaggcaaactagtaaattcataaaacggtgaaatatgcgatacaaacagaatgaacagcacagacggaaaaaattggtaatggccaagtcgtaataaaacacctggccaagtttgttggccagcacacgaacattggtttggaaaatggagaagaaacaggaagcaccccgtggaaaaaatggaaaaggcaatgattttatatttttaattctttgccattggccccaagtattaaaaaaaaaaagggacagcgatgcagcccttgcgaagactgcattctaaacatcaaaactaatttgcatttctttttcatattcataaaacaattattttgatattttgatggtttggcgtccgttcatggacagttcagatttcaatatatttaattcaatagtacctatagattttaattttttaattacactttaaggacaaaagttttaggattatacaaataaatattgagaagagttttttgtgggcgatcgttaattcactttcctcagcgccttgcagttaaaaacactattaactatgcttttcgatgaacactccccaaagcattacgccaatgcgcactacacatacctccagctacgattaaactatatttatataccaggatccgagctcccaccactgatccatgcgttgcatgggcaaacgaaaagacacaacttggcacttggcagagtatttttgaattttaaaatacacatggccatgggataaggaatacagccaaggtatgaatctcagaaaatgcaatgcgatcatacagctgtgatcatctaaataaaggcataaattgttattaaacagttcttataggtaaataaattcccctgatttgaaaaaaatgtctgtacttcggtgttcattaatgtcaattattaacataaaaaaaattgaaaaaatgaattgaattgaaaatttttttctatacattttttttacagttcttgactagaattcgaagcgagtcattacttgggcgcgtgaacatgtttgtgcttctgtaatatttcctaatcatgttttaatcgcttgattattgtcggcactgcctctgacaaggtgcgacttaaaaacaattttaattggtgcactttaatcacagtgtaataaaatcgtatttaaaaatatctgtacaacaatcatacttttaaacaagagagaatgctatagtcgacttccccgactatcagatatccattacttagctaaagtgaatgcgagcgcgaaattgaatcatttttctgggatatcgatagatattgggaaataaaataagagaaaaattaaaaaattgtttttattgtgcgtggtagtttttggcggttttagggcgttgcaaaattttttttttttaatcgatacaaatttacaagactaatcaaaatgtgatctcgacgctcatacggacatacggacatggctagatcgactcggctattaatcctgatcaagaatatatatactttatatagtcggaaacgcttccttctgcctgttacatacttttcaacgaatctaatatacccttttactctacaagtaacgggtataaaaagaacatgatataccattaaaccgtaattttttaaaaagttctgttttcagtttcagttataaaatttggtagtggcaaacagtttgtttgtgggtatcgtagatgctagaatgctagtgatagatagacatttatggctaactctacttgggcactgatccaatttaagctttaaatactttataggataagaatcgcattcttttattgatagatactttttaaagaatttagaatacagtcaaaggaagaagtagacggaacaaaaaaatgctatcagcaatatacgtttcgtatatgtgcacgcacgcaaaaaccgtacgcacatgcatatgtgtatatatgtgtattaaaaatttttaagttgtctctattctctgttttaaaacttactgtgtttttgtgcatccctgttagtaaatgcagcgtatattgttgctctaattatgaaagcgtgtctgtgtgtgatcaaatgtacataaatacatatgcattaaagtctcaattgggacttgcaacgaagcgaaaagactgctacttcttgcagcggttggcaacgccattagcttttcattgttggagctagaagttttgctactcagattgcagactcaaagagaaagagagctggcgagagagctaaacttcattcgaactcagctcatcgaaatcttaaaaacgaacgaaaaccaaacataaaaataggaatttcgggtaacagtttattagtttacgttttaatatatatttatgggacacaggaaataacctttaacttaaggcttttaataacacctgtacattagtataaggaaggaaaaaaacccttttacctatattacttaggattgcaaacattcccaatataactttgtactgtacattgccactgcaacaatctaagttttttagactaatataaggacaaacctttaactttagaaataaaaaaagacataacaccaaataaatacaaaactctgtcttactcaaaacccaacaccatattccattcaatggaaacacttgcatgtcctgttgggtgtaaaaattgagtaacacacgtccaacaacaaaaagcaaccccacccaaatgcaaaaaacaaagggagagcgtaggaaacagcaatgtcgacagtgccgcgagagcgagccaaatgacgcaccccaggacaaaataaaatttaaaaagagcacacctcaataatcattaaaacagaatttaattaatactatgcagcaatcatcagaaagaacattactaagtatgcaaaacaaacaaaagtagttatgaagttataaactaggctgcgcattaaaagttaaaactttgaatctaaatactactcatttgtaatcgaataaatgattgattttaaaaaaagtaagccccaaaagaaagagagttataaggagagtttgggaatgaatgaagtccacaggcgctgtagcgtatcatgcacatgcgatgttcaaacacaaaagagtataacaacaaagttaataatttatcttagaaacttgtgatttcaaatgaagtgtgtataataatagatcttgcaaatttgctcatgatttttagcttacctgtagaggagcttgagatgaaacaaccccaaagaaatgggattccggatccaacgtgtactcctcaactagctccttggtgtcttcaaccagatgtttctctgcagtggaagaaaggggcgaaggtgtgatgtctacaatgccagcttgctgggattccagctccaatttcgccacaggcgagtctgcttcggagctcaactggggtgcactggtgtctagcaataaactctggtcggcaaaaatatcagagcactcagcgggaagctgcatttgctcctggcagccctcttgagccttttgagaggtatgttccaaataaaatgaagcctgcattggatcctgctcagtgttattgaataatgtgtgcgattcctgattgtttgggaagtcggactgaaactggagctcctctgtagaaggcgacttcgagacatgttctttctcttccacatgaattagttccttatcgtcacaagtctgaattggcaaaggttgcacggaatttaagatatcttcaatggaggagttgtgctcggcataaatcgattgtttcatgatgtcggcgtcgttgggcacctgatctagtggcaactccatatcgacacttgtctctggaccgtgatccagaacatcccttaaggctgcttggtcagcggttcctataccgttcaacaactgcatctccaggtgtcctgccccaaaagtgtccgattcctgctccaactcgtggggtcgcatatccgcttcaatgtcaaattcccgctcgtcgggcacggcaataccatccatgttgattcgggcgaattctttccgcggactttccgccaccaaatcgtcaagggtccctcccggtagaaatgggcggggctgaacaccaggtagtggatcttcagcagcaggaaggggagaggatgattgtgagccaacgccaggcacaaaggccacagcattggggtttagctgcgagtggttttcttccaggtttttaacaaaataggagttttccttgttgtcgaagtccactaactgctcttgaccaaccgtttgggccaccataacgacctcctcctgatctaaaggcgaggagttgttctcactgagactgcttgttccataagtagtggccacggagctgtgctcatcctcatcttcctgacggggatcctcgtgaacaccttgtgattctatctgctgctgctgttgaagctgctccggcaactggtttggctcctgggcctgcctggcaactacctcgtccgttgaagtagtggtgttagaatttgtcgagaagtcaccatcgttcttgatcacttccacgtcctcttcgtacagattgaagacagcggcagctccgtttccgtgaacttgattatctgagtcccgtccgggcccgaagccattgccggtttcctttgtcagtggaagcttttcctgttgaagcttttcactctgccgcacctcgtgtatgtacttccactcctcgtcttcttccccgtcgacttcgtccgactttgagggcgcaatgccaggagcgcagccgttccccccagtagcgtctgccagatgaggattatgctcgccggcgcctccgcaaatttgcagactttcggccaggcggttctgcaagtagttgtccaactgcgcgttgtcctcgtggtgttccatcctttaggatttaattggtataaatgatgcgccaacagaaacaggtatttttgtagagagatgattcagattgctcgtgattcacgcgccactgcgttttttttctcgattccacttttattggcgttgctgttcttgcagatttctacactcacaccaatacacacactctcccagcgaaagagagacacagtacaggaacggataagagcacgatttcgttgcttgtccttccacttccttcgcctttgcttgcactccaagtatataattacttgtcgaaataaacacagcttgccgagcccgttagtctttttatttttctttcagagattttagtaagttattcccttttttgttcgctccggttgctcttacttttgaattgcttgccgaccaatttttgcgcacacccaccctgacgaaaaaacgaaatatgaacgtacttggcttgtcttgaaataccgacagtggatcgtttgttaaaatactgaatgatatcttttagtatatataagatatcgatagctcgattaatactaaatgacaggttttttgtcgaacggtctgtcctcagtattttcacgcaatccgggaacaagatatcggttcgtcgatacttcgataagttgattggtattatagctctattaatactaacgtccagtagattttgtccaacggtctgtccacagtatatttacttattatcagcaggaggatatattaaatcgcacaataagtccctttcagttgacgttataataaatactcattaaataatcaacaagcggctgtaaattatatggttttaaccatttttggctaaatataaaataaaaaacggctagaaagttgagttctttaatttttttaagaatgatattaatcgtaaggctttaggctatacaaaatttattttagctcttcggcttgatattattttataaaaagctgtgtcgtgttctcgatactaaggttatgccccacggtcccctttgcggtgcttgatatgtcggcacaagagaaaatcgattaccgtaggacagtcagatttcatagagctaaggcaaacggaacattggcatatcagttctaaagcgtttttttttattcttttatcgattggatttgcttgctcccttttattgcccgatttcgcctaaaaaatttgcaattaatttttgtctcgtcttacatacggctacgaggatgttttatttatttttgtctcgtcttacatacggctacgaggattttttatttatttttagacttagcattttatcaaataatctacggctacgaggatgttgtatttatttttagacttagcattttatcaaataatctgtaagagcataatacacccccttcctcattttaacatgctagctgcgaaaggtttttataacgttactcgtagagtaagagggtatactagattcgttgaaaagtatgtaacaggcagaaggaagcgtttccgaacatataaagtatatatattcttgatcaggatcaatagccgagtcgaactggccatgtccgactgtccgtcttattgtccgcgtgagagtctcgatctcagaaactattaaagctagaaggttgagatgaagcatacagattctagaaacgaagacacagcggaagtttgttgacccatgctgccacgcccactctaaagcccacaagccgcacaaaactgccacgcccaatcttttaaaaatttgttgatatcattttacatttttatttgtcttggcaatgtctatcgacgtgcaaccaattttttgccaaaaaaaatgtataaaaatttacacgaccaacaaaattatgaaataatatccaacaatttttttaaaaatgtggtcgtggtagttctaggtggttttagatctttagagtgggcgtgtcaaaaagtttttggcgaatcgatagaactttacaagactaataaaattatgaaaaaatatccaaaagttgtttaaaagctctgctcgttgcagttttggggggttttgtgggcgttagggtggtctctagaatctgtatgcttcatctcaaccttctagctttaatggttcctaaggtctcgacgttcatacgaacagacggactgggctagatcgacttggatcttgatcctgatcaagaatatatatactttatatagtcggaaacgtttccttctgtctgttacataattttcaacgaaaatagtatacccttataatctatgagtaacgggtataaaaacagcaagagtgatcagcaaataggcattgacttttatattttatactgcaaaaaaatctctgtctctttctttcgtgcatcacaattttgggcttgcggtgacaatagacagagaatgagatggagtcattacatattcaagactctttgcacgaccattttatactgtaaaaaaaactctgtctctttctttcgtgcatcaccactttgggcttgcggtaacaagagagagaatgagaggagtcattacatattcaagacgctttacacgaccatttttttctgcaacacttaccgttgccccgaactctctgcactagtcaaaagcggttggtttgcttcgaacgcgaaattctatactttttctgctattgggaggaaggagctctattttttctgctattggtccgcatctgaaaatgtcggcggccgaaaaaatagaaatatttaatttatctctcatcctttatttcatatagcggcccaaagtggtcggtaaagagaggccactcccgcctagatattcttctcatctcgtccgccggcattgtgggttgccaacaaatcgaagagtacaatacggtggcattcctctcgcatacccgttcatttttggtccctataatatgggagagaaaatgagaggcaatcttaatatctctcttgctctctttgtcgtgcattgtcattttgagattgaggctttataagacagagaaggagagacagtcattaaatattcaaccctctttttgagcgtccatt

SEQ ID NO: 1280 - DNA, 4641 bp, DROSOPHILA
caaaaccccccaaaaaaaaattggtcggcaagcaattcaaaagtaagagcaaccggagcgaacaaaaaagggaataacttactaaaatctctgaaagaaaaataaaaagactaacgggctcggcaagctgtgtttatttcgacaagtaattatatacttggagtgcaagcaaaggcgaaggaagtggaaggacaagcaacgaaatcgtgctcttatccgttcctgtactgtgtctctctttcgctgggagagtgtgtgtattggtgtgagtgtagaaatctgcaagaacagcaacgccaataaaagtggaatcgagaaaaaaaacgcagtggcgcgtgaatcacgagcaatctgaatcatctctctacaaaaatacctgtttctgttggcgcatcatttataccaattaaatcctaaaggatggaacaccacgaggacaacgcgcagttggacaactacttgcagaaccgcctggccgaaagtctgcaaatttgcggaggcgccggcgagcataatcctcatctggcagacgctactggggggaacggctgcgctcctggcattgcgccctcaaagtcggacgaagtcgacggggaagaagacgaggagtggaagtacatacacgaggtgcggcagagtgaaaagcttcaacaggaaaagcttccactgacaaaggaaaccggcaatggcttcgggcccggacgggactcagataatcaagttcacggaaacggagctgccgctgtcttcaatctgtacgaagaggacgtggaagtgatcaagaacgatggtgacttctcgacaaattctaacaccactacttcaacggacgaggtagttgccaggcaggcccaggagccaaaccagttgccggagcagcttcaacagcagcagcagatagaatcacaaggtgttcacgaggatccccgtcaggaagatgaggatgagcacagctccgtggccactacttatggaacaagcagtctcagtgagaacaactcctcgcctttagatcaggaggaggtcgttatggtggcccaaacggttggtcaagagcagttagtggacttcgacaacaaggaaaactcctattttgttaaaaacctggaagaaaaccactcgcagctaaaccccaatgctgtggcctttgtgcctggcgttggctcacaatcatcctctccccttcctgctgctgaagatccactacctggtgttcagccccgcccatttctaccgggagggacccttgacgatttggtggcggaaagtccgcggaaagaattcgcccgaatcaacatggatggtattgccgtgcccgacgagcgggaatttgacattgaagcggatatgcgaccccacgagttggagcaggaatcggacacttttggggcaggacacctggagatgcagttgttgaacggtataggaaccgctgaccaagcagccttaagggatgttctggatcacggtccagagacaagtgtcgatatggagttgccactagatcaggtgcccaacgacgccgacatcatgaaacaatcgatttatgccgagcacaactcctccattgaagatatcttaaattccgtgcaacctttgccaattcagacttgtgacgataaggaactaattcatgtggaagagaaagaacatgtctcgaagtcgccttctacagaggagctccagtttcagtccgacttcccaaacaatcaggaatcgcacacattattcaataacactgagcaggatccaatgcaggcttcattttatttggaacatacctctcaaaaggctcaagagggctgccaggagcaaatgcagcttcccgctgagtgctctgatatttttgccgaccagagtttattgctagacaccagtgcaccccagttgagctccgaagcagactcgcctgtggcgaaattggagctggaatcccagcaagctggcattgtagacatcacaccttcgcccctttcttccactgcagagaaacatctggttgaagacaccaaggagctagttgaggagtacacgttggatccggaatcccatttctttggggttgtttcatctcaagctcctctacagaacgacgaggaaaatgctgtttttgaatcagtttctggttatgaaactcaaaactttgatgaaatatcatctccaccggaaggtattaatccgtttgcccagcccttcacgcccgcccacctggtgatagagcaggcgaatacaatgatggaggatgtgggaggtatgcctataccagcttccgaggactttgctatatgtgataaagttgctagtaagtcttcaaatgaagtagaggatcataggagtgagcaacaagcctttgtaaaggaggagctgctgcaccctgttggagatgttgttgcccaggttgaaaatcttggcactgaaaagaacttcgttgttgaagaagagcgacttcctatttctgtttcagatgagataccgctttcttcggcttcaaaggagaaactgttgcctgatactacagatgagcaactgctgacttctgctttggaggagaaactgcgctctgttgctccagaggagtcagtgtcaactgctgccgatgggcagtcaatttctcagtttgatgaatatgttatcgcaagtaataaacctttggaagatattttagaaccggaaaaagatgtcgaagttgcgaaaagtttgtctgaaaaaacttctgttgctacagtggctggaggtgctgtggttggtgctaccaaaacccactcagccaccaaagcaggatctacagcagctagtgcaaaatcgaaaacagaaacccttgtaatgaagaagactacagcgagttctacttctgtttacggggcaaacaagtcggccgctccacgtccaagtaccgcccgccttggaatcaaaagtaccagtatagctacaaaaacttcgactacatcttcactaactggaaatccccgaaagtcactaagcagtaatgtaggatcaacagttaaaccaccaaccaagttaagcggcacacgaccagctacagctccagtgagcaaggtaactttaggggccaagaccataactaacaagccgactgcaagtggtactgcatctgataatgtaaccaggacaacacttcgccctttggtcagtaccaacgctcgcagaccagcaacaagtggaacaggatctgtagcctcctcaactgctcgacgaccagttacaaatgcaaaaggatctgctcctggcagcgctgcttcaacaaaagttcgccctgcggccacaatgacagccccagtcaagcctaaagttttgtcgccgcgcagcaccatttcctccaccaccactgtgcgaaaggtgcctagcacaagtaccccttcattttctactcgtagccctaacaagcagcaatccaatggattgggcaagaataccagctctaccaccacttccactgctaccgcaactatcacaaaatctttcacagctcgctcagctccaaagtttacgcattcagctagcttaacctataacaatgggagtacatctcgtcgtttgctggttcctggaagctcctctactacaactacgtcctctcttaggaagtcatcaccattaaaggcagcaccaggcaaagctgcttccaagccattgacaccgcaatccaaagatggcacggctaagtcatcgccggctgtattaaaagctcggaattctactttgatgggcggggaaggggtagcaccatcaaatgaatgtgtcccaacacctaatggtcagatcaatgcggaagaagtggtcaagcttaagggaaagggcctagcagaagaggttaagattattgaagagcaaaagcttcacgaacaagatgtccctgcccataatgctgaagtgccccttttggatttttaatatgtatcctaaattccagatcacacaaacctaaaattactttattaatactgaaaacatattgagaaaaagtgtttaaaacgaacagaaaaaaatttcgaagacgtaataagaaaaacgatgaatacaatagcatcctggtaaccaaattaggaatttttgcttattgaacttatttatatacgattataccctcgatttcttgctacatattattaaatcattttatttcaaaaaataatgaactactgtaatgaacgcagagcgaataaatgtttgtgctattttgtaacgaaaacgaaagataaatgtcaccaagtgttctgttatttaaaaattaaatatttacttttgaaatgctttaaaaaaaatttttgctcacgttcttaaattcttaaattaaatttcgtacaacttttaaacttttaacagcagaaaacttcgaaaacgttaaaagaaaaatgaagaatacagtagcatcctcttgcttaccaaattaggattttctgctcattgaacttatttatataatcttttactttataccatagtgaactaatgtttgtgctactttgtaaccaaatcgaaagatcaatgtcaccatgttctccgttatttaaaaatataacaattacatttaaaatgtttttaatacattttttgatcacattcgaaatttcattaaattgcgtcaaacatttacaaattgtcctttatcaaaaagaatta

SEQ ID NO: 1281 - protein, 1163 aa, DROSOPHILA
MEHHEDNAQLDNYLQNRLAESLQICGGAGEHNPHLADATGGNGCAPGIAPSKSDEVDGEEDEEWKYIHEVRQSEKLQQEKLPLTKETGNGFGPGRDSDNQVHGNGAAAVFNLYEEDVEVIKNDGDFSTNSNTTTSTDEVVARQAQEPNQLPEQLQQQQQIESQGVHEDPRQEDEDEHSSVATTYGTSSLSENNSSPLDQEEVVMVAQTVGQEQLVDFDNKENSYFVKNLEENHSQLNPNAVAFVPGVGSQSSSPLPAAEDPLPGVQPRPFLPGGTLDDLVAESPRKEFARINMDGIAVPDEREFDIEADMRPHELEQESDTFGAGHLEMQLLNGIGTADQAALRDVLDHGPETSVDMELPLDQVPNDADIMKQSIYAEHNSSIEDILNSVQPLPIQTCDDKELIHVEEKEHVSKSPSTEELQFQSDFPNNQESHTLFNNTEQDPMQASFYLEHTSQKAQEGCQEQMQLPAECSDIFADQSLLLDTSAPQLSSEADSPVAKLELESQQAGIVDITPSPLSSTAEKHLVEDTKELVEEYTLDPESHFFGVVSSQAPLQNDEENAVFESVSGYETQNFDEISSPPEGINPFAQPFTPAHLVIEQANTMMEDVGGMPIPASEDFAICDKVASKSSNEVEDHRSEQQAFVKEELLHPVGDVVAQVENLGTEKNFVVEEERLPISVSDEIPLSSASKEKLLPDTTDEQLLTSALEEKLRSVAPEESVSTAADGQSISQFDEYVIASNKPLEDILEPEKDVEVAKSLSEKTSVATVAGGAVVGATKTHSATKAGSTAASAKSKTETLVMKKTTASSTSVYGANKSAAPRPSTARLGIKSTSIATKTSTTSSLTGNPRKSLSSNVGSTVKPPTKLSGTRPATAPVSKVTLGAKTITNKPTASGTASDNVTRTTLRPLVSTNARRPATSGTGSVASSTARRPVTNAKGSAPGSAASTKVRPAATMTAPVKPKVLSPRSTISSTTTVRKVPSTSTPSFSTRSPNKQQSNGLGKNTSSTTTSTATATITKSFTARSAPKFTHSASLTYNNGSTSRRLLVPGSSSTTTTSSLRKSSPLKAAPGKAASKPLTPQSKDGTAKSSPAVLKARNSTLMGGEGVAPSNECVPTPNGQINAEEVVKLKGKGLAEEVKIIEEQKLHEQDVPAHNAEVPLLDF

SEQ ID NO: 1282 - DNA, 4893 bp, DROSOPHILA
agggtgaaatctgtgcgactaaatgtgccatcagccagccacccaaaagggaaacggacacaaacggaacatctgtcgcaaataatgctactcactgataacttatagaaaatctcacttgatacattttttaaggaactaaagattttttgctttgctttagcaaatttcaagtactaaagaagaatcgctgttaattctctgaatatagttcatatttttgttaactattgctttaatcaattcattaaaagtaataagcaagtaaaaagtaaaaaaaagtaaagtaataatattcataagatttatagtagctttgtataattattgctaaatatatgaatattctaaaacaaatagattgggtattaagtcggcttcgacacgaattagaagattaaattcagttataaatttttgttaaattgtaataaactttaaattcattaatgatatgttattgattttaatgcttaatttccttcaaaattatttaatatacaatgcttgctgtattttacaataaaatcaactaaattttgtgggtttcgtcaagccaaaggctaatgacttggcttaaccgaatgttgtgttgtttctcgatcaggctcgacttagtctcgtttacttgagttaagctcctattttcactaatcccctggaatccgcaattcgttgactcggcaactctgcctgcctgggaatacctactcaaatactcacttaaatctcactccgagtgtgaactcattggatttggggtggttatgcactcactcactctccgattgagcgcaactgcgctgctgcggtgaaaagttctcagtctgcggacggcgatcgttgggctgcctacctgcctcagctctgcctctgccgctgcccgcgtcgccaggtaagagagtccctcggtttcactcgtggactcgtttcggcttcgacccgattcgtttttagctggtgcccgtggactcggaggatcagtatccttttggcatctcgcgagcgcggtcgtctgccgctctcctttgaatgaacatttaaaatactattctatacgattcgataaccagaacgatctttaacgcgtaccgcttgttaagtttttgttgttcggacattactaagaagtacgtgcaataattgttataactattttcgtactcgaaccaaagttattgtgttgtgaaaaagaccaaatcgaaatcgaactatcttggattatctcccacttggatatacaaattaaaatcgttacaaaatggattacaaaaacgatattaattccgacgacgatttcgactgctccaacggctatagcgacagctatggctccaatggacgcatgtccaatcccaatggattgtcaaaagcagaacttagaaaggtgagttcgctcttttgcgatgaaattggactcgcaaactaaaaaatagcagagtttattagcaccctcgatcgttttgaaccttttcattttaatggcttagaaaatgtaaagcattaaattaattttaaaaatcaagtgaaacccttgttttatataaacaaagatatcccttaaactgaaataaattcctacgaaataaactaattgattccctttcttttctagaccaacaaaccgattatggagaaacgtcgccgagctcgcattaatcactgcctcaacgaactgaagtcccttatcctggaggcgatgaaaaaagacgtaagtatcttgcccgagcgtcaaagcagaaaaggagcggtccgcccgcgaattagaaactagcccccgatcccttttggttcactttcttataaataatgttagtccacaaaaaaaaacctttaaggcacaagtgtccgaagggcggcagaactacaaaagaacaaaaaaatgtataaaaaacgaactcctacgacacaagaactgaaaaaaaaaacacaaaccaagggctctaattgagtattaaattttattgatgatcattacactagagcgccgacgaggagtcagtcaagagaccaaaaagtgttaacaagtcgaggaattacgcagaaatcgccggagatgcgaacgaaaccagtttccaaggagtgatcctgctgtgagaaactacaaagcagaaatcaagtaaaatttgccgccgcagaattctgcaggagagccggaccaaaaatcaaataagaaagacattgagggaaaaaagcaaaagtaaacaaaaggttcagacaggggagcgggggaggttgagggggcggggctggcgagcgacctgcgtgggaaccttttgctaaaatatgcagtcccagcggcgagaaagggacgaacaatcggggaccgaagactggcgaagatcgcactgcgcgaaaaaagaagatcaggaagaacgatttggaatcttctgtgcccaaaaagtcttcatatgagatcacaaacgataagatcggcgagtagtttattttagaaccacttactaaagacagtcacttttccatcattagtattcacttgccagaaaatttgactttaagccccctttttgctcagtgcacagtagcaagatcagtcgttcttctcgctggagttgctgaatctcaccttggtcgtgtgatatttacagagtggactcgactgaagtggactgcagattacacgcgaatagttggacatatgaggcacgaaacgtgcttcttaacttcgctttttcccaagctattgaacttgttgtagggccccaaacaattagcccgaccatctcccaccccatccccatttcatcattatctgactttggttccttcgtcttctatacttttagccggctcgtcataccaaactggagaaggccgacatacttgagatgacggtgaagcatctgcagtcggtgcagcgccagcagctcaacatggccatccaatcggatcccagcgttgtccagaagttcaagacgggattcgttgagtgcgcggaggaggtgaaccgctatgtaagccaaatggatggcatcgataccggtgttcgtcagcggctcagcgcccatcttaaccagtgtgccaatagtctggagcagatcggttcgatgagcaacttcagcaatggataccgtggtggcttgtttcccgccacagctgtcacggctgctcccactccgctgtttccctcgttgccgcaggacttgaacaacaacagccgcacggagtcatcggctccggccatccaaatgggtggacttcagctaattccctcccgcctgccctcgggagagtttgccctcatcatgccgaacacaggttccgctgctccgcctccgggaccctttgcctggccaggatctgcagcgggagtcgcagctggaacagccagtgccgccttggccagcattgccaatcccacacatctaaatgactatacacagagcttcaggatgagcgcgttcagcaaaccggtcaatacctcagttccggccaatcttccggaaaacctcatccacacactgcccggccaaacgcagctgccggtgaagaacagcacaagcccaccgctgagcccaatctcctccatctccagccactgcgaggagtcccgggctgcctcgcccaccgtggatgtgatgagcaagcacagtttcgccggcgtcttctcaactccgccaccaaccagcgcggagacctccttcaacaccagcggatccctcaacttgagtgccggaagccacgacagcagcggatgctcgcgaccgctggcccacttgcagcaacagcaagtgagctccaccagcggaatcgccaagcgcgacagggaggcggaggccgagtccagcgactgctccctggacgagccctcgtccaagaaattcctagctggcgccatcgaaaagtcgagctccgcttggaggccgtggtagatcaaccgcacaggccacttctatgttacgtttatacattgttaatttatttcattgcaattttttcaaagatcacttcaatgctttagaaccccattaagtttcaacgatttctatatgtttttatgtatccccgtttcgctttcttcattttaagttcagctgtgattttgtatattttttgtgtagttctcgtttaagcgctttatacgactattatgtagttcattaaataattatgttctttaatgtttcattaactgctcaagtatttaaacaattaaacgtgtttctatttaagttatgtagttttcattgtatagcgtttatcattaggtcattcacgtttctatattagtgttttaatttaacgattgtaattttaacttttaggtaatgcaaaattcgatggagtgaaaataatgataataaaaaaaaaatgctgcaaaagaaaaatccatccaaatttaatggttccttggttcttaactgattagaattggaaaattcaagatcgcatcaacaatcaatagtacttgaactcattgaaaagtcggaagctgaattcaaatcaatacggaaacagccttatcatgtatgttcgatgttttcgcaaagtttgattgaaaagataactcaatcgaaagctcccaatccatgctatataagcaataggcggaacacatttagtgtgtcaaaaactaaattattgcaatcaagagcgcgcagtgactttcaggcgtgcattgaaaaatctcagaaattataaaaacaatttaattgaaaaattttaattttaccatgccaggaaatctgtttcaagtgttactaactgtggcgatcctgccagctattagtttggcatctagttctgaagatggtctgcaccattaccgtgcttctccaaagctcacgggtcctgtgaagctcctacacgatcccgaggacaccattctgaacaccttggatggcgctctggagaagatctccaccatctaca

SEQ ID NO: 1283 - DNA, 1569 bp, DROSOPHILA
cgcgagcgcggtcgtctgccgctctcctttgaatgaacatttaaaatactattctatacgattcgataaccagaacgatctttaacgcgtaccgcttgttaagtttttgttgttcggacattactaagaagtacgtgcaataattgttataactattttcgtactcgaaccaaagttattgtgttgtgaaaaagaccaaatcgaaatcgaactatcttggattatctcccacttggatatacaaattaaaatcgttacaaaatggattacaaaaacgatattaattccgacgacgatttcgactgctccaacggctatagcgacagctatggctccaatggacgcatgtccaatcccaatggattgtcaaaagcagaacttagaaagaccaacaaaccgattatggagaaacgtcgccgagctcgcattaatcactgcctcaacgaactgaagtcccttatcctggaggcgatgaaaaaagacccggctcgtcataccaaactggagaaggccgacatacttgagatgacggtgaagcatctgcagtcggtgcagcgccagcagctcaacatggccatccaatcggatcccagcgttgtccagaagttcaagacgggattcgttgagtgcgcggaggaggtgaaccgctatgtaagccaaatggatggcatcgataccggtgttcgtcagcggctcagcgcccatcttaaccagtgtgccaatagtctggagcagatcggttcgatgagcaacttcagcaatggataccgtggtggcttgtttcccgccacagctgtcacggctgctcccactccgctgtttccctcgttgccgcaggacttgaacaacaacagccgcacggagtcatcggctccggccatccaaatgggtggacttcagctaattccctcccgcctgccctcgggagagtttgccctcatcatgccgaacacaggttccgctgctccgcctccgggaccctttgcctggccaggatctgcagcgggagtcgcagctggaacagccagtgccgccttggccagcattgccaatcccacacatctaaatgactatacacagagcttcaggatgagcgcgttcagcaaaccggtcaatacctcagttccggccaatcttccggaaaacctcatccacacactgcccggccaaacgcagctgccggtgaagaacagcacaagcccaccgctgagcccaatctcctccatctccagccactgcgaggagtcccgggctgcctcgcccaccgtggatgtgatgagcaagcacagtttcgccggcgtcttctcaactccgccaccaaccagcgcggagacctccttcaacaccagcggatccctcaacttgagtgccggaagccacgacagcagcggatgctcgcgaccgctggcccacttgcagcaacagcaagtgagctccaccagcggaatcgccaagcgcgacagggaggcggaggccgagtccagcgactgctccctggacgagccctcgtccaagaaattcctagctggcgccatcgaaaagtcgagctccgcttggaggccgtggtag

SEQ ID NO: 1284 - protein, 435 aa, DROSOPHILA
MDYKNDINSDDDFDCSNGYSDSYGSNGRMSNPNGLSKAELRKTNKPIMEKRRRARINHCLNELKSLILEAMKKDPARHTKLEKADILEMTVKHLQSVQRQQLNMAIQSDPSVVQKFKTGFVECAEEVNRYVSQMDGIDTGVRQRLSAHLNQCANSLEQIGSMSNFSNGYRGGLFPATAVTAAPTPLFPSLPQDLNNNSRTESSAPAIQMGGLQLIPSRLPSGEFALIMPNTGSAAPPPGPFAWPGSAAGVAAGTASAALASIANPTHLNDYTQSFRMSAFSKPVNTSVPANLPENLIHTLPGQTQLPVKNSTSPPLSPISSISSHCEESRAASPTVDVMSKHSFAGVFSTPPPTSAETSFNTSGSLNLSAGSHDSSGCSRPLAHLQQQQVSSTSGIAKRDREAEAESSDCSLDEPSSKKFLAGAIEKSSSAWRPW

SEQ ID NO: 1285 - DNA, 4155 bp, DROSOPHILA
ccgtttcctcaataaaatctgtcatgatctcgacgccggcttggccgccctgcagcaggcgctggaacgtgatccagccaacactcgtgtggccctgcaaatgatcgatttgtgcctacagcgcccaaaagtcgatgagcaggaggtagtcgaaattatggataagttcatggctcgtgcggacatcgaacccgatcagaaggttttgtttgcccagcgcaaagtggagttccttgaggatttcggcagcacggccaggggtctacaagacgcacagcgcgctctgcagcaggcactcactaaagccaaggaagcgcaaaagaaaaggtaagaaatccatgaagatgtatccacactcattcattaatcatggacattccaatagtgatggcagtcctagtcgcaaaaactcatcaagcagcaaagaaggtcctgtccccacaggatccgcggcggcagcttacaacaatggtggctcggccgcagcagtcgcaggctacaactatggagcagcaaatccatactatggtcagcagaataccgcagcagcctatccctcacagacgccacaacaggcgtcctacgactcttactacaatcagtggggctacggttccggtggggccagcgccaacagtggtggtagcggctacaactacggccagtggagcggttatggcaactactattaagttcgctgcctagatgtaacccactccgccacctgtagctctaagacgctacggcttgtttagttttgccttgctgctctgttaagttgtacacatctaattgtaattttttatcaacccctatttgagcccacaaaataaccccaccattgcgaaaaataaaatataccagctttttatcggtccaccataatcgcgttgcttgtatttagccaatatatgcttgaaataagtcgaattatgcctaaatagaaaattaaatatacagattgacagtgagcgcgctcttcgcccggctcaactgaagtctacaggttgggtcgataccaggtcacctcgcccccgttgcatccggttacaaggagcggttccctggggctaaacttggcgcacagaacgacgtcctggtgttcggtgatcttggctagctcaaccagtttccgcggtttgcttttcacctcctcaaacgcctgacatttcggatagtcgcagcagtcctcactgtaaccaaagagtcttaccccattgccgtacggcgagcagacaacccgaccgtccgcggagaatccaggttccttgatgaagcccggtttggtgttggtctcggcggcatagtaaagcagtttcttggcattcaccagtattgaatgaccgttttccttgaacgttggcgttgtcacaggactattgaatgatcgcagacgcagcctgtttccgatctctaagcggactgtggtgtcgctattgttgctggagctggagctgctgctggagctactgctactggagctactgctgctgctctggttgctttctgtgggcggcggggtggtcagggggcgaggactggtgctgctgcccatcagactatttgcccccaattgtcttagcggaagcactccgctgctgatggcgtacacaaagttatagccgctgacatggttattggagacgcgtgcacggttctgtcggatggcccgctcctggactgtgacctccgccgcccagatgtccggtatgaaggaatccgagcgtgtcaagactgaagggttgtcagaggcgccacgccctgctccagagttatccagttggaatacttgtacactgctgacccgcaacggtctccgtgcctgtctgggagtaaggccaaccgtatcctggtcctgggattcattcaacgagctgcggctggctagtgtggtggacactcgctttctcttgggctgtggctccacctcgtcctgctcatcctcgctgcgcaccggctcctcgttgatgtcgtggatgcaggtccactcgctctgctcgtcgcagctgacgttcctcgtcagcatgcagcaacagtgcgggtgaatctgcaatgccatgatcatctcggcgtcgttgttctccggaaagtcggtgaccagctccacgcggttcttcttttgacgcttggagaacacatgatcgtactttgcggcctgcgggatatactgttcgcccaactgcataagtcggtagataccgggctggaaaatcaaacgggcttattagttgaccatctatctacatatgtaaccatttcatatatctggacgaaacttaaaatcttgaaccaaactgaaaatcacagcgatatttacaaactttcttaccctgaatccgcacagatctttgtggagcgtggtgaggtcaaggtgatggataatcataatgtatccaccgcttgtgcagagaaccagcttatcgcccgtgggcgaaatcctgcagcgcatcagtccactggcatgaaatacgcgctgcgagataaggccctgttcagtctgcgaattgatgtcccaagtgaagatgctgccatcgaagccggagcttacgagcaacttgtccttggaggagtactcgatgttcttcacccagttggagtggccgtggaggacgcgcaacttctgcttcatgttccgcaggtcccacagtgccacagtaaagtcatctgaaccagtggcgaagaggcgctcgtcaaaaaatctggagcgaggattagcaacgaacctcctcgaaggcaacttctacacttacttgatgcaattgacactatctgtgtgggcgtccggtaccttaaagatctccttctgtgtgatggcatcgaagacgaggacgcacttcctctccgtggcggccacgacaacgttcccatcggcattgaactccaggttgaagatggccccagtgcgtcccgcatccgtgggccagcagttggcgtggtagctattaaacatgttcatcgagctgtaaatccgccgcatcagggagttgtcgtcgctccggtggatgtggaagccactttcgcggcggctcaagtaccgctccatcgtgtgggctctgggatctcttaagtggatcggaaaacctagaggagtgtatgggtgtgtgccttctcgcgatttcacaggcaccgcgatgcaatttccccgtggcctttcttgtgtttattctgaaaccaggggtgcaacgccgtgctgcttgtaaccgatttctttttacaactgaacaatcaagaattaagaaagttgaacaatggtagattcatcaatggtagataatcatctggacttaaaatatccttttttggcacaatactctgtaaattaatggaatcgattctttttgcttcgccgtacgatgattaacttgaagtatttttcatccaaagcacttattgcaattcaatatattctgaaattacgatgatacaatttcatagtgtagccctgaaaacgaagtgcttttaacaccacttgtaaaaatagtaaacaaacatctttttagtaaagacgtacaatttgtttcagtatttattctgcaactatataacattatttatttataaaaatttttgacaaattttttatatttagtgataagaaatagccaataatgtgattttattggctaaatattttttttaacgagtttcaaaaattatacttaaaatcaaatttgctaattttgagataagcaaaaaattcgatcctatcgatagcacatcgatttctaccaaccttgttagccgctgaccaacactaagcgtattggaataaacaaaatgcaagttcaactggagataaaacctttaatcatgctaaattaccggtgaataaagcctttcgagacaaattttaagatccggccgaaatggatcggtttgcttttaagatcgacgctgccctcaaggcgaatctgtgcacgatctgtcgtctgtgcggcatcgataatccaggaaaagtgccaatacttttgccaaatgaagaagacaccatcgacctggacgagcctaggatgtcccagaagatctacgagctggtgggcttcactgtgggtgtttttcttaaaaatgttcatagccaagttaaccaacgccctttgcaggtgtccgtggacgacaaaatgccgcagacaatttgcagccagtgcgtggataaaa

SEQ ID NO: 1286 - DNA, 1978 bp, DROSOPHILA
agaaaggccacggggaaattgcatcgcggtgcctgtgaaatcgcgagaaggcacacacccatacactcctctaggttttccgatccacttaagagatcccagagcccacacgatggagcggtacttgagccgccgcgaaagtggcttccacatccaccggagcgacgacaactccctgatgcggcggatttacagctcgatgaacatgtttaatagctaccacgccaactgctggcccacggatgcgggacgcactggggccatcttcaacctggagttcaatgccgatgggaacgttgtcgtggccgccacggagaggaagtgcgtcctcgtcttcgatgccatcacacagaaggagatctttaaggtaccggacgcccacacagatagtgtcaattgcatcaaattttttgacgagcgcctcttcgccactggttcagatgactttactgtggcactgtgggacctgcggaacatgaagcagaagttgcgcgtcctccacggccactccaactgggtgaagaacatcgagtactcctccaaggacaagttgctcgtaagctccggcttcgatggcagcatcttcacttgggacatcaattcgcagactgaacagggccttatctcgcagcgcgtatttcatgccagtggactgatgcgctgcaggatttcgcccacgggcgataagctggttctctgcacaagcggtggatacattatgattatccatcaccttgacctcaccacgctccacaaagatctgtgcggattcaggcccggtatctaccgacttatgcagttgggcgaacagtatatcccgcaggccgcaaagtacgatcatgtgttctccaagcgtcaaaagaagaaccgcgtggagctggtcaccgactttccggagaacaacgacgccgagatgatcatggcattgcagattcacccgcactgttgctgcatgctgacgaggaacgtcagctgcgacgagcagagcgagtggacctgcatccacgacatcaacgaggagccggtgcgcagcgaggatgagcaggacgaggtggagccacagcccaagagaaagcgagtgtccaccacactagccagccgcagctcgttgaatgaatcccaggaccaggatacggttggccttactcccagacaggcacggagaccgttgcgggtcagcagtgtacaagtattccaactggataactctggagcagggcgtggcgcctctgacaacccttcagtcttgacacgctcggattccttcataccggacatctgggcggcggaggtcacagtccaggagcgggccatccgacagaaccgtgcacgcgtctccaataaccatgtcagcggctataactttgtgtacgccatcagcagcggagtgcttccgctaagacaattgggggcaaatagtctgatgggcagcagcaccagtcctcgccccctgaccaccccgccgcccacagaaagcaaccagagcagcagcagtagctccagtagcagtagctccagcagcagctccagctccagcaacaatagcgacaccacagtccgcttagagatcggaaacaggctgcgtctgcgatcattcaatagtcctgtgacaacgccaacgttcaaggaaaacggtcattcaatactggtgaatgccaagaaactgctttactatgccgccgagaccaacaccaaaccgggcttcatcaaggaacctggattctccgcggacggtcgggttgtctgctcgccgtacggcaatggggtaagactctttggttacagtgaggactgctgcgactatccgaaatgtcaggcgtttgaggaggtgaaaagcaaaccgcggaaactggttgagctagccaagatcaccgaacaccaggacgtcgttctgtgcgccaagtttagccccagggaaccgctccttgtaaccggatgcaacgggggcgaggtgacctggtatcgacccaacctgtag

SEQ ID NO: 1287 - protein, 621 aa, DROSOPHILA
MERYLSRRESGFHIHRSDDNSLMRRIYSSMNMFNSYHANCWPTDAGRTGAIFNLEFNADGNVVVAATERKCVLVFDAITQKEIFKVPDAHTDSVNCIKFFDERLFATGSDDFTVALWDLRNMKQKLRVLHGHSNWVKNIEYSSKDKLLVSSGFDGSIFTWDINSQTEQGLISQRVFHASGLMRCRISPTGDKLVLCTSGGYIMIIHHLDLTTLHKDLCGFRPGIYRLMQLGEQYIPQAAKYDHVFSKRQKKNRVELVTDFPENNDAEMIMALQIHPHCCCMLTRNVSCDEQSEWTCIHDINEEPVRSEDEQDEVEPQPKRKRVSTTLASRSSLNESQDQDTVGLTPRQARRPLRVSSVQVFQLDNSGAGRGASDNPSVLTRSDSFIPDIWAAEVTVQERAIRQNRARVSNNHVSGYNFVYAISSGVLPLRQLGANSLMGSSTSPRPLTTPPPTESNQSSSSSSSSSSSSSSSSSSNNSDTTVRLEIGNRLRLRSFNSPVTTPTFKENGHSILVNAKKLLYYAAETNTKPGFIKEPGFSADGRVVCSPYGNGVRLFGYSEDCCDYPKCQAFEEVKSKPRKLVELAKITEHQDVVLCAKFSPREPLLVTGCNGGEVTWYRPNL

SEQ ID NO: 1288 - DNA, 7208 bp, DROSOPHILA
aacggacacacatcgaggaccactcgatcctggacgtgtgacaaatgcacagtggggagatatacatacctctgccgaactttcccaggtcgccgcccctcttggcggagctgcagtcggagtaggagcgggccagctcgtcgaatgtggcctcctgctggacgattttgttgcgatagacctcgaggagcagctgggcctcctccttggtgcgcgtgatgttcgcctcgcgccacgagctgggacgccgactgcccttgtgcttaaccagcagatgcaggcaatgcacctcgtccggtgcatctccgccgccggcggatcctccgcccgccttcttcgccggctctgtgggctgatcccactgcgactcctttgtgtacatattgagataatagctcattcctgcaaaatcaatcatgatcaatcaagtgcaggttcagtttagcgtgccggttccgcattccgccggaaaaccgccggcatggcacgagcgggactgcacacgatgcttacctgtggagcggctagtgcgcttctcccagccgtccggtagttgctcggcatctggcatgctgttttcacttaatttgagttaaattacaaatagttttcggaataaaataaaccaccagtgtgaccgcgccgaacacgctttgagaacatccatcaaaatcgatagcgcctgccatcgacatatcgatacacatggtggcgaattcgccaaataaggtgctggcacgtgctaactgcggtgggtgcactcgctaaccgcagatacagctgaggccaatataatagcagcgaactaacaataatgtgctgatatgggctattctgatatgttatatgtatcttttgccgaaaaattagcacataacttaattaaatctattccaatacctccttcaatccgcgacacgaatagaggaatttcaatttttctaatgtttattcaggggattaataaaaataaaataaatacgtgggcatttgtacaattagttttagtgcttccttgactttattacaggctagctttaagtaggttaacatttaaaaggactagcacaggggagtaatcctctcagctcagcgtatgtatatatatatatatatatatatatatattgcgtatttgtaggcatatgtgatatacatacatatgtatgtatatttgcattcaatatactcatgtggttttctcgcagggagtgggcgaatacttggcgttcttggagttagctaattatttagttaggggcgggagcaagtgagctaataaaaaaatttaaattaattatacaaaacaattaaatacattttataaaagtacaaacacacgatcttcactcacgacctgaaggaagggcttggcttggccctttcattctttttccctcgatacaattttgctttgtcatgtcttctggggcagctactctgtcacggcagctgcccagcgcatcttcccagcgaacaacattcgcatccggctaacagaggtctaacttaatgcttaatgaccaatttacaactcgatggggctcctctaacgggctaagattagtgggtaacacctctaaggtgcctctattcatttcataaaactaaactcacattgcaggcgtgctcttcgacttctggttaataaatgcacttcccgaggccgattcactagctctgacagggactcgaaggcgccaatcgagacaagcaagacaaaaactagcgccttttaggcgctttccttgcggagacctaaatggccacatagcggcggtgcatgaattagggaaatttaaaagaactactcgacgatgctccttcagttggctaaaattataaatacaccttgaaggcgctccagccgtggaagcacttggtgaaacggcgcgactccttgttcttcatcgtgaggaagagcttcctcggccgctccggctgcttgatccgcatgtgctggatgtagacctgggcggacttgtaggccagcttcacctccacctcgctgcaacgcggtcccatccacaggaagacgtgctcgccgttgtccaggatcatgatatcgtcgtcggccagatcgtcctggcaaaagtcggcgcacttctcggccaccgtgtagtagccgcgctcgttggagcaccggaacagccgcgtgtagttcatgtactcggcgtccgtatcgtaaggcttgcggccgcccagcgccacccagaagaagttctccggctcgtcgccctcgttgagaatctgcaaaggatggatgaaaagaaacgattaacaagagcgtgtaccttaatataaacatatgtacaatatattccacaaaacagcccactacatggttgaaccacattaacacatggaacccacctgtaagctcacccacggcgagttgaacatctgctcggcaatatcctgcaccagtttggcctcttcgttgcaggccttgctgcctatccacacgtacacaatccccgactgcgaatcgtcctccgtttcaaatggcacatggagtatgtagctgaaataatgcgtatggaatataaatattggagcgactactactatgttcgctatcttttggatatatataaataatactgtgtcatatcacgtaggcttccaggaatttcagtttcaaccaacgataagacaagaatgttgatccaataaaatcgcacttgtcatacatctcaaaaaaaaaaaactgggtgattattaccacccacagtaataaattattggtaatttgctcaccagaaggttagttgagatgcactgcatccggattaatttggataaggcgagtggtgagcgcaccgccgttcgatcgcaggtgaaagaactcaactggggacttgcccttcgcggtgtgcgccttgtccttccgcttgccggtgtggatgatgaacttccgcttgaagtgggacatgaacttgaggttctcctgctgctggaagatccgcaccacctccagctcctcgccgaacatcgccttgaacttcttttgcagtgtaaaggtaaacgtgagccatcccatattgccggcattgcgtccctgccaaaagtaaacgacgcactggatctcgtcctctggctgattgttggcgctggatttactgacgtctgcggctgggttagcaccatcttcggagccattctcgggctcctcgatgggaatgcaatagcggcagaggaacacatagcattcgccggtgtaaaagcgacccaattcctcctcgggcagccggacgaacttcttgttctccagtacaaaggcctccatcatctccagatcgtagttccactcctcctccaactgttccgcctccgccaatggcatggccgactgtcggggcataaatagcgcggcaagatccgtgcgcgtctcctgctgccgagcccactgtgtgagattagcccctgtcttggccaccgacttcgccgttctcgtgaagtccacggccattacctcatcccagccagcgaacttggttcggaagatctgcatttcattgccctcgggtacacgcatcaccagcgcataatccggacgatccatcatgttaaagagctcccgactcaacttgacagcggccgctcggaccaaacgcgtcgacttcttgccaaaccaaacgaacagatcggtgtaacagtcgagtatgtagacgtgcttgctatttagcaaggtatggcaaagtttttgctcaggtaactccacttgcggcaactccagataacccatgccaagttgcacctggtagaggcgaggctgcaccggctgatagtcctctggaacgtgctcctttggtggctctgcggcgtctgcctcctccgaggtcatgcccagtccttgccagaattcggcactctcctcgccctgccgctccaactggatttcacatttgttcttgcgctccgttttgctgatcttttccgccattaacctggccttggagttcagcgtgttcttcgatctttcgcccatccaaatgtaaatatgggtgcccagatccaagacaaaggcgtggcggggatccagggaggtaatggcaggagccactggctccagatgaatggtagcgccataggcgtgcactaaatacaatctggtgatgtgtatcatctcttctatggtatagaaaccagtagctgtgcgtccgccctcgatgtagatgacttccgtctcgaagagggacagaaactgctcggattcatcgccctgctcctcgcgaaccgttcgacatcgggcgcccagaaagtttcttaggttcactgcatgaatggcagcgcaagctcgtttgtccagcgtggcttcgttgcctatccaaaagaatatttcccaatcgagcaggcccaggtcatcgaacttggtcttgaggactatgtagcagtcgccctcgtagaatttgccatgcaccacctcctcaattttgttgggcaggaagttctcgatttcccaaatggtcaagcccggcagctggccatcgtccttctcaaagaacttggagtagtccagttgcggtttttccagtgactcgtcccatctcttaggtttgagcgactctggctttccgtcctcgggcacagcacccgcctcgttatccttatcctttgccacatccttcatgcccttgagcaccttggcagcatcctgatcgccttcactgcgaggaccgcgtcgtaaacgtattttcctcgccgttgaatccttgggcgttgctgacgatggcatggaaggcggcacagcagccccagctaaccgaagctgagtctgcagactaaaatctatgttgtagaactcaagactggtggctttactcgcttcgcttggcttgggcggcatcactagctccggattgttgcgcaagtccaactggtctaggccctccagcaggtgaatggcatcgggcagggttataagccgattgcagctcaagttgagctgcttcaaagcaccgcatcggcagagtccctctggcaccatttccagcaggttgttggctgccgaaaacacctccagagctccgagtttgccgatgcccgaggggatgccctcgaagtttagcttattgtcgttcaccagcaatcgtcgcagctttggtagtttgcagagggcagccggcagcgcaaccaattgattccgcgacagattcagcgactccagacgctgccaaagctctacaccggcagtcagttcggttagctcgttgtcgctcagattcagtcgcaccaaagtgaccacattgtagacgcagtctggcagcttgggcagcgaattgtgcgacaggtccagttcgcagagattggccaaactgtctatgctagtgggaaaattgaggagcgtgcgctgcgtgccgctcatcttcaggacctccaagctctgcagcgagggcaattgccgcagttgaaacagctccagcggattgtgcgataggtccagggttttcagattaatcagacgtcgcgtctgcggcggcagtgtctccagtctattgtgcgacagatccaggaacagcagatccgttagatggatgaacagcggcgtgggtatgctctcgatctgattgttgctcaggttgaggactatcaggttcttggcccgctccaaaccctcgggcacctccttcagtttgttgtgcgacaggtccagcgtggtcagctcctccaggtgaaacagctccggcggtatgccgctgttcttcagctgattgtgccgcaggtcgagggatcgcaggcaggacagctctgtcagctcgccaaagatcttctccagtcggttgtggttcagcgacaggtgctccagcttctgtaggtggcctagctcctcgggaatctccgccagctgcgtgcgatccagtgtgagccactgcacccgcgacatctgccgcatggagctggggaatgttgcctgcaatggaatcaatcatatttcgggattatctctgctccgcacttatgactaatgctcaggtgcttctcggtgacctgtttcttagcttcttttttttttagaacctgaaccactccgaaaaaacaacaaggctgcaactgtttttgctggttgtactcacgctgaaatcatttttcgtaaagtccacaccgcgcacaaacggcagcacgctcattttgaccacataaaatgttatatttgttttatatttgggctcaagctgctggccctgtttttcgtttcttcttctttattttgttttttttttgcactaaaaaaaagaagactaagtggtgaccgttcaccgctcacccgagcaaacggcatggtcgcaccttcgtatgcagttgccggaactggccacactgcgcattttacgagggttaggcaacactaaagtgttggaaatcacagaaggcacactcgcgttgcacttcgtaggtttggtgcagctgatttatcatatagaaggggagctttgtgggcttaaaaaatttggttcatatacggcaataattacatttgtgaccaaaatagagtttctcgcctttaaatattaattttgcatggcttttaacggtacgtccaccactgtattatacgagcttaagtcgagtgtgaccgttaatgtctaaaaatggtgtggctaatttaaaaattattttgaattcccggaaccgagctaaaagcgacttaagttttggagtttttgattctttttgaaaacagagccgttagtttcaaatggtcctatggacttacaaataatacgttgaaaactaacggagtaagtgattgaaaccaaggtttttgtttttgatttatttattatttatttaaagaaattgaaatacacatataatttgtataaactaaatttgattaactatacatttgatgtgtgccttaagacttaaatataataaattcctttttgctgatctgtgagagccgaacgcttcggactatgttagtttgctcaaaacggtcacattggatggggttcgggtttttcgaagggtccttttcgtcctgcgaaaaaacagtaacatcgtatcgtgagcataatccagagggtgtgaccaaattgaacgacacgaaattttcatactttgcccagtcttcggaatgtgaaggtcctcgctcgtgtgttttgttgcctttgcaccgatattgcaaaaacataaaatcaaacctagcctcaaaaacaatacaaacccgaatgaaatttaatagatacgccagaaatacg

SEQ ID NO: 1289 - DNA, 4686 bp, DROSOPHILA
aaagaagaagaaacgaaaaacagggccagcagcttgagcccaaatataaaacaaatataacattttatgtggtcaaaatgagcgtgctgccgtttgtgcgcggtgtggactttacgaaaaatgatttcagcgcaacattccccagctccatgcggcagatgtcgcgggtgcagtggctcacactggatcgcacgcagctggcggagattcccgaggagctaggccacctacagaagctggagcacctgtcgctgaaccacaaccgactggagaagatctttggcgagctgacagagctgtcctgcctgcgatccctcgacctgcggcacaatcagctgaagaacagcggcataccgccggagctgtttcacctggaggagctgaccacgctggacctgtcgcacaacaaactgaaggaggtgcccgagggtttggagcgggccaagaacctgatagtcctcaacctgagcaacaatcagatcgagagcatacccacgccgctgttcatccatctaacggatctgctgttcctggatctgtcgcacaatagactggagacactgccgccgcagacgcgacgtctgattaatctgaaaaccctggacctatcgcacaatccgctggagctgtttcaactgcggcaattgccctcgctgcagagcttggaggtcctgaagatgagcggcacgcagcgcacgctcctcaattttcccactagcatagacagtttggccaatctctgcgaactggacctgtcgcacaattcgctgcccaagctgccagactgcgtctacaatgtggtcactttggtgcgactgaatctgagcgacaacgagctaaccgaactgactgccggtgtagagctttggcagcgtctggagtcgctgaatctgtcgcggaatcaattggttgcgctgccggctgccctctgcaaactaccaaagctgcgacgattgctggtgaacgacaataagctaaacttcgagggcatcccctcgggcatcggcaaactcggagctctggaggtgttttcggcagccaacaacctgctggaaatggtgccagagggactctgccgatgcggtgctttgaagcagctcaacttgagctgcaatcggcttataaccctgcccgatgccattcacctgctggagggcctagaccagttggacttgcgcaacaatccggagctagtgatgccgcccaagccaagcgaagcgagtaaagccaccagtcttgagttctacaacatagattttagtctgcagactcagcttcggttagctggggctgctgtgccgccttccatgccatcgtcagcaacgcccaaggattcaacggcgaggaaaatacgtttacgacgcggtcctcgcagtgaaggcgatcaggatgctgccaaggtgctcaagggcatgaaggatgtggcaaaggataaggataacgaggcgggtgctgtgcccgaggacggaaagccagagtcgctcaaacctaagagatgggacgagtcactggaaaaaccgcaactggactactccaagttctttgagaaggacgatggccagctgccgggcttgaccatttgggaaatcgagaacttcctgcccaacaaaattgaggaggtggtgcatggcaaattctacgagggcgactgctacatagtcctcaagaccaagttcgatgacctgggcctgctcgattgggaaatattcttttggataggcaacgaagccacgctggacaaacgagcttgcgctgccattcatgcagtgaacctaagaaactttctgggcgcccgatgtcgaacggttcgcgaggagcagggcgatgaatccgagcagtttctgtccctcttcgagacggaagtcatctacatcgagggcggacgcacagctactggtttctataccatagaagagatgatacacatcaccagattgtatttagtgcacgcctatggcgctaccattcatctggagccagtggctcctgccattacctccctggatccccgccacgcctttgtcttggatctgggcacccatatttacatttggatgggcgaaagatcgaagaacacgctgaactccaaggccaggttaatggcggaaaagatcagcaaaacggagcgcaagaacaaatgtgaaatccagttggagcggcagggcgaggagagtgccgaattctggcaaggactgggcatgacctcggaggaggcagacgccgcagagccaccaaaggagcacgttccagaggactatcagccggtgcagcctcgcctctaccaggtgcaacttggcatgggttatctggagttgccgcaagtggagttacctgagcaaaaactttgccataccttgctaaatagcaagcacgtctacatactcgactgttacaccgatctgttcgtttggtttggcaagaagtcgacgcgtttggtccgagcggccgctgtcaagttgagtcgggagctctttaacatgatggatcgtccggattatgcgctggtgatgcgtgtacccgagggcaatgaaatgcagatcttccgaaccaagttcgctggctgggatgaggtaatggccgtggacttcacgagaacggcgaagtcggtggccaagacaggggctaatctcacacagtgggctcggcagcaggagacgcgcacggatcttgccgcgctatttatgccccgacagtcggccatgccattggcggaggcggaacagttggaggaggagtggaactacgatctggagatgatggaggcctttgtactggagaacaagaagttcgtccggctgcccgaggaggaattgggtcgcttttacaccggcgaatgctatgtgttcctctgccgctattgcattcccatcgaggagcccgagaatggctccgaagatggtgctaacccagccgcagacgtcagtaaatccagcgccaacaatcagccagaggacgagatccagtgcgtcgtttacttttggcagggacgcaatgccggcaatatgggatggctcacgtttacctttacactgcaaaagaagttcaaggcgatgttcggcgaggagctggaggtggtgcggatcttccagcagcaggagaacctcaagttcatgtcccacttcaagcggaagttcatcatccacaccggcaagcggaaggacaaggcgcacaccgcgaagggcaagtccccagttgagttctttcacctgcgatcgaacggcggtgcgctcaccactcgccttatccaaattaatccggatgcagtgcatctcaactaaccttctgctacatactccatgtgccatttgaaacggaggacgattcgcagtcggggattgtgtacgtgtggataggcagcaaggcctgcaacgaagaggccaaactggtgcaggatattgccgagcagatgttcaactcgccgtgggtgagcttacagattctcaacgagggcgacgagccggagaacttcttctgggtggcgctgggcggccgcaagccttacgatacggacgccgagtacatgaactacacgcggctgttccggtgctccaacgagcgcggctactacacggtggccgagaagtgcgccgacttttgccaggacgatctggccgacgacgatatcatgatcctggacaacggcgagcacgtcttcctgtggatgggaccgcgttgcagcgaggtggaggtgaagctggcctacaagtccgcccaggtctacatccagcacatgcggatcaagcagccggagcggccgaggaagctcttcctcacgatgaagaacaaggagtcgcgccgtttcaccaagtgcttccacggctggagcgccttcaaggtgtatttataattttagccaactgaaggagcatcgtcgagtagttcttttaaatttccctaattcatgcaccgccgctatgtggccatttaggtctccgcaaggaaagcgcctaaaaggcgctagtttttgtcttgcttgtctcgattggcgccttcgagtccctgtcagagctagtgaatcggcctcgggaagtgcatttattaaccagaagtcgaagagcacgcctgcaatgtgagtttagttttatgaaatgaatagaggcaccttagaggtgttacccactaatcttagcccgttagaggagccccatcgagttgtaaattggtcattaagcattaagttagacctctgttagccggatgcgaatgttgttcgctgggaagatgcgctgggcagctgccgtgacagagtagctgccccagaagacatgacaaagcaaaattgtatcgagggaaaaagaatgaaagggccaagccaagcccttccttcaggtcgtgagtgaagatcgtgtgtttgtacttttataaaatgtatttaattgttttgtataattaatttaaatttttttattagctcacttgctcccgcccctaactaaataattagctaactccaagaacgccaagtattcgcccactccctgcgagaaaaccacatgagtatattgaatgcaaatatacatacatatgtatgtatatcacatatgcctacaaatacgcaatatatatatatatatatatatatatatacatacgctgagctgagaggattactcccctgtgctagtccttttaaatgttaacctacttaaagctagcctgtaataaagtcaaggaagcactaaaact

SEQ ID NO: 1290 - protein, 1066 aa, DROSOPHILA
MSVLPFVRGVDFTKNDFSATFPSSMRQMSRVQWLTLDRTQLAEIPEELGHLQKLEHLSLNHNRLEKIFGELTELSCLRSLDLRHNQLKNSGIPPELFHLEELTTLDLSHNKLKEVPEGLERAKNLIVLNLSNNQIESIPTPLFIHLTDLLFLDLSHNRLETLPPQTRRLINLKTLDLSHNPLELFQLRQLPSLQSLEVLKMSGTQRTLLNFPTSIDSLANLCELDLSHNSLPKLPDCVYNVVTLVRLNLSDNELTELTAGVELWQRLESLNLSRNQLVALPAALCKLPKLRRLLVNDNKLNFEGIPSGIGKLGALEVFSAANNLLEMVPEGLCRCGALKQLNLSCNRLITLPDAIHLLEGLDQLDLRNNPELVMPPKPSEASKATSLEFYNIDFSLQTQLRLAGAAVPPSMPSSATPKDSTARKIRLRRGPRSEGDQDAAKVLKGMKDVAKDKDNEAGAVPEDGKPESLKPKRWDESLEKPQLDYSKFFEKDDGQLPGLTIWEIENFLPNKIEEVVHGKFYEGDCYIVLKTKFDDLGLLDWEIFFWIGNEATLDKRACAAIHAVNLRNFLGARCRTVREEQGDESEQFLSLFETEVIYIEGGRTATGFYTIEEMIHITRLYLVHAYGATIHLEPVAPAITSLDPRHAFVLDLGTHIYIWMGERSKNTLNSKARLMAEKISKTERKNKCEIQLERQGEESAEFWQGLGMTSEEADAAEPPKEHVPEDYQPVQPRLYQVQLGMGYLELPQVELPEQKLCHTLLNSKHVYILDCYTDLFVWFGKKSTRLVRAAAVKLSRELFNMMDRPDYALVMRVPEGNEMQIFRTKFAGWDEVMAVDFTRTAKSVAKTGANLTQWARQQETRTDLAALFMPRQSAMPLAEAEQLEEEWNYDLEMMEAFVLENKKFVRLPEEELGRFYTGECYVFLCRYCIPIEEPENGSEDGANPAADVSKSSANNQPEDEIQCVVYFWQGRNAGNMGWLTFTFTLQKKFKAMFGEELEVVRIFQQQENLKFMSHFKRKFIIHTGKRKDKAHTAKGKSPVEFFHLRSNGGALTTRLIQINPDAVHLN

SEQ ID NO: 1291 - DNA, 3842 bp, DROSOPHILA
cagcctacgagggcaaggttccctacatcgtgggtctgctgttcagcggcaatggaaactggggggtgcggtggctcgatcatcggaaacacctgggtcctgaccgccgcccactggaccaacggagccaggtggagtgaccatcaactacggagccagtctgcgcaaccagccccagtacacccactgggttggaagcggaaacttcgtccagcaccaccactacaacagcggcaacctgcacaacgacatctccctgatccgtaccccgcacgtcgacttctggcacctggtcaacaaggtggagctgcccagctacaacgaccgctaccaggactacgccggatggtgggccgtggcctccggatggggcggcacctacgatggcagcccactgcccgactggctccaggctgtcgatgtccagatcatgtcccagagtgattgcagccgcacttggtctctccacgacaacatgatttgcatcaacaccaacggcggaaagtccacctgcggaggtgactccggtggtcccctggtgacacacgagggcaaccgcctggtcggagtgacctccttcgtttcctccgccggctgccagtctggtgctcccgctgtcttcagccgtgtcactggatacttggactggatccgcgacaacaccggcatctcgtactaagtgaatgagcagtaacgaatttagcaaattttaaagaacactctgtctgcagtcatttagattacggatgagagactccaaataaataattgcaatgagaatataaccacctgttcagctatgaaatttgagggcaggagatggagagatttagagagtcacatcgaaatagttgtttacttagcatcacttgtgagggtgtttgtatctgacatctttgtttgcacagcgtttatgtctggatacgtgacagtttccaaatggaatatcgttctatttggctcagttcgtacctgaacaagaaccagtctacatcagtaactcgtggttcacagtgctctggtcataatgttggatcggcactgtctttatattgggattttccagcttataatttgggttggagtagcgaacggtgagttttactcatcggtggacagtatgcaggatctagcacaagtggaagaagaactcctaaatgccacgcgttcatatgtggagtcccagcaaaagcagcttgacttctaccgcaggtactacgacacaatacaaagtagtctggaaaattacttgagtatttaacaggtatgttgagcaaataaaacgggaacatgagtgggcgacatcccaattaaagctggatgactatctcgggcacccattgcacgccttcagattgatcaagcgattggttcgggattgggattcgctgatctttgaacccatactcgccaacaacgccagagaaggtaggtattgttatcccataattaactcatacaataaattctgaacacccaaaagagttccgtgcattcgtggaggttctgagcagggacttgggctacccagatcaatctgagctccagggagccatcaagggcttggccaggctacaaaaggtctataatctcgcgacctccgatttggccgatggcatcatcggcggtttaaactacggctcggacttacgatggcgtgaatgctacgaaatcggtgtacagctcttcgatctcggagaatatcagagatccctggaatggcttcaagttgcatttatccttcttcgaaatagtccaagagaggaaaaagatgcggatcactacctttcagatatccgtgagtatgcatccatggctaattttgagttgggcaatccaaagaaagccgcaagactactgagtcagatccttgaatcgcaaccaacacattccgcccagcaaactcaaaagtatctggagagcagggtgccaggaaagaatgtccaggagacgaaaccctcttggttttccaactatactaggttatgccagggcagaagattgcccgaagagcgaagtggtgatcccttaagatgctacctggatggaaaacgccatgcttacttcaccttggctccacttcaagtggaaccggtacacttggatccggatataaatgtttatcacggaatgctgagctccaaacagattttgtccatcttcgaggaagcggacaaggaggagatggttaggtccgctgtggccggaagtggtggagaaggcaccgtgagggacttgcgggtcagtcagcaaacctggctcgactacaagtccccggtgatgaattccgtaggtcggatcatccagtttgtatctggattcgatatggccggagcggagcatatgcaggtggccaactacggagttggagggcagtacgagccgcatccggattactttgaggtcaatctgccgaagaacttcgaaggagatcgcatctccaccagcatgttttatgtgggttatagttctttatttagttctgaatcttttacaagcttctgatattgtagctttctgatgtggaacaaggaggttatactgtcttcaccaagcttaatgtgttcctgcctcctgtcaaaggagctctggtcatgtggcacaatcttcatcgatccctgcatgtggatgctcgcactttgcatgctggctgtccagttatcgtgggttccaagcggagtaagtacactttcctcttttcataagtatctaaaaactgtatttatcacttcatgttcatattacagttggcaacatctggatgcactcgggataccaggagttccgtcgtccctgcaacctcacctcagatagctacaagtcgctagcctatcgagattaggtgtaatttaatataataaacatttaataaattaatatcttattttaattggcgttgagtgaattttctagtcgaagtccctgtaatgcagtgagatttcctgtcccctttcgagatcacagggccttacattatcctgattgcgttcacgaatccatacattggcaactagtttaatgaattcattataaactgaattagtagcaaggtataaaaagatttacttactccatttgctgccctgaagaacaggacaagcggcgtgtttcgttcgaaaatcctggtctccagagggatgcagattgtaccaaaagagaaggcttcctctttctggagtcaccagcagtggcaaaaagggaaaggcggttcctccaccggcctctacatcagctagctggaaagtattcaattaattattctaaaagattgagaaactgcaataaactcacgtagtaaatgcccgttgccattcggttgccatgtagatctccttcttggtaaatgtggttttcgggaaagctgtcccaatgcggctcatagtgtccaccgatcccatagtttgccacctgcagatcctctgcataatccatattcaaacctgagaagtcacctacatgtcggctaagaagtttcgttgctgcgttcctagagtaattgaaggaggcaccttgactggtgcggaaggcggctgccgtggaacctccatttccacccaaagagtacacagtggatctttttatcctaggcctagctgttttctgaagggagtccgagtctttggagccaataacctgatgcaattgcaccaccagtgggtccaggtggagctcctccaacttaaatggtgcgtagcccaagcgactcttccttaagcgacacctaagatttctttgcttggatggaagtggtgccaactcgcctcgacacacctgctcgtacatacgaaactcccgggactcatggtagtctccaggtcttcgtgctgtcaagtgaagcaacc

SEQ ID NO: 1292 - DNA, 1611 bp, DROSOPHILA
ctcgtggttcacagtgctctggtcataatgttggatcggcactgtctttatattgggattttccagcttataatttgggttggagtagcgaacggtgagttttactcatcggtggacagtatgcaggatctagcacaagtggaagaagaactcctaaatgccacgcgttcatatgtggagtcccagcaaaagcagcttgacttctaccgcaggtatgttgagcaaataaaacgggaacatgagtgggcgacatcccaattaaagctggatgactatctcgggcacccattgcacgccttcagattgatcaagcgattggttcgggattgggattcgctgatctttgaacccatactcgccaacaacgccagagaagagttccgtgcattcgtggaggttctgagcagggacttgggctacccagatcaatctgagctccagggagccatcaagggcttggccaggctacaaaaggtctataatctcgcgacctccgatttggccgatggcatcatcggcggtttaaactacggctcggacttacgatggcgtgaatgctacgaaatcggtgtacagctcttcgatctcggagaatatcagagatccctggaatggcttcaagttgcatttatccttcttcgaaatagtccaagagaggaaaaagatgcggatcactacctttcagatatccgtgagtatgcatccatggctaattttgagttgggcaatccaaagaaagccgcaagactactgagtcagatccttgaatcgcaaccaacacattccgcccagcaaactcaaaagtatctggagagcagggtgccaggaaagaatgtccaggagacgaaaccctcttggttttccaactatactaggttatgccagggcagaagattgcccgaagagcgaagtggtgatcccttaagatgctacctggatggaaaacgccatgcttacttcaccttggctccacttcaagtggaaccggtacacttggatccggatataaatgtttatcacggaatgctgagctccaaacagattttgtccatcttcgaggaagcggacaaggaggagatggttaggtccgctgtggccggaagtggtggagaaggcaccgtgagggacttgcgggtcagtcagcaaacctggctcgactacaagtccccggtgatgaattccgtaggtcggatcatccagtttgtatctggattcgatatggccggagcggagcatatgcaggtggccaactacggagttggagggcagtacgagccgcatccggattactttgaggtcaatctgccgaagaacttcgaaggagatcgcatctccaccagcatgttttatctttctgatgtggaacaaggaggttatactgtcttcaccaagcttaatgtgttcctgcctcctgtcaaaggagctctggtcatgtggcacaatcttcatcgatccctgcatgtggatgctcgcactttgcatgctggctgtccagttatcgtgggttccaagcggattggcaacatctggatgcactcgggataccaggagttccgtcgtccctgcaacctcacctcagatagctacaagtcgctagcctatcgagattag

SEQ ID NO: 1293 - protein, 527 aa, DROSOPHILA
MLDRHCLYIGIFQLIIWVGVANGEFYSSVDSMQDLAQVEEELLNATRSYVESQQKQLDFYRRYVEQIKREHEWATSQLKLDDYLGHPLHAFRLIKRLVRDWDSLIFEPILANNAREEFRAFVEVLSRDLGYPDQSELQGAIKGLARLQKVYNLATSDLADGIIGGLNYGSDLRWRECYEIGVQLFDLGEYQRSLEWLQVAFILLRNSPREEKDADHYLSDIREYASMANFELGNPKKAARLLSQILESQPTHSAQQTQKYLESRVPGKNVQETKPSWFSNYTRLCQGRRLPEERSGDPLRCYLDGKRHAYFTLAPLQVEPVHLDPDINVYHGMLSSKQILSIFEEADKEEMVRSAVAGSGGEGTVRDLRVSQQTWLDYKSPVMNSVGRIIQFVSGFDMAGAEHMQVANYGVGGQYEPHPDYFEVNLPKNFEGDRISTSMFYLSDVEQGGYTVFTKLNVFLPPVKGALVMWHNLHRSLHVDARTLHAGCPVIVGSKRIGNIWMHSGYQEFRRPCNLTSDSYKSLAYRD

SEQ ID NO: 1294 - DNA, 3572 bp, DROSOPHILA
acactgcaaacgtgtgcccatgaaagaacccaggatccgcttaaggatattgctcctgacgctggccagaaacttaaattgctggcgaagttttcgtggtgaagtcccgggaaagatttcaaaatattcctgacatccctggagagttgtggttgcaccaaaagcggttgacattcattgcattttgcaggaatactttaatatttttaagctttgtcttgtacttctatagttcaattagctaactaataaatactttaattgtcttttgttttacagaaacaatattagtgggcagtgcaggtatcacagtctactttgcagcatctttaacttttcatttcgtgcctatcccagctgaattccctgaattctatttcacaaattcaattttaatatttaagttagttgttatttcaatggaacccgctccttacatacaatttaagcttcatttataattccattaattaatgaaccccattacgatcctgacacctcatttcgccttttgcacagatattttcccattccatctgagtttgattgcgtatttctctttgaatatatggaaattgcagtagtatgcttaatgtataacaccgtttttatttccctcatttccttctattattttgtcggctgtgaattgcagagtgtcgggtgaatcattaattgcattgattttgattttaacgagccaggtaatgaaacgtcaacagtgtgaagtggccataaaccccagcggattgcttgtagaaaccctgaacatctgtcgcgtttaatgtttttaagctatttatgattcgataccctcgctaatcctttttggtggtccttataaaagtgtgcggattagccgtcagtcttttgccaaaaattggtgcgcggaaaacacgcaaaactcgcgtgttcgggttgcaattaccgggaaatcgctcctttgagaaatcttccttttttactttcatagcttaggtagtgatctcaggtagtttcccggaattaagttaggctgggtatcgcctatcgggatcggctacctgaacttttggcaccagctgccgggggtgaaaactggaccaggtagtctttagaagtgcacctatataaggtctgcgttcctggtctcaacagcacattcgtacttcaaccgtcaacatgagcatcagcactttcaacttccagttctacaactacaagcttagcccgtcctcaccgggattcggcagcacagcctcccgttcctcgtcctcatgcatcagcgaactggaaatggacattgatgaggacatgtccgcccagcccaccatcacctccacgcccaagccgcgctttaccagccaactggccgtggaactggccaaaacggagccgggtaatggcatatccccactgcgacccaaattgcatacggcccagaaacgctggtccatggagttgagggaaaaagtgctggaaatgtccaagcgaaataatggccaggagaaaccacaaaccgcacgacagcaggaacagcgacagccacaggaacagccactgcaacaggaggaactgcagcatcagcagcaggaacccactgtcaccgacaaaatcaacttcttcaacaagctgaccaacacctttgagtcgggtttcagcaagctgatgccccaagcaagctccaccaacaaccgcttcatagccatgttgcgcaccgcccgtcctcaaaacgttgccacaaccaccgccaacagcagcaccgccaacagtttcctgggcagcgaccacagtctcagtggttccgtgaccggacaagtgccaccacccaagcccaagagactgtcggccaccaccgcccagtttgccactccccatgtaccagccatgggcgtgggcaaggggggcagccagcgcaagtgctccctgcgccgcaagccttcgatggacaagtcgagggccaccatctcccgccagagttccagtgcctcagtacgaacccagaaccacgccatcatggaggacctcagtctagtggttcccgtgagattgcgcatcgcggagtacgagcagcgcatctcgatgagtgcttaggtccagaaactaggttaattgtaagttccaaaggattgccttactttagttataagttagcctaagcttctaaagacagttcaaatataagataaaatataaatatatatatgaaacaaaatgtaagcgtcttgttcttggcaagtgaggcattacaaatattacaatatttttaaaccattactcctttgcaatcggtgagtaattccacatatatatttcgatattctatttctgaccaaacccttttttattacacagttacattctaacaaatgactgtgactaatacggcaaaaattccaattccgaatagccaatatatcagttctaggggactgataaaacagaattgctaaatccacacactaccacaggttgtaaactgaatcacgcaagactccgtgctcccgctgtccgccgtgtccacacctatattcgtgtgcatacatatgcgtatattcactatgccaccacgcacctgttttgtttgccgaagcggaaaacaagaaaccgttagctttttaatgcctcaacctggggcattatcttatcgggaagaacacagagcgagagagagagagagagagagagaggggcttacagcacctacacctgaatgcccgaacacaggttatcgagcaaatattggtaactaaaccaaactgaaacccactgagctgttctgataagatagtcaacgcggcgtatgagtaatggggtggaactgaatcagcccagggacaacgaaacctactcaccccaattgtagccgctgttgtccacgtcgtacagctcccccaaatagtcatttggcatgatgagggctccgaacattttctcgggcttcagtcccgcgacggtgaggatatcatctgttccccgactgctgacatgcaccacgggaatcagagtgggcttctgcagggccagtggtttggttttcgggttgtccgcttccgcttttttgggagcgggcgtggcctttggaacctcaacgaattccgcctgagctttgggcttagtcaccttgaccggctccggaactgcattgattatttgatcctcgaactcctccgtcgatatattctcgttagccaggacaaaggccataaacccgcaggccagcgcacaaaccacaaacagtttgaaacgcatgttcacttgatttcgatttgtcacttaattggtaattcgttttttcgtttcactgctaaaagaaaaacacaaaggcatcaattaggcatccacaataaaagtatcactcaataagcactcaattcatgcgaatttgtacactatttttcctctgatatcctcattttctaacaattttcacttgatgacatcatcagttaaggcaatggcttatcagttctcttatcacttgtcaccaattttcaattttaactttaattaccaggcaggaaaacacgttcgttgcagcgagccgctcagctaagactgaagttaagttaactctaacggcccgatcgggg

SEQ ID NO: 1295 - DNA, 1572 bp, DROSOPHILA
cggaattaagttaggctgggtatcgcctatcgggatcggctacctgaacttttggcaccagctgccgggggtgaaaactggaccaggtagtctttagaagtgcacctatataaggtctgcgttcctggtctcaacagcacattcgtacttcaaccgtcaacatgagcatcagcactttcaacttccagttctacaactacaagcttagcccgtcctcaccgggattcggcagcacagcctcccgttcctcgtcctcatgcatcagcgaactggaaatggacattgatgaggacatgtccgcccagcccaccatcacctccacgcccaagccgcgctttaccagccaactggccgtggaactggccaaaacggagccgggtaatggcatatccccactgcgacccaaattgcatacggcccagaaacgctggtccatggagttgagggaaaaagtgctggaaatgtccaagcgaaataatggccaggagaaaccacaaaccgcacgacagcaggaacagcgacagccacaggaacagccactgcaacaggaggaactgcagcatcagcagcaggaacccactgtcaccgacaaaatcaacttcttcaacaagctgaccaacacctttgagtcgggtttcagcaagctgatgccccaagcaagctccaccaacaaccgcttcatagccatgttgcgcaccgcccgtcctcaaaacgttgccacaaccaccgccaacagcagcaccgccaacagtttcctgggcagcgaccacagtctcagtggttccgtgaccggacaagtgccaccacccaagcccaagagactgtcggccaccaccgcccagtttgccactccccatgtaccagccatgggcgtgggcaaggggggcagccagcgcaagtgctccctgcgccgcaagccttcgatggacaagtcgagggccaccatctcccgccagagttccagtgcctcagtacgaacccagaaccacgccatcatggaggacctcagtctagtggttcccgtgagattgcgcatcgcggagtacgagcagcgcatctcgatgagtgcttaggtccagaaactaggttaattgtaagttccaaaggattgccttactttagttataagttagcctaagcttctaaagacagttcaaatataagataaaatataaatatatatatgaaacaaaatgtaagcgtcttgttcttggcaagtgaggcattacaaatattacaatatttttaaaccattactcctttgcaatcggtgagtaattccacatatatatttcgatattctatttctgaccaaacccttttttattacacagttacattctaacaaatgactgtgactaatacggcaaaaattccaattccgaatagccaatatatcagttctaggggactgataaaacagaattgctaaatccacacactaccacaggttgtaaactgaatcacgcaagactccgtgctcccgctgtccgccgtgtccacacctatattcgtgtgcatacatatgcgtatattcactatgccaccacgcacctgttttgtttgccgaag

SEQ ID NO: 1296 - protein, 303 aa, DROSOPHILA
MSISTFNFQFYNYKLSPSSPGFGSTASRSSSSCISELEMDIDEDMSAQPTITSTPKPRFTSQLAVELAKTEPGNGISPLRPKLHTAQKRWSMELREKVLEMSKRNNGQEKPQTARQQEQRQPQEQPLQQEELQHQQQEPTVTDKINFFNKLTNTFESGFSKLMPQASSTNNRFIAMLRTARPQNVATTTANSSTANSFLGSDHSLSGSVTGQVPPPKPKRLSATTAQFATPHVPAMGVGKGGSQRKCSLRRKPSMDKSRATISRQSSSASVRTQNHAIMEDLSLVVPVRLRIAEYEQRISMSA

SEQ ID NO: 1297 - DNA, 4354 bp, DROSOPHILA
aaaaaggatgacacaccacaagactattcccagtattttatataaattagtttttatttttagatcttaaagttagttaacacagttgtcagggtgcggacggaatcagttaataatttgtacattcttgcagtttgttttacactttatgcaggcattaagatcacctaatttctacagttcagattataatcataatttcttgagcacaagcatttcggtttccacacataatttagtttttatacaactttttgaaatacaaggcagccctaatttacattactagcttttaagcataatttcttttaagaaatataccttttagctatagtgctacagtctataggcgatttgacgtttttataaacaatatatacatttccatttcgtatactttgagtcgggctactgacttccagaatttcaaaatgtatcccaagtgtagtcgaatcctggcaaatttattatcctcgacatctggcgtcgttccaggtgtttattttttggctggtggaatcaatcaagcgccaggtaagatggccacccgcattctccagtttatgacactctgtcacacaaaatttccaggcggctgcataaacgtagcgacataaataaacaatttaaaaatgcatgtagtaaacgtataatttgattaatagcgacagctagaatataaagagcacagaaaaaattattcataaatgttggatgtgttaaaatgaattatttatgactttacatgcaaatcaaagtttgcaacagtggcgtttccaaattaaaatgattcaattttttctttctacgttcattacctgcacatcaatttgtaattggatcccatgttatttaaaacaaataaggtaaccttggctgaaaaaaacatttgtttgctgaaatattcattgttaaatgctgcgaaagaattcatatttattgctgaaatgatttgtgtgaattatttaagctgaaaaaaaattggaaatcaatggattaattatgatttcagcttccactccatttccatttccaatccatatcccgatccagtgaccaatccaaaccaaactacaacaatagcgccaacgcctgtgaaagaaagaagaaacggcagggaacacgaaaaagtctggacaacagtgcccggcattaaacctataggattaggtgggtctggggaattgggacctggacgttggacgttggtttcaacaccgccacttgggtatttgctagaagaaaaaagcgcaagggaacaactcttttccaaaaaaaaaaaaaaaaaaaaaaaaccatagcaatgcatatatttgtatatgtaagcatggagctgtgaaacacgcagctagaaaatacttagaaaaggccaaaggtccggagctgtgagctgaaaccgtaactgcaggtgaaaatggattctgaaaattgggttaattgatgcttagtgttttgcttcagtagcggggaagagtgggcgtgggtggcgttgtttagcgccaagtggctaatagtttttgccacccccgccgcgtggcaaccggaagcagaaaccggaaatgcgcacaaggaaatacacacaaaaatcggcacggacgtatattctaagtttatgctaagaatatcatgaattctacactttgcgaaaagcgacaactcgatggtcttagaaaagaataatatttatttaaaatcatattctaagtgacgcgaacaatgtaatttaatttgtttgttcgatttgaatgaatgttattgtaggcggttttcatagaaacgattccgcataaacatttagcaaataccgaaatgacgacgtcgtttacgttgagggccaaaaggtaaaaaggtcagcaaactgccacgtaaatgccatgtatatatatactagtaattagcattaacccattgtcgaattatacacaccgggactgccttgttccgtgagattggcaatgagagtgggggctccactgctcagactcccgccacccgcgccaccggacgcggcaggacctgcagctccggccgctgcggcaccacttccggctgatccactggcagccgccagatcgagcgtctgggcaatgagaaggagcagcagcagggatgcgaaggtggctctaagcgttggccgctgcctcatcttgcaatttggtattttggctatgtgcttgttgtactcccgcaccggcatcaacatgttccattggttgcttcttggctccctggctacgatggcgctaattatggacgatgctctggaaataggaggggtaagtaggtcagtgatgaattggtttcggataaactgcatttgtagaattaaggcggcaaaaagcggtttgtttaatctcatttcgtgtatctcacatcttttttgatttttaaaaattcatctcatggatacaaattcgcttagctcgaatatccaactaaaccatctgccatacgactagtagcagttgcaattaatgttctttgcaagtttattgtagcacatcacacacgcagacacacacacatacgtacgcagcctcctgcaaaagtatcttatggatacgctttgtatctcaatgctgttcggtttgctgcacacacttcacttcaccaactggtcgcaattaaagttcctgcagtcctgtttagtcgacatctgctcggcacatacacgaaatgtatctcggccaaacatcaaaattacacatttggcatataaattgctcaatttaaaatattttgcttgtgtcgagatgctattaaaccaacacacaaaattacagacgctacgctaatgtatcttgtagatacaattgcggaaattgcactattatcacacaaccacgaacgacggcgcacccctcttcgcagggaaattccattttttgaacacccattggcataattaatttttcacttaatcgatttatgatcacttttgcttgttttcactttcatcccaactgcagttgttgttggaaagggttaagttacaccttaatttggttgattgaattatatatataacgatcaggcagttgatttggtttaagtctgcagcttagcagtttaaattaaatacgtctgccttaaattatgaatgaattttgggcaggacttgttgttaatcacaaaaaaaaatctttacaccttgtattttcgctgtcttcagtttgtatctctttgtttatatttatgcattgcacttgtgccaagagctttcagcttttcactgttttcccagactttttcccgcttcgcttttctggtggcgttggcgtgtgtgcgttgcttttgttacatttataaatggtttagagcgcacatgtgccgcacagcaccaaaacacacacgcacagctgtggctacaatttgtaactgtagcgcatttataaccgctggctccttcgatgtccttgctgccgttttcagatgctctccgttgcttgctgctttctgtttttcagcatttccaggactggcgggccaatgtttacacacacgctcaaaaacttttgttggtcgtcaacaaaccatcaagcatttgcgttatattgcttatcagcgaccgagatatggcagagggtattgggtactggttactgggtacttgttcctttcgatgcggtctgggcctcgtatttgatttacccttcggaaaagcggaaaacgtgctcacatgcggcttgcctgaattttccactcgtctctcggttcgcttttgttgtttcagtcaattgccgcattttaaaaacgcataaaattgctttatgtttgccttgccagtattcttcttatcctctccaccgcccttctcctgctttctttttttttttgttttttggcttatcctctggcgtaaatttatgcaaggcgccttagttaggggccacaaaactcgcacatgacagtcgacgagacgcgttggcgttgggttttcctccttccaatccaacttccattcctccaggaaaataatgcaggctgcacagctgcggttcttcaggtatgtgtgtatcttcgtcgccgggtaagtatctgtaagtggtgcataagtggcagagaaatgttattgatgatttatttgcatttggcattgatatatgctaatgtttttccctcgctatctgactctttcgttgcccgtctccctttaaaatgaaaacaaaaccaaaaaaggttgctcacggttccaggccatggattatgttatctttaaatgcggcctggcctgttggcttttcaatttttcatgccgccgccagcgaaagaagaaattattatggcattttccccatcttccctggactttcttaaagtcatttttatttgcatttcgtgatttcgaacagac

SEQ ID NO: 1298 - DNA, 547 bp, DROSOPHILA
cgtgtgtgttttgatacacgaaatgagattaaacaaaccgctttttgccgccttaattctacaaatgcagtttatccgaaaccaattcatcactgacctacttacccctcctatttccagagcatcgtccataattagcgccatcgtagccagggagccaagaagcaaccaatggaacatgttgatgccggtgcgggagtacaacaagcacatagccaaaataccaaattgcaagatgaggcagcggccaacgcttagagccaccttcgcatccctgctgctgctccttctcattgcccagacgctcgatctggcggctgccagtggatcagccggaagtggtgccgcagcggccggagctgcaggtcctgccgcgtccggtggcgcgggtggcgggagtctgagcagtggagcccccactctcattgccaatctcacggaacaaggcagtcccggcgttggcgctattgttgtagtttggtttggattggtcactggatcgggatatggattggaaatggaaatggagtggaagctgaaatcataa

SEQ ID NO: 1299 - protein, 174 aa, DROSOPHILA
MRLNKPLFAALILQMQFIRNQFITDLLTPPISRASSIISAIVAREPRSNQWNMLMPVREYNKHIAKIPNCKMRQRPTLRATFASLLLLLLIAQTLDLAAASGSAGSGAAAAGAAGPAASGGAGGGSLSSGAPTLIANLTEQGSPGVGAIVVVWFGLVTGSGYGLEMEMEWKLKS

SEQ ID NO: 1300 - DNA, 5504 bp, DROSOPHILA
gctgagttaataaacgcttaaaacaaatgtatgttcatctttggatatacatatttgcttttggggaacaacggatatcgttatctttccacagggttctatttttttttatatttttaacaaaggattggctactggagcgttgttcaatcactatagcactgaaaaagttgacagcctcaaaacttcaaacttttggcaggtctcccattttagttcactgatatataattctttatgtagactgacataaattttaattgtgatttttcggtaaatattgttacgataaaaatgggaacagcgagtgcgttatcttcaaaacaggatggatcccgagtcgtccatgaacattaacggactctatctggaggtccacaggtaatggggatccctttgcatatcgatgttacttgacaagcgagttgagcatgtgacatacaacgggttgccattgggcaaagagtaaaaatctattgttattttgcagatctgtcaacgacaaggtgttgggtggcaacagcaatgggtctctcaagtacatcaacccgattaagcaaggtgcgcgaaatccgcccgagtaagttacttgtaaagtaatggacctgagactccccgcgtcctagcagttccttgaatccgagccaacatgcgttgagccaacaactaacattttggtctttatagactcgactatgtggaggaggtggcctatgtcatcctccgtctattacataaggtagttttatgggatgcaccttgggatttatttcggggaactcgactatagcattctctcttgtttgtataccacaatactgtaataacaacattgtaatcaaaaaattgtatttctcattaatcgcaatcggcttttaagaaacaaaaaaaatggaaaatggaatatatttgaattatatacgctctaatcattgagatagcagtcttctttcgtgggcctgcaaagaaagcattaccaacaaaacaaaattaataaatattcatctactgacctcaagtgccagcttcagaaggtgctcgaaactcgaccgacccgtctggagcaccatcccgtaaaagactttgctccacgattgggtcagtagttcgaatggtgatccgaactccactagagtaccagcgtccagaaccatgaccctgtccgaatcgatgatcgtgttcaacctgtgagctatggtcagaactgtgcaatctctgaacttcctgcgaatggtggattgtatgagggcgtctgtttggggatctacatttgcggtagcctcgtccatcacaaggatgcggttctcgcggagaatcgccctggccaagcagaccaactgcctctgacctacactgtagttggatccgccctcggcaaccacactttccaggccattcggcagctcggatacctcatctttgaggtgcacctggcgagggaaaatggtttaattatagttatgattgtcaggtttggtaattactcacctcttctaaggcctcccacaatttttcatcagcatactgttcaaagggatccaaattgcagcgcagggtgccggaaaatagcacaggttcctggggaattatagagatcttgctgcgcagatcatgaagcccaattccaagaatatcggtgttgtctatcaccaaggatccttcgttgtaggacagcctaaagagggcatttataagggaggactttccggcaccagttctgcccacgatgccaatcttttcgcgtggcatgataatgaaattcagtgacttgaggactctatctgccttgggatcggggttgtaccttagacttagttgttccgcactgatcagaccctcttgtggccaattcatcggtggtttcttgtcgtctggggactcgaattctccctctgcttccaggtgcctatattctagcactctttccacagaagtcatggagttctccagctcagcggattgcctcattccccactgaacagtccccgtcatggacatagcctgggtaataactaaaccgatttgaccaggattatccacgggggggttaaaatagctcattagggttaccgatatgacgtaggccacgcaaaacagatccagatagtaaccaaaggctcgatttgtggacaggaatgtatagtagccggaactgtggatatcctggtagttatcgtattccttggtgagtaagtcctgagcttccatagctctgatggtggataggccatttaaagtggcactaaaatgggaatacataggggatctggctatggcttccaatcttttcaagtccctcgaagtgctcaagtagaatgtgcgaagaaaatgaaaagccaagaacatcgtgatggtatttatcaaataccacggatttgtgatgcacagaactcctataattccactgattgtaagaaatatctgtatgcaatcgagcatcactgcgggcaggatttcatccacttgccccaagtccatggcaaatcgattgaggattctgcccgatggattcgcatggaagaagtacagagcggtgcgggagactccttggaacatggtattgtgtaactgggtggacgagtgcatcgccatgctgaagaagagcagggttcgaagcagagcaaagattactagggctgcattgattccactgaagatgtaaatgtccgtagatgaagaggagtcgttgtttttaaccctgtgaacgaagatttattaattgtgaacaacatagttcaattaagcatacttaccagtaggaaaggaagtagtcacctccagaagccaaaatttgagtgcccagacagaagaaggcaaccaggatgaccattagccatccagagccggcggaaaagtatttcccatatatgcccaatccaattttcccttgggatcgcgactcctgagcaggttgtctttcattgtccagtatagactccgtagaggaatccaccgaagttacactgactctgcttacacgactactttgccgggagtaggtcgacttatcatttctggaatcgccttctgcattaacttgttcctgattagaatcgcccatttcctgagcctccgtggccaaaagtttcccaaagtcctggccacttttaagcatttcctcataggtgccaacagccgatatttttcccttgtccataatcactatgagatcggcatgttccagaaattgcagttgatgggtcaccagaatcaccagcttatccctgagaaagccacgcatgcactcctcgaataaatggcgtcccacatgggtgtccacagcactcaaaggatcgtcgagaaggtatgtatccgcctggcgataaacagctcttgccaaactgatcctcgctctctgacctccggatagggaagctcctctttcacccacaaaagtgcgatcgccgtggagcagttcgaaatctctttccaaagcacaatttcttatgacattacgatatcggtgcttatccatgggtagaccgaaaaggatattatccctaacggaagcattgaatagccagggttcctgagaggcatacgagatatctccctggacctttagctttcccgactcaccaggaagttctcctaagatggcttgtatgaggctggatttcccagaaccaacgggtccaatgacagccaccagttgcggtggacttaagctgatgttaatgttttccaaaacgggttccacgtgatcatgattccaacgggcttgaaaggattgcaatttcacaaggggctccccttcgaaaagcttatttgtttgtccacctttaaggtacaaagcttcagtctcacttctcatcatgaatcctttaattctgcgcagggttaccatcatctctgcaaattgcgacatgccgctcgggaagaatttgcacaccgtgcgtcgcaggatattatagaaagcggtaactgagaaagccctctccgccgtcaactctccgcccatcaggacgaatcccagaagacttacgaatattgcgattctactcagggtaatctcgaaggacagcagagtgccccggatgtagttcaccttcctaatggagctcatttcactgcgcctcagtctctcgatcagcctcccgaatggcttctcccaggtatacatcttgatcacctgaatacctgatataatctcgttcatcatcctaacccgctgatcagttctaagcgctgtttggtgtctcagtctcgaagtcagtcggctgagaaatgtttggattggcaggaatagaagtaggatcacgattccgtacagcgaagctactccaatctgttggtataggaagtaggaggatatgagcaactccagcggtcccagccatagaaagtgaaagtgtatcagagcgcgatcgaagcggcccagatcgttggatatgagattcaccacctggcccgtggttgtatcccccaaggcagtgcgactcagacggagtgcttttcggtagatagccgtgctcacagccactctcattttcatggccaggtgctagggaaagaatgttcttgtattacagttcataataataaataataatttaaaatcttaccattaggcccatcatgaggggatggaacatcagcactgaaaacagtatgctcagaatcagagttaatccataaatttgcgcccagagcccatctccatttccatttcgtgtgaactctgctattagagctcccaggattagtggtaaggtcgctctgtcaaaaagaaacttagagaatacattgatcgtatagccaaatagtccttctaacgcaccttgttcccagctcgagaactccaacaactatgccagacaggaaaagctgccatccgaataccttcaatataaccctaattatgcttggttccttttttggcgaatccccacaggatctgacttccgactgccaggtcgcgaagaatttgtcaccgagagtttccgctttgtgttcttttagagcattatatagatcagtgggctcaagggttttcttcctgcccttgaaaagtatgggcaacgcaaaactggaaaatatatacattaattaatatttaattatttgcttacatagctcggagattctaaaagacctgccttcaatgctgatacaaacgtgataatcttaagtgatagacatgatcctacgacttctgatatctactgataacagtaccgtatttagtacgattttccgcgacgaaattgttttgttatcattatagttttaaagaagctttaaataaaacataccaaaacattaaagtagaaaatattcccgcagattcccgtggatttgtttgcaattttttggcctgcatgcttttaagttttatttagttattctgctagcatgggcttatctaagtgaaatgcactatataaatagtttgttagattagctacttttcactttagttaaaactaaaactttccgtttagcgagaacaaaaatttgagataaaagcgtccgtggggtttcgccttttaacttgttctggt

SEQ ID NO: 1301 - DNA, 3391 bp, DROSOPHILA
cacctggccatgaaaatgagagtggctgtgagcacggctatctaccgaaaagcactccgtctgagtcgcactgccttgggggatacaaccacgggccaggtggtgaatctcatatccaacgatctgggccgcttcgatcgcgctctgatacactttcactttctatggctgggaccgctggagttgctcatatcctcctacttcctataccaacagattggagtagcttcgctgtacggaatcgtgatcctacttctattcctgccaatccaaacatttctcagccgactgacttcgagactgagacaccaaacagcgcttagaactgatcagcgggttaggatgatgaacgagattatatcaggtattcaggtgatcaagatgtatacctgggagaagccattcgggaggctgatcgagagactgaggcgcagtgaaatgagctccattaggaaggtgaactacatccggggcactctgctgtccttcgagattaccctgagtagaatcgcaatattcgtaagtcttctgggattcgtcctgatgggcggagagttgacggcggagagggctttctcagttaccgctttctataatatcctgcgacgcacggtgtgcaaattcttcccgagcggcatgtcgcaatttgcagagatgatggtaaccctgcgcagaattaaaggattcatgatgagaagtgagactgaagctttgtaccttaaaggtggacaaacaaataagcttttcgaaggggagccccttgtgaaattgcaatcctttcaagcccgttggaatcatgatcacgtggaacccgttttggaaaacattaacatcagcttaagtccaccgcaactggtggctgtcattggacccgttggttctgggaaatccagcctcatacaagccatcttaggagaacttcctggtgagtcgggaaagctaaaggtccagggagatatctcgtatgcctctcaggaaccctggctattcaatgcttccgttagggataatatccttttcggtctacccatggataagcaccgatatcgtaatgtcataagaaattgtgctttggaaagagatttcgaactgctccacggcgatcgcacttttgtgggtgaaagaggagcttccctatccggaggtcagagagcgaggatcagtttggcaagagctgtttatcgccaggcggatacataccttctcgacgatcctttgagtgctgtggacacccatgtgggacgccatttattcgaggagtgcatgcgtggctttctcagggataagctggtgattctggtgacccatcaactgcaatttctggaacatgccgatctcatagtgattatggacaagggaaaaatatcggctgttggcacctatgaggaaatgcttaaaagtggccaggactttgggaaacttttggccacggaggctcaggaaatgggcgattctaatcaggaacaagttaatgcagaaggcgattccagaaatgataagtcgacctactcccggcaaagtagtcgtgtaagcagagtcagtgtaacttcggtggattcctctacggagtctatactggacaatgaaagacaacctgctcaggagtcgcgatcccaagggaaaattggattgggcatatatgggaaatacttttccgccggctctggatggctaatggtcatcctggttgccttcttctgtctgggcactcaaattttggcttctggaggtgactacttcctttcctactgggttaaaaacaacgactcctcttcatctacggacatttacatcttcagtggaatcaatgcagccctagtaatctttgctctgcttcgaaccctgctcttcttcagcatggcgatgcactcgtccacccagttacacaataccatgttccaaggagtctcccgcaccgctctgtacttcttccatgcgaatccatcgggcagaatcctcaatcgatttgccatggacttggggcaagtggatgaaatcctgcccgcagtgatgctcgattgcatacagatatttcttacaatcagtggaattataggagttctgtgcatcacaaatccgtggtatttgataaataccatcacgatgttcttggcttttcattttcttcgcacattctacttgagcacttcgagggacttgaaaagattggaagccatagccagatcccctatgtattcccattttagtgccactttaaatggcctatccaccatcagagctatggaagctcaggacttactcaccaaggaatacgataactaccaggatatccacagttccggctactatacattcctgtccacaaatcgagcctttggttactatctggatctgttttgcgtggcctacgtcatatcggtaaccctaatgagctattttaacccccccgtggataatcctggtcaaatcggtttagttattacccaggctatgtccatgacggggactgttcagtggggaatgaggcaatccgctgagctggagaactccatgacttctgtggaaagagtgctagaatataggcacctggaagcagagggagaattcgagtccccagacgacaagaaaccaccgatgaattggccacaagagggtctgatcagtgcggaacaactaagtctaaggtacaaccccgatcccaaggcagatagagtcctcaagtcactgaatttcattatcatgccacgcgaaaagattggcatcgtgggcagaactggtgccggaaagtcctcccttataaatgccctctttaggctgtcctacaacgaaggatccttggtgatagacaacaccgatattcttggaattgggcttcatgatctgcgcagcaagatctctataattccccaggaacctgtgctattttccggcaccctgcgctgcaatttggatccctttgaacagtatgctgatgaaaaattgtgggaggccttagaagaggtgcacctcaaagatgaggtatccgagctgccgaatggcctggaaagtgtggttgccgagggcggatccaactacagtgtaggtcagaggcagttggtctgcttggccagggcgattctccgcgagaaccgcatccttgtgatggacgaggctaccgcaaatgtagatccccaaacagacgccctcatacaatccaccattcgcaggaagttcagagattgcacagttctgaccatagctcacaggttgaacacgatcatcgattcggacagggtcatggttctggacgctggtactctagtggagttcggatcaccattcgaactactgacccaatcgtggagcaaagtcttttacgggatggtgctccagacgggtcggtcgagtttcgagcaccttctgaagctggcacttgaggtcagtagatgaa

SEQ ID NO: 1302 - protein, 1014 aa, DROSOPHILA
MNEIISGIQVIKMYTWEKPFGRLIERLRRSEMSSIRKVNYIRGTLLSFEITLSRIAIFVSLLGFVLMGGELTAERAFSVTAFYNILRRTVCKFFPSGMSQFAEMMVTLRRIKGFMMRSETEALYLKGGQTNKLFEGEPLVKLQSFQARWNHDHVEPVLENINISLSPPQLVAVIGPVGSGKSSLIQAILGELPGESGKLKVQGDISYASQEPWLFNASVRDNILFGLPMDKHRYRNVIRNCALERDFELLHGDRTFVGERGASLSGGQRARISLARAVYRQADTYLLDDPLSAVDTHVGRHLFEECMRGFLRDKLVILVTHQLQFLEHADLIVIMDKGKISAVGTYEEMLKSGQDFGKLLATEAQEMGDSNQEQVNAEGDSRNDKSTYSRQSSRVSRVSVTSVDSSTESILDNERQPAQESRSQGKIGLGIYGKYFSAGSGWLMVILVAFFCLGTQILASGGDYFLSYWVKNNDSSSSTDIYIFSGINAALVIFALLRTLLFFSMAMHSSTQLHNTMFQGVSRTALYFFHANPSGRILNRFAMDLGQVDEILPAVMLDCIQIFLTISGIIGVLCITNPWYLINTITMFLAFHFLRTFYLSTSRDLKRLEAIARSPMYSHFSATLNGLSTIRAMEAQDLLTKEYDNYQDIHSSGYYTFLSTNRAFGYYLDLFCVAYVISVTLMSYFNPPVDNPGQIGLVITQAMSMTGTVQWGMRQSAELENSMTSVERVLEYRHLEAEGEFESPDDKKPPMNWPQEGLISAEQLSLRYNPDPKADRVLKSLNFIIMPREKIGIVGRTGAGKSSLINALFRLSYNEGSLVIDNTDILGIGLHDLRSKISIIPQEPVLFSGTLRCNLDPFEQYADEKLWEALEEVHLKDEVSELPNGLESVVAEGGSNYSVGQRQLVCLARAILRENRILVMDEATANVDPQTDALIQSTIRRKFRDCTVLTIAHRLNTIIDSDRVMVLDAGTLVEFGSPFELLTQSWSKVFYGMVLQTGRSSFEHLLKLALEVSR

SEQ ID NO: 1303 - DNA, 3026 bp, DROSOPHILA
ctgctaattgccgagggtaaaatcaattcggccctttacagggtattttaatggtattaatcccacattgcagctgtggaccgtgtctatggcactggacgtattcccggcaaggagttatacgcagacgtgtacaagcagaagccgataaagattacccaaaaggtcttcgtgcccgttaatcagtatcccaaggtggttttttatacaattagctatccactccgaccgcaaaatgaatccttacacttgcgcagttcaacttcactggcaagatcctggggaccaaggggaatgctctcttgcgctataaattcccacaacaaatattaatcttaatttttgatttgcatgcctattatgttttgattttgattcctgagcttgtaattttctatgataaattcaaaaactaatgaaataaaacgcattgaatgaattttataaattttttgcaatccgatctaactatgcccgatatacaatcaaaatatgcattacctaattaaacaattaacttactagcgttaaaagttagttagttatatatctaaaaaataaattgataatgaaataaagcggtatgaacttatcacatccttttatcaaatgaagcaaagtgaaacgattcaaaaaaactttataatccattacaattttataaatgaacaagaatattaattaaacataaaataattaaaatatttcaggttttctatcttttttgtaagatattttaaattcccttaggactatgaatccgaagacttttcatatgataagccgtaaatatacacatacaccggcaacttgaagagcaagatttcctcaaatacacattttcaacagtcccaataaaaaatatcccaaaatcactttctgattatataagaaatatttaatgtacaactaatatatggaaaatgttcccgtttttcaaaaacttaatacatatattcaatacgcatttttaaattaaatagtggttacacgatttgatttacattgtgcaaataaagtgatctgcgtcaatgctggaataaatgtgtccctcggaaatcataaagtccagaatgttgctgtaaaaataggaacaataaaatgttataattaatattaattaataaagaatatcaaatgatgcaatagttttggataaacaacttacgtcaactcagagtcgctgatgtgggagaatttggctttcagttccttgcgggagatgccctcctcggaaacattgctcttgatggcctggaatacggcctgctgcttgggctccagcccactgacaatggccgagctctgggaggcggtgaaatcagctatggagcctgagccggaagaagcccctgcaccagctccagctccacccttgctctggtagtcctcggccctgtagcgggcattgagtacttccagcaggtgggtgcacacctcgttgggatccaaaacgggcagtagcttgaagatcattagggttttggaaccgccttgcgaccgggtggtgccgtagaccttcacgtagttgttgaccattacttcgggtgccttgagagcgtcgccctcctcaagccagtagtgcgcatcgatcctgccgctatgatcctccagggtgtaggtgatcttcgtcgaggaagtctccacgttccgcactatggccacaacacatgccatggcgtactgcatgccgaacaactcgatgtttccctctggggcgtccacaatctgcttcaccaccaggggcactattccctagttgcaatcatacggaatcatgttaggttgtgcaactttactggcgtctcactcacttacttctcccttttgattgctggcggctccagttggcgcagtttgtgtggcattgaaatctccaactaaaacgagcttcgttattagttcccttaatttctctgagctacgggctatacttacatgaatcattcattttcttggcttttgagggatttgtaattgagtattctatataatttcacaagggccgctggtaaacaataaaacgcgcgaacgtagagctgatagtgtggccgtaggtcgaacacgtaggaataacatctatttagtatataagaaatacgaaatattgtagtgtcaatatttcaatatttttcctgaaaaactgaattattgtaataaattgggaatatacctttttcagttaaaacaaaaaaagaaaaaccacaaaattttttattttttacaggacttacagcccccttaataattcatttattttcttatgggtaacacaatatttttcttagcactaataatttcagaaacacttagaaacctaaaacctttttcagcgttcgctgaacctctttcctatcggtctttcttccttttttctttagtttcagcatgggctgaaggacaaatgtccttgttcaggcactccccacaatttggcttcactggggtgcaaatggtttgtccgaatcccacgaacaaatgattgacctctgaccagaggctgaatggcagccacttctccaacgccacacgggtttgctcgggctccttggtgggcttcggcacccagcccagcctgttagaaaggcggtggacgtggacgtccactccgattccggttatcttgttccaggccactgccatgcatatatgggccatcttggggccaactcctggaagagctacaaggtccttgacattatctggaatgtccgaaccatacttgtccgtcagtatctccacggtttgcttgaggtatttagctttgttctggaagagatcgagagtaagtgcgatatatttatttattattaattccaccaaaccttgtagaaggatacgggatgcagtaaattctcgagttcagtcactggcatttcctttactttcagtggagttagacctcggtctttaaggcgattcatggcttcataagtagtttggtctttggtttgactggacagcatcaatgccactaagttttggaagcgctgggtctgcaaggaagttgtttgcttgtaacatat

SEQ ID NO: 1304 - DNA, 816 bp, DROSOPHILA
cgttttattgtttaccagcggcccttgtgaaattatatagaatactcaattacaaatccctcaaaagccaagaaaatgaatgattcatttggagatttcaatgccacacaaactgcgccaactggagccgccagcaatcaaaagggagaaggaatagtgcccctggtggtgaagcagattgtggacgccccagagggaaacatcgagttgttcggcatgcagtacgccatggcatgtgttgtggccatagtgcggaacgtggagacttcctcgacgaagatcacctacaccctggaggatcatagcggcaggatcgatgcgcactactggcttgaggagggcgacgctctcaaggcacccgaagtaatggtcaacaactacgtgaaggtctacggcaccacccggtcgcaaggcggttccaaaaccctaatgatcttcaagctactgcccgttttggatcccaacgaggtgtgcacccacctgctggaagtactcaatgcccgctacagggccgaggactaccagagcaagggtggagctggagctggtgcaggggcttcttccggctcaggctccatagctgatttcaccgcctcccagagctcggccattgtcagtgggctggagcccaagcagcaggccgtattccaggccatcaagagcaatgtttccgaggagggcatctcccgcaaggaactgaaagccaaattctcccacatcagcgactctgagttgaccaacattctggactttatgatttccgagggacacatttattccagcattgacgcagatcactttatttgcacaatgtaa

SEQ ID NO: 1305 - protein, 195 aa, DROSOPHILA
MACVVAIVRNVETSSTKITYTLEDHSGRIDAHYWLEEGDALKAPEVMVNNYVKVYGTTRSQGGSKTLMIFKLLPVLDPNEVCTHLLEVLNARYRAEDYQSKGGAGAGAGASSGSGSIADFTASQSSAIVSGLEPKQQAVFQAIKSNVSEEGISRKELKAKFSHISDSELTNILDFMISEGHIYSSIDADHFICTM

SEQ ID NO: 1306 - DNA, 3687 bp, DROSOPHILA
tgtcttcgatgtactcttccgtcgcttcgcttcggttaattttttatttcttttttttgtaggctcaagcaacggagcaacgttatgccgaaaaaaaccaaaaaactaatgatgtcacatgtgttaaattttgagaatttaaaaacgaacagttttgaagtatttcacacggcactgcatcgcagcgttaacgtatcaattaatattttcgcacacacacatacacatgcagcgcgcagctcgtgcagctgtcaaaaacgaaacgataacggcagcatatgttatcggcgccagcaacgctgcgtgccgctcacgcgactatcgatagctaccagggcggcaggaattgggcagatgtagctagattgtagctatttccccgacgttggcgaagatcgatgttttttttatgtttttggcgaaaaacatcgatattttaaatataaacaaaaaaaattgagatttatttaaatttatagattcttatatttatatattttcgggagttaaaaacttacttttcagatatttatccatgtcttccacgacgctagtcacattaaatttgatatgctttttttaattgaattagaaaatatggaaaattaatttataattacaatttataaacttttctcctactttgcgcttggaaaaacatcgatgattccttgaaaaaagtcgatgtttgtgatttttccaaaacatcgataagtaattaatatttaacgaaattattaggaaaacttattcgtaccgcaaagtaaggacgtcaaaatgaaatatttataattttggtatggcttaatattaaaatggtttcgctcttttctaagttagttatatttagaaaccatgtacatatttccgacagcataatataagttatataccgtaaaaatgaattttgataactatttagatgtagaatatataacatatatctaaatatctaaatatatctaaataaatatatatttttttgaaaccagaaatgataatttaaaacacctattttattgttttaaaaatgacacatttatgccctgctgggctttcagaaccatttgggcctccagcctgagcggagcctgctccggactcagttccatttggaattccctaacaagacgagcggtgagcagcttcatcaggagcagggagtaccgcctgccgatgcagacatgtggtcctccagagaagggtatataactgaaggcgggtggggcgacagcgccatcctccggcaaccaacgttccggcttgaaggcatacggatccggatagtattccttatcgtgcgccaatccgtacatatttatccatagcgttacgccggcgcagtaggtccgtcctccaatctcggtcgattgcgtagtctggcgtccagtggtgggcacaatggtatacagtcgcagcacctccttgatcaacgcctccaaatagggcagcccattgagggcgtccagatccgtggtttcatccaacgccacatcctgcagctcctttcgcagacgcgtttgcgtttcgggaaatttcgctagagcatatagcacaaacgacatggcggccgtggtggtatccactccctgaattgcatcgaatataaaaaagaatagttcgttgttacaggaaaacccaccgcaaacacaaaggtgttgatctcatcgcgaatttcccgtcgactcagcgattgaccctcgaatttggccaagaggagcgtgtccaggagattgtgggctctgcccgctggttcccccatatccagcaactccttggcccgcttctcgatcaccgactccatttggctgtgaatcacctggagctgctcgtcaagatcacgccagagttgggtgcgttgaaagatccagtcggacgagagaagcggattgatcatgcgcttgaagagaagcttgctgctcaaatggaatgcctggatgatgggcgaatgatccacggactgggtgtccaattgggcgcccattgaggtgtctggaatgggtgggaaaacagtgtagttgcttaccacttggttaactactactacgttaactccaaattaatctcacccacaatcgcgtccaggaggcaggcgaacagcggttcggtgacctccaggaacgctcccctggtggcccccagtcgcccgaccaaacgctccacatgcccaccaatcgccggagcaaagctgcgcagcaattgaggctgaaaggcgggcgttaggaggcgacgctgtcgcgtccaatgggcaccatggctaatcagcagaccgttgccgatgagcggctccagctgcataaaggtgtccgccttgcgcagcgttggatcatgaagcgcctggcgcgtctcctccgccgaatggaggaacacccagagctgtggtcccagccggaggcgataggtggcaccgaagcgatcgcgcagctctgtgaaaacgagaaagatatcttatgaaagacgcgattgctgatcgctattttgcggagcaagtgcatcgatcacccacattccggcctcagttttccaaccatctgagcattgccaagtagtggaaatgcccacggacccggcagactgctgcccaatcggagcagtgtccatttccgcaccaggatccaaatggtcagggtgatcagtagcagtggccacagtgccatgttgctggttgtgttcttctcgagcgattcgatcggactgaatgggttagctaaatgaaactggattggcagctaatctgtactgctctaaattaacccttatcaaaaatagttatttttattctacatattttccactacgataatgattaacaaaaacaataaatatatagaaatatagaaagcataattaatgtaagggtataacctcaaaaatacatagaaaatcagtatttaagttaaaaattataataaaatgttgcatataaattaaatgtgttttaaatgattttgttatgaattaatcaataacattacaataagtcgcacctggcttttctagggttaagcactggatccattaacagatcaacgaactgttaacagttaacagaggcctagattagattatcggattttactcagatatatataaactcgtatatataaacatatatgtgaatatatatttataaatatgcacttaattgtgccgctggtttatgcggattattgaatgctaacaatcggtatttgctggctttttccatcgatcaatgagcaatatctaatctgcgactgaaacgattgagaaaagtgcagttgtctgcggcttgaactttgaccttgccaatttagatgtaatatctttaggcgattattacatacgtacatatgtcggtcagctagatttgcattttttttagattttagaaaaacaagcatagagtcgagtgtaccaattagattcatctatagatgtatatctatagatatatgtacatgtatatatgtttaaatatctaattgtacgatggtttattgtaaagacatagatataattataggttaattatgtattaagatgtctaaaagtatgcaaagctatggtactgcatacttttgggcaccttgagtgtctgaatccgctctcattgcctaaatattggaatatatttgattacatttgataatatttgattacatttgaatatatttgctcatatatgattatatttcatgatatttg

SEQ ID NO: 1307 - DNA, 1498 bp, DROSOPHILA
gaatcgctcgagaagaacacaaccagcaacatggcactgtggccactgctactgatcaccctgaccatttggatcctggtgcggaaatggacactgctccgattgggcagcagtctgccgggtccgtgggcatttccactacttggcaatgctcagatggttggaaaactgaggccggaatatatctttctcgttttcacagagctgcgcgatcgcttcggtgccacctatcgcctccggctgggaccacagctctgggtgttcctccattcggcggaggagacgcgccaggcgcttcatgatccaacgctgcgcaaggcggacacctttatgcagctggagccgctcatcggcaacggtctgctgattagccatggtgcccattggacgcgacagcgtcgcctcctaacgcccgcctttcagcctcaattgctgcgcagctttgctccggcgattggtgggcatgtggagcgtttggtcgggcgactgggggccaccaggggagcgttcctggaggtcaccgaaccgctgttcgcctgcctcctggacgcgattgtggacacctcaatgggcgcccaattggacacccagtccgtggatcattcgcccatcatccaggcattccatttgagcagcaagcttctcttcaagcgcatgatcaatccgcttctctcgtccgactggatctttcaacgcacccaactctggcgtgatcttgacgagcagctccaggtgattcacagccaaatggagtcggtgatcgagaagcgggccaaggagttgctggatatgggggaaccagcgggcagagcccacaatctcctggacacgctcctcttggccaaattcgagggtcaatcgctgagtcgacgggaaattcgcgatgagatcaacacctttgtgtttgcgggagtggataccaccacggccgccatgtcgtttgtgctatatgctctagcgaaatttcccgaaacgcaaacgcgtctgcgaaaggagctgcaggatgtggcgttggatgaaaccacggatctggacgccctcaatgggctgccctatttggaggcgttgatcaaggaggtgctgcgactgtataccattgtgcccaccactggacgccagactacgcaatcgaccgagattggaggacggacctactgcgccggcgtaacgctatggataaatatgtacggattggcgcacgataaggaatactatccggatccgtatgccttcaagccggaacgttggttgccggaggatggcgctgtcgccccacccgccttcagttatatacccttctctggaggaccacatgtctgcatcggcaggcggtactccctgctcctgatgaagctgctcaccgctcgtcttgttagggaattccaaatggaactgagtccggagcaggctccgctcaggctggaggcccaaatggttctgaaagcccagcagggcataaatgtgtcatttttaaaacaataaaataggtgttttaaat

SEQ ID NO: 1308 - protein, 483 aa, DROSOPHILA
MALWPLLLITLTIWILVRKWTLLRLGSSLPGPWAFPLLGNAQMVGKLRPEYIFLVFTELRDRFGATYRLRLGPQLWVFLHSAEETRQALHDPTLRKADTFMQLEPLIGNGLLISHGAHWTRQRRLLTPAFQPQLLRSFAPAIGGHVERLVGRLGATRGAFLEVTEPLFACLLDAIVDTSMGAQLDTQSVDHSPIIQAFHLSSKLLFKRMINPLLSSDWIFQRTQLWRDLDEQLQVIHSQMESVIEKRAKELLDMGEPAGRAHNLLDTLLLAKFEGQSLSRREIRDEINTFVFAGVDTTTAAMSFVLYALAKFPETQTRLRKELQDVALDETTDLDALNGLPYLEALIKEVLRLYTIVPTTGRQTTQSTEIGGRTYCAGVTLWINMYGLAHDKEYYPDPYAFKPERWLPEDGAVAPPAFSYIPFSGGPHVCIGRRYSLLLMKLLTARLVREFQMELSPEQAPLRLEAQMVLKAQQGINVSFLKQ

SEQ ID NO: 1309 - DNA, 6053 bp, DROSOPHILA
aaccagaacgccacggtgactacggatctctatacggttgggtgtaaccatcagttggcagcggccttcgtcaagggaactcgctgggagaagatcacggattggtccgttgtgggtgtggaggtaactgaatccgatcacttgcgatccttcaactcatattccaaatgctcctcagatactcactgtcatcatcgccggactcctggctataaccttacagaatgccgagcgccgccgtctttaccgataaaagctggccttaagtttctaccaaaagtattagaactgtacgaatgtgaaagtgttcctaattatatgagggagtagttgccaaaacatgaatacattaaattggtaacgttaatatatttcaaccgtatttaaattgctcaatacaaaatttcagaatgtatgcaagcacttttataaaattagtcacacttaaaccgattcgtggtacatttggaatgttgtgtcgctttcgacgtctgggtctaagctgtttttatgtgcaatactatgtataagaaaagtatgattatatatttaacaagtctatgaagcttattaagaaaataaacaatttaatgcttagtatatttcaagttgcagttaggttaaatttgcttaacagacttaaatttgcataagatttaaaatcgatatcaatgcgcgccgatacatttctttttcaccacagctatcgagccagtgaaaacagctgcttgctcacaagtgctgctacggtgctgctaaaatattttaaaattaaacacacgactcacatctcatttcatttgtacacaaagaaaaatatcgcagaacaagtctatgttaagcgtttaaataatgtgcatataattaaaacatgttttacctaccataccgaagcaccttattgaggcgaacaaactcttgatccatctggaaaatagccagacttacagcgcttctggtttcgaactactggttccgtgaactgttgtcaaaagtaatgaaatgctggagaaagcagtagaatgataagtttaggccgtatttgcacaattactgagtaactagtgacagccgaacaagcgccatgtattcataagcacctgccgcgcacctgccaattcgaatttaaagcggccccggagcagaagcgacgcatttcttcgccgagcgtccgcagagtcgtcggatcggatcggatcggtttggattggattggtgactaaaacagttggacaacaacagcggcttgattagttggcagtaaacagagctaccgaacgcaccggtcattcactccgcaccgttttgaccagaagcagttccagtattggtagccaataagccacagcaatgggtctccggttccagcagctgaagaagctctggctgctctaccttttcctgctcttcttcgcgttcttcatgttcgccatcagcatcaacctgtacgtggccagcatccagggcggggacgcggagatgcggtgagtagttggcccggtaattaacaatgggcccattaggacgcgccgctcggattgcacaacttcccctggggcccaaatgggttgcaaaatgcaagtgttccagtcgagtgcctcgcctccgcgttttttagcttcgattgccgaggcactttgcattcgatttgggtcttgggtctctgtttgttttgacatcgcttcgcgtgattcgatgggccattgtaaatgctaagtcttaatatcgctccattgtcacatcttggctcatttggctattgtggatcactatgccgatttcccgcacagtcatccgaaaccgccgcccaagcgccgctccctctggccgcacaaaaacatcgtggcccactacatcggcaagggagacatctttggcaacatgacagcaggtgagtgagatggttccacctaatcatcatcagttaagattggtcattggggtaataaaacagtttatttgtcttttatcattcccagttacccttagtcatcaataatagacagtgccattaaatggcatttcattttaccctctgcacaattggtttaggtgctcgggaaatatttaagacttctttaattaccttagtatcattttactttcgacgcattagggaagaactgacgaactttgttttgaaactacaaccttagttgcaccatcgttgatggaaaatacctaaagagagtttccctcaaatgacacaacatcaaaatgcattaatccccactcgcttgcagatgattacaacatcaacctgttccagcccatcaacggagaaggtgccgatgggcgaccagttgtggtgccgcctcgcgatcgctttcgcatgcagcgctttttccggctaaacagcttcaacctgctggccagcgaccgcatcccactgaaccgcaccctcaaggactaccgcacacctgagcaagtataagccttagcttactgagaaccttttctaatgcatttcttctcctgcgcagatgccgcgacaagaagtacgccagcggtctacccagcacgtcggttataattgttttccacaacgaggcctggtccgtgctcctgcgaaccatcaccagcgtcatcaaccggtcgccgcgccacctgcttaaggaaattatcctggtggacgatgccagcgatcgctgtaagtctgcatagtataatcaacgtatattccgagaattccatctgtgtgcaatagtattgtcgaccttgggcgaagcttcttaattttgtattacctaaaggacatttggttctattgcctgcgtactattcccgcgaatggtttcagtctactccaccaaacgaaactcctaagaatgcaatatatttaatttgtaaaacatagttttgggatgattcacaatatttgtttcttatcttgaaaacggtcagtgtataagtttacgttgattcattaaaagtaaattctttgtctaacatgctagaaagttaaaactacgaagtaataaaagaatcgtaactcttggaatttacatataaatgacatacattatgcgtatctgtatataaaactttcctaatcaaatgttcttccaaagcatatttaaaacgtcaactggagagctatgtgaaagtgctggcggtacccacgaggatctttcgcatgaagaagcgaagtggcttagtgcctgcccgccttttgggagccgaaaatgctcgcggcgatgtgctgaccttcctcgacgcccactgcgagtgctcgcggggatggctggaaccacttctttcccgcattaaggaatcacgcaaggtggtaatctgcccggtaatcgacataatatccgatgacaactttagctacacaaaaaccttcgagaaccactggggcgctttcaactggcagctgagcttccgttggttctcctcggatcgtaagcggcagacagcgggcaacagctccaaggatagcactgacccgattgccactcccggaatggccggcggattgtttgctatcgatcgcaagtacttttacgaaatgggatcctacgacagcaacatgcgcgtttggggcggcgagaatgtggaaatgtccttccgcatttggcagtgcggcggtcgtgtggagatcagtccctgctcgcacgtgggtcacgtgttccgcagcagcacgccctacaccttccccggcggcatgagcgaggttctcacggataatttggccagggccgccaccgtctggatggacgattggcagtactttataatgctgtacacctctggactgacgctgggagccaaggacaaggtgaatgttacggagcgtgtggcgctcagggagaggctccagtgcaaaccgttctcctggtatctggagaacatatggccagagcacttctttccagctcccgaccgctttttcggcaagatcatatggctggacggggagacagaatgtgcccaggcctacagcaagcacatgaagaacctaccaggtcgtgctttgtcacgagagtggaagcgagcgttcgaggaaatcgacagcaaggcggaggagctgatggcgctgatcgatctggagcgggacaagtgccttcgccccctcaaagaggatgtgccgcgctcatcattgtctgcagtaaccgtaggcgattgcacatctcacgcccagtcgatggatatgtttgtaataactccgaagggccagatcatgactaacgacaacgtctgcctgacctatcgacagcaaaagctgggtgtgatcaagatgctaaagaaccgcaacgccaccacttcgaatgtaatgctggcgcagtgcgcttccgactcgagtcagttgtggacctacgacatggatgtaagtgtatcacagctacgataattgcattagtgctaaaaatgtattcctccacagactcagcaaatatctcatagggacacaaagctctgccttactctgaaagcggcgactaactcgcgtctccaaaaggtcgagaaggttgtgctcagtatggaatgcgacttcaaagacatcacacagaagtggggcttcataccactgccatggcgcatgtagagagtaggatgtcatgccggtgccaggacatttaatccaataaccctgccagcaactttttaacgcaatgtgatatttattgaaattgttttaacgaaattcactcgttaatttgtttatgtgaacagtaaccaacccacaagcacacgaacttcagacacctgcagtcctgttgtctaacaaagcctgatttcactgtcgcaatttaatatttaactgcgcgtaaacatgagcagcagcaacatatgtgtgacagtggaaccagtctttaccaaacaatcgtacaccgatacagacccacttgaattgtttttaaaacacactaaccgaatgcgtgggagagcttttctccccccacgcattgcgactctatcaatctagatagcatagtggtatgctatatctacgtcatatttattaagaagagttagaaaatttttagctgtacttactaacctcgaccttaatttttatatcacttgaataaagcaatcgaatgtagagaaagcttcgttgcaatctgtttctctttccctgacttcttatcgctggcccctgggaaaggtcgcaatgcactcgctttaaatttggcgcatctgccgcagattacaccactctcgcgatgaacggctgctataacacaataaagtacacgggcctgctctcaaatctgctctatatggtaagtcgtactcttgcaacttactctgggtaaattgtttataatcgttggcgttgcagctactcggcataggagtgatgtctggagcaggactaggactgcagatggcggagcccaatacgccagagcacacttatttcgtgaagagcttggtcttgggtggctccatttgcatgatcgtgatgttcggatgctatggcatggtcgccaacttgctttgtgtcaatctgattgtaagcgaaaggaaagagcgaatcctgaatatggattactatccataactaactgaactctccccacagttcaccatgttcatactgatcgctctggcagcggagtaccttcagctgcaccactatcacagtccgtccctcaggagcccgggtggcgcctggcagcaactggaattagcttggcatggcctggacagagaccccgagctcatgcaccagtacgaggcctcccagcactgctgcggctacaatggtgccgacgattacaagcgcctgcatctgctggtgccggcgagttgttatcaggccgctgttaatgacaccgcccagcagatctatccaagcggctgcctcgagacgttgaaccgcagccagcggtacatccagcaccgcgataagctctacatgtgggccatcgttggccttgaggtgggaaattgacttgcggctgaagtgcagtttctcgaataatcatccatctcttcactcgccgcagatcttcatactgctgcaaactgtggcgctgagtgtgctgctctttcgactacgacagcggcagcgcatcgcacgaagacaggtgccgccaggt

SEQ ID NO: 1310 - DNA, 2858 bp, DROSOPHILA
aaatgctggagaaagcagtagaatgataagtttaggccgtatttgcacaattactgagtaactagtgacagccgaacaagcgccatgtattcataagcacctgccgcgcacctgccaattcgaatttaaagcggccccggagcagaagcgacgcatttcttcgccgagcgtccgcagagtcgtcggatcggatcggatcggtttggattggattggtgactaaaacagttggacaacaacagcggcttgattagttggcagtaaacagagctaccgaacgcaccggtcattcactccgcaccgttttgaccagaagcagttccagtattggtagccaataagccacagcaatgggtctccggttccagcagctgaagaagctctggctgctctaccttttcctgctcttcttcgcgttcttcatgttcgccatcagcatcaacctgtacgtggccagcatccagggcggggacgcggagatgcgtcatccgaaaccgccgcccaagcgccgctccctctggccgcacaaaaacatcgtggcccactacatcggcaagggagacatctttggcaacatgacagcagatgattacaacatcaacctgttccagcccatcaacggagaaggtgccgatgggcgaccagttgtggtgccgcctcgcgatcgctttcgcatgcagcgctttttccggctaaacagcttcaacctgctggccagcgaccgcatcccactgaaccgcaccctcaaggactaccgcacacctgaatgccgcgacaagaagtacgccagcggtctacccagcacgtcggttataattgttttccacaacgaggcctggtccgtgctcctgcgaaccatcaccagcgtcatcaaccggtcgccgcgccacctgcttaaggaaattatcctggtggacgatgccagcgatcgctcatatttaaaacgtcaactggagagctatgtgaaagtgctggcggtacccacgaggatctttcgcatgaagaagcgaagtggcttagtgcctgcccgccttttgggagccgaaaatgctcgcggcgatgtgctgaccttcctcgacgcccactgcgagtgctcgcggggatggctggaaccacttctttcccgcattaaggaatcacgcaaggtggtaatctgcccggtaatcgacataatatccgatgacaactttagctacacaaaaaccttcgagaaccactggggcgctttcaactggcagctgagcttccgttggttctcctcggatcgtaagcggcagacagcgggcaacagctccaaggatagcactgacccgattgccactcccggaatggccggcggattgtttgctatcgatcgcaagtacttttacgaaatgggatcctacgacagcaacatgcgcgtttggggcggcgagaatgtggaaatgtccttccgcatttggcagtgcggcggtcgtgtggagatcagtccctgctcgcacgtgggtcacgtgttccgcagcagcacgccctacaccttccccggcggcatgagcgaggttctcacggataatttggccagggccgccaccgtctggatggacgattggcagtactttataatgctgtacacctctggactgacgctgggagccaaggacaaggtgaatgttacggagcgtgtggcgctcagggagaggctccagtgcaaaccgttctcctggtatctggagaacatatggccagagcacttctttccagctcccgaccgctttttcggcaagatcatatggctggacggggagacagaatgtgcccaggcctacagcaagcacatgaagaacctaccaggtcgtgctttgtcacgagagtggaagcgagcgttcgaggaaatcgacagcaaggcggaggagctgatggcgctgatcgatctggagcgggacaagtgccttcgccccctcaaagaggatgtgccgcgctcatcattgtctgcagtaaccgtaggcgattgcacatctcacgcccagtcgatggatatgtttgtaataactccgaagggccagatcatgactaacgacaacgtctgcctgacctatcgacagcaaaagctgggtgtgatcaagatgctaaagaaccgcaacgccaccacttcgaatgtaatgctggcgcagtgcgcttccgactcgagtcagttgtggacctacgacatggatactcagcaaatatctcatagggacacaaagctctgccttactctgaaagcggcgactaactcgcgtctccaaaaggtcgagaaggttgtgctcagtatggaatgcgacttcaaagacatcacacagaagtggggcttcataccactgccatggcgcatgtagagagtaggatgtcatgccggtgccaggacatttaatccaataaccctgccagcaactttttaacgcaatgtgatatttattgaaattgttttaacgaaattcactcgttaatttgtttatgtgaacagtaaccaacccacaagcacacgaacttcagacacctgcagtcctgttgtctaacaaagcctgatttcactgtcgcaatttaatatttaactgcgcgtaaacatgagcagcagcaacatatgtgtgacagtggaaccagtctttaccaaacaatcgtacaccgatacagacccacttgaattgtttttaaaacacactaaccgaatgcgtgggagagcttttctccccccacgcattgcgactctatcaatctagatagcatagtggtatgctatatctacgtcatatttattaagaagagttagaaaatttttagctgtacttactaacctcgaccttaatttttatatcacttgaataaagcaatcgaatgtagag

SEQ ID NO: 1311 - protein, 667 aa, DROSOPHILA
MGLRFQQLKKLWLLYLFLLFFAFFMFAISINLYVASIQGGDAEMRHPKPPPKRRSLWPHKNIVAHYIGKGDIFGNMTADDYNINLFQPINGEGADGRPVVVPPRDRFRMQRFFRLNSFNLLASDRIPLNRTLKDYRTPECRDKKYASGLPSTSVIIVFHNEAWSVLLRTITSVINRSPRHLLKEIILVDDASDRSYLKRQLESYVKVLAVPTRIFRMKKRSGLVPARLLGAENARGDVLTFLDAHCECSRGWLEPLLSRIKESRKVVICPVIDIISDDNFSYTKTFENHWGAFNWQLSFRWFSSDRKRQTAGNSSKDSTDPIATPGMAGGLFAIDRKYFYEMGSYDSNMRVWGGENVEMSFRIWQCGGRVEISPCSHVGHVFRSSTPYTFPGGMSEVLTDNLARAATVWMDDWQYFIMLYTSGLTLGAKDKVNVTERVALRERLQCKPFSWYLENIWPEHFFPAPDRFFGKIIWLDGETECAQAYSKHMKNLPGRALSREWKRAFEEIDSKAEELMALIDLERDKCLRPLKEDVPRSSLSAVTVGDCTSHAQSMDMFVITPKGQIMTNDNVCLTYRQQKLGVIKMLKNRNATTSNVMLAQCASDSSQLWTYDMDTQQISHRDTKLCLTLKAATNSRLQKVEKVVLSMECDFKDITQKWGFIPLPWRM

SEQ ID NO: 1312 - DNA, 4948 bp, DROSOPHILA
tgtctacgtgtgagtagtcatggcaatcttctgtaacaaatggccatgacagcgtttatacagacagacggaaatggtcagatcgacttggttgggtatcctaacaaataataaatgtaccttatagggtcggactcgcttctagggttacaaagtttgtaatgaatcaagaatgccgtcttaaattaaattaaatttgtgctaaaattaaatttaaaaactattttaaagctttttcaagaatagtttttttgcatgcacgactttaatgacaaataacaaatcattgtttcaaggtatgggtatggatatttctaatattattattttttagtaataaattttgaaaacaaattatttttgaaatattggaagaatatttataaaacaacatccaaacctcaagccatcctaaaacatttctttttaattgcagaaaagaaatctagaaacatttttagtaacgtactctactcaaaaaacttattttaaattagttgcgaacaaattatcaatgcattgcaaagcaataacaatgtcccaaaaagaagaggcataataaaaagatcattagaatttgtaaatgaatttttgttttatgcgtttttataatgggagagggcatttaataaaaaatattatacaacatttacatatcaaattttgtgaattctttcaacttttacaggtgtggccgaaatacttcgctcgtgtagttaacttatgcgtgggcattttgtgtagatctggtgtgttgactggtttatcaatttcacattttaaaattcgtacactttcagcttaaaccctatagatactacaatatatggcctacacatataaaatagcttaaatccaactgtttaccatggctattggtataaaactttacatttagaggttgcccaattttctcatactttttatattatacaaatgccgaaaataatagtagtattttcttcatatgaattaatagttcgatctattcctttttcatctaggcctctgtttcagcgccttttagacgcagacgggcaaagtcctcaaaaattatgtcgtcatcttgtgcctcgtcgtcgtccagctgaatgagatttgttgtcgttggcacatcctgcccgccagtagccgattcagtttctccgtcactcatgctcactaacggcagacccccgcctgctaaactagcccgtggcgatcgctcccctaacagtggatgctcttcctcctcgggcttagggtgcattagtgtgaatggcagctcagctacgaggtcaccatttagaagtggcgagctaatcagcaacttcaccttcaccttatagtggaccataataccgagactctcacgctgagcaggattggtaatgagagtgctagacgccaaattggtgtcctcatgctttagctgcccgtccaaagcaaggccccatttatccttattatttgccaatagggggcacaactcaaataccttcgagagtgtaaatcccggagccacttgacatccgtcttctgactcgatttctgccactacagatttatattgcgccgtcgaaaagagacaaatatccgcaaactgccggacacataccttaatcttttttaccgtccgatttgagttgttggccacatgaacgttgaccgatattttttcgccgtggtggtataactccttgtccaaagtagcttccaaatggatcttgtttggcttcatcataaactccttgcttacttcgatcgatggctgctcaccgactttggatggtgcgtacatgactttgcgaatagttagtcgcaccgagttccgcttgtggggtttgtcctccacgttctcacctattagtgataaacattatgaataatggcatcaatgtatgtatgtttgttgaagaaaacccatgacgctcgggtgtgtcagtagtccgattcgttacaaaatttgtcgttgatgttgagtctatcatgtatagaattccacgatgtttaatcacaagccgacaattactggcatttacatatggatatatatatatatatatatatatatatatattattcatatatatgcatatacattcatttaattgatcatcaatagcattgctttaaaaatacgcataaatatatataattggttatcccaaaaacataaaagctaggaacattagatacacaattgaacagacgcaaagtaaataaaaatgctgactcaattgtcatgaggggaagcagagaagcactgagaaatcgtttcttccaactgtacaaattccaacattgttgtttttattcttaaattgaatttgggcttatatacagaaaaaataaatattaagttcttgttataaactcttttacccaacaacacgccaattgctgctattttattaatctctgtttataacagtaaacaatttggctgctgaataataataaaattccaacagaaactataaaagcacaaaaatgtgtaaacaaaatagggcaataggtaataatatttattgaacagagaatgtattaagggggtgccacgggcacataatatatatgcgagtggagctcggcgatcgtacgaaaatatgaaaaatttaaaatttacagaaaccaaaaacctttctactaataaaataaagcacaaattctttaaacctttttttaattattaaatacagattagaaactaaacaaataaacattttgaaactatgtaagatctttgctgttggcacacaaatcgtcagaccgccaactgcggcgcctggttaaggcgaacaacagcattaactgcgctgcaacttcggttgattcaaattccaattagaagtgtcgaatttcaattaggtgaacgctgcgtcatcagcccgacgtagttggattgattaaccctgtgttcccaaccgcgtgatgcacgcgctaacttacacaaaaccacacatataagaaatttacagtctaacttctatagaaaagaacaaagctagttttgctactgtaaccatattcttaataaattattttattctcagaaacaatagtacccgcaatttaactgctctaaggtaaaagaaaaatttgtaaagaaaaaagaaaaatttgtaaatttgtaaatttaatgtattgcaacatatataataaacacggtatgtgccacactgcgaaatatcaatgattttgactttgactgaccaccgtatacggacacacccacaagatcagacccacaaagactcacccacaaaggccttcagctcgtagtctactccgcaagacttgcccacatctccaggagccggctgcaaggacacagaggctgggcaatagggcggaacctcaaaataaaacggatgggcgttcggccccagctttttaattaacctttcctgaagccgggtcatcgggcggtccagctgcatgggcggatagatctgctcatgcgccagatacaggtccttacggaacgttaatcccaaaacatctaggtcttcacgtccgtaccgaaaggcggcaagcacctggccaaaaaccttacggtcctttacgtactctggatcaatgaagacaacaccgtcaatgggatccacgtgcgtgacatggtcgacgaagtcccgtttgccaaggtaaactgttatcttgccgttggaggagctcttcttaaacacccgagtcgcctggcgtctggagctggcatctccaccagtctcgtcgcctgcgcttccgcccccagtgctcccggcagctgttacattggtgctggagccattgctcacatttgctcctccacttcctccaccaccaccgttcattatgttatttggcggttatgcttgttattctgcttttctgctgttcctgcttaattggaactccgttaaataaatatatgtgtgcgttgcgggacttgtgctgcaatttaattttttatgtgtatacttgttccgccatttaccagcactgcttgacagtcattggaaaaataccagggaatattacatactaacaaattatgtacttctctggtatttcaattcagtgcgaacaaaccgatatatgtttggtcgtaccataatcgcagcctataattaatatttattttgcatttttggcacctatttatatttcctaagtgtgccctggcccatagtaagtgacttttaataatttttctttcaataccattaacaattgcttgaattaacattaagtttcctactaagataaaatgcaactgcaggttgacttggctttttaatgaaatataatatatatattataaattcctttagaaacagatgattcatagctgatgattgaggaaacttaccatttggaatgtataaacacatgtaaaatcagaccgttggtaaatatctaatcatagattgtatcctaagtcttaaataaatactttatataaactgtttaatatttattttattttttaaaggcttttattatttttatatgtatacatgtgcatgaacggactttaaaccatatttagtagtggaatagagctataaaaatgagattgaagtctctaaaatactttatttaatcagccttagcaccgatagagcacaacggtcacactgttctgtccctcttttccacgtgcattttattgaacgaaaccacgcgttgttcagtccaaacttgactttgctaattttgcccagaaaacctctaaaagctgtcaaaatggcccaaaagaaagccgtcaccgtcaaaggaaaaaaagctacgaatggagaggaaaagcctttggccaaacgggtaaccaagtccacaaaggtacaggaagaggagacagtagtcccccaatcgccttccaaaaaatccagaaaacagcctgttaaagaagtgccgcagttcagtgaagaggacgagtctgatgtggaggagcaaaatgacgagcagccaggggacgacagcgactttg

SEQ ID NO: 1313 - DNA, 1549 bp, DROSOPHILA
gcggaacaagtatacacataaaaaattaaattgcagcacaagtcccgcaacgcacacatatatttatttaacggagttccaattaagcaggaacagcagaaaagcagaataacaagcataaccgccaaataacataatgaacggtggtggtggaggaagtggaggagcaaatgtgagcaatggctccagcaccaatgtaacagctgccgggagcactgggggcggaagcgcaggcgacgagactggtggagatgccagctccagacgccaggcgactcgggtgtttaagaagagctcctccaacggcaagataacagtttaccttggcaaacgggacttcgtcgaccatgtcacgcacgtggatcccattgacggtgttgtcttcattgatccagagtacgtaaaggaccgtaaggtttttggccaggtgcttgccgcctttcggtacggacgtgaagacctagatgttttgggattaacgttccgtaaggacctgtatctggcgcatgagcagatctatccgcccatgcagctggaccgcccgatgacccggcttcaggaaaggttaattaaaaagctggggccgaacgcccatccgttttattttgaggttccgccctattgcccagcctctgtgtccttgcagccggctcctggagatgtgggcaagtcttgcggagtagactacgagctgaaggcctttgtgggtgagaacgtggaggacaaaccccacaagcggaactcggtgcgactaactattcgcaaagtcatgtacgcaccatccaaagtcggtgagcagccatcgatcgaagtaagcaaggagtttatgatgaagccaaacaagatccatttggaagctactttggacaaggagttataccaccacggcgaaaaaatatcggtcaacgttcatgtggccaacaactcaaatcggacggtaaaaaagattaaggtatgtgtccggcagtttgcggatatttgtctcttttcgacggcgcaatataaatctgtagtggcagaaatcgagtcagaagacggatgtcaagtggctccgggatttacactctcgaaggtatttgagttgtgccccctattggcaaataataaggataaatggggccttgctttggacgggcagctaaagcatgaggacaccaatttggcgtctagcactctcattaccaatcctgctcagcgtgagagtctcggtattatggtccactataaggtgaaggtgaagttgctgattagctcgccacttctaaatggtgacctcgtagctgagctgccattcacactaatgcaccctaagcccgaggaggaagagcatccactgttaggggagcgatcgccacgggctagtttagcaggcgggggtctgccgttagtgagcatgagtgacggagaaactgaatcggctactggcgggcaggatgtgccaacgacaacaaatctcattcagctggacgacgacgaggcacaagatgacgacataatttttgaggactttgcccgtctgcgtctaaaaggcgctgaaacagaggcctag

SEQ ID NO: 1314 - protein, 470 aa, DROSOPHILA
MNGGGGGSGGANVSNGSSTNVTAAGSTGGGSAGDETGGDASSRRQATRVFKKSSSNGKITVYLGKRDFVDHVTHVDPIDGVVFIDPEYVKDRKVFGQVLAAFRYGREDLDVLGLTFRKDLYLAHEQIYPPMQLDRPMTRLQERLIKKLGPNAHPFYFEVPPYCPASVSLQPAPGDVGKSCGVDYELKAFVGENVEDKPHKRNSVRLTIRKVMYAPSKVGEQPSIEVSKEFMMKPNKIHLEATLDKELYHHGEKISVNVHVANNSNRTVKKIKVCVRQFADICLFSTAQYKSVVAEIESEDGCQVAPGFTLSKVFELCPLLANNKDKWGLALDGQLKHEDTNLASSTLITNPAQRESLGIMVHYKVKVKLLISSPLLNGDLVAELPFTLMHPKPEEEEHPLLGERSPRASLAGGGLPLVSMSDGETESATGGQDVPTTTNLIQLDDDEAQDDDIIFEDFARLRLKGAETEA

SEQ ID NO: 1315 - DNA, 5008 bp, DROSOPHILA
caacaattgtaaatttttcgatcaaacgattaagatttgtaaaaaaaggttgagaaaatcggataaaaagtttggaaactatcgagttaagtttggtgtatgaaaaaaaaaaacttatcacattgccacgtttctaaacgaaaacataacaattaaaaaaataacatttttaatcggtttagggaaatacaaaccaaaaggggaagatattaccatttagaggcgaaaggtcaacaagaaacacatgctttctctttctaaatgatttcacattttattttgtatagtttccttttatcatattttgtgcagatattttcttatagcagcaatttttgtataataaatatatttttgtcatttaattattttctttctccgcgttttctttaatttctttagtttactgtcacttagcttaacgaataagaatagcgcaatttattgcttcgcacaattgaacattgaagaattgcctatatatatataaatgtatatatattatgtctctcaaaggtacttgcatctgaataattataaaaacaaaaaaataaaagcgtaaagaggacgaagttacgcacatttccctctgatcataatcaacaataatggtgggagtaaagtataaggtaaaataatataatatataatggagatatataaaagatcatagaaatagccatatacatataaatacataaaagcaattcaattggatcatatcatcatcatcttttcatcttttcgggcgaacaatcatcctctttggaattcttttcgtttaagtagggaaagtggaaatgaagccgtccatatatatggtaatctgtccagtttttgtctacgcgtttctgttcagttcaagccttgtttgatattgctgcgttttaaggcctctcccactgtggaatccatattgctggctctgccttgatctaagtgttttcctctgccgttcagttatagttaattttgaaatatactcgtacttgtgttattgttagttattgttaattgcactgctggcggccactaactccggaacggtggacgaggcggcactgctctgactgacggtgcgggcatgatccacatggttttgggtcggcgccgcagacggagccgctcccgaggctgctggcatcgatcccgaagcttctcccgactgcactggcgtgccctcgctcgctccggatccgtttccatttccgggtacgggctccaccgtgggaaagacgggcggcaaggcaggcgcgaccacgggcgtctgcaccatgggtgtgggaggcgaacgattcgctggcaactgatgagcagtggctccggtcatctgcatgtggtacctttggagtgtagattgatgaacattaaacaaggacacaatatcaaacgatctttggaacccacttgtaaatgttctcggtgctttcgacaacaccttgggtaagattgaggctccgccccttgatgcccgactccttggccggtggggaccaccagttgaagacgcgtcccaccacaggcacgtggcgcaggatgccctcctgccagagcttctcctccgattcgcgctgcagatcagcggtaaccgcctcaatgccctgagcgtacaaataaattaacacatgttacattaatccagtacgaggtggtagccaacctttttaacaatctccgacatggtgtccaatacccgcgagttttcctggacgctcttgcccaccgtgaccaccaagtctaacaactcttcgacctccgtttcatgggtcaccattccgaatcgcacacaaatcagaccatcggtgccttcgcctaatgaaaaggcattgtccgtggatttcagggcctccaccaggtcgatgttcagcttgtttagctctgttttggcctggtccgtcagcagggactcccagccctcgggcacgaagcgaacaccgcccatgcccgcccattcgggcagtggaacgaggcgcagcacgtcgctgcactccaccagatgaatgaaccgtgccttgtgcttgatggtcgcgcgcaggatgtccacatgtgcctctaagctctgagcgaagctctccaggttctcggagcttggcggctgctcacccaaccccaattccagcggacagtagcgaatgcagctgccgtgcgtcgggtgttcaattacctcaaagtcaaactggaagaacatggtgattaggctcatacaaggagatgattaattcacactgcatacattgggacagtcgcgttgcaagatttgacccagccaggagttgagccggtcgaagtaggaagcattgttaatcttctctagcggcttgaggccttcggccgtttcccgctcagcagcggcagcggcggcggaagagccactcccgcccagtggaatggtggtgctgccgtcgaactgataggcgaccacgggggcggcggcatcaaaaagcgcctgcacatcaaaggggctctgaatgacgtccgacaaagaggctccggtctgcgctcctggagtatggctctgaaaatgccaaggtcctttggtaaactaaaaacattatccataaacgtgtgtgcaataatttaccaacacccggatgccctcacacttggaggcaatctcgaagagaatactgcacgtctggaaggccacatgcagacgctccgcaatcgccttccggcccagcgcctgcaaactggtccacaaggacagggcattaagacgacgcgacagtatgggatcggattcgaaggcactcagagcgctgttctgcagcggacggtgcagcaggacgatgggcagactgggcacacccagccagctgcccaaattcagggccatcgagtggagtacctcctccacatggccctgattttgggcgcacaccaaggcggccagtccgtggccactggcgtgcagccacatgttgtgcgccttgcatacgtccctcagccggagcaggttgtccacatagccacacaacgaggctccaatgtcggcgaccaccagcagcggagtcctgttattgcccacatcctgctgaatttgcttttgcagcagcgtcacatccattgtcccggactgactgtgctccggaatgaccttaatagcctccagcggtatgcccaactggcggcatgcgtagtgcagcctcatcggcgtcgtattctccgagatgtaaaacgtaggctgcgccagggcgggtatgccaccctccaagtaccccggacacctggcgacgatggccagtcgcaccgtacgcagcaccgcgtctgcattgtccgcatggaagctgctcgccgggtgggcaaagtgaaacagcgtgcccaaccagcgggtggcgtccccggaaatgctgttcgtcacccggagcagttgctgacggtccagatgcgacaaataggccacaatgctgtgcgatatgagagccaagtgggagacgtcatccagggcgggcagcgggaactccggatcatcgtcgctgtccgtgtaagaaaccaattgctccagcgacttaagaatgtcggagggcacgcgatgcttcgctggcaggaggtcctcgctggtcacccgctccccagcctcttcctcgttctcgacgggatttgggctctccggcgtggtcgacaccttaacgttctctaagcgctgcagcacctgcgaagatcgcagctccagctccgccaggcccgatcgaatctatgtggcgaatacatggctaattaggtgggatagtggacaaggtaaacaacagcgctccagaagttgacgtgtcttccgtcgtcgtcagcaaaaaaaaaaaagatagaagcagggcgaaaaaaaccaaacactcacactggaagcggcgatttcggccaccgctggcgttgattggcccggatccggctcttggtctacgagtgggctctggccgggatcgtccaccgatctaccagccgctgacatggtttcagtgcggtctaaatcacttttaacttatcgcctgcgatgcaaaataattgttttcgtttcgtgccactgcgtctgtgtgggtgggtgtgtgtgcgtgtgtgtgtggggcgggcgagtgtgtgtgtgtgttgatggaagagaggctgatgtggaatggtgtgaccgtagtgggtgcgtctgactaagatcgcaaatagtgtgcgattgttggcccatggttctggtgatggaataggtcgcaaggaagttggaaaactattataatatccgccactaaaagacgttggacagcagcacacaaacgtacatacatagcacctactcgtaaccttaaacgacgagttttcacagtggtttgtgtcacggtttgtgtctcagcgattttgaagacagcaccgcacggtcatactacacagccatcgatagttgcggaaaactcatcgatgctgcgaaagtgcgatagtatcgaataaacatgagtgtgtgcatgagtgtgggaatttattaaacaaaaacgaaacgcggacaaactatatttatgtaataaacactaagccgcagcgccaacgagtaatgaacagtccacggccaggtcgtactattcaggcgaacgcacctcgcaatcgactgcaatcaaagtgcaatagctcaatcaattgattcgttttgctcaaccaaaaacaaaatctattcccaaatcggtgcgatagttgccaaaatataaaaactacactacgctaaaaaaaaaacaatacactcacacactggcgtacaagacaacaaaagagaagaagaagagcagacgccagatataaaaagcccccaaaagaattggaaataagaccatacccctccttctcccttgaaaagggaccttaaaactaggcgacaccgaataattgaactcaagtaaaaaaccgggaaaagagaaaaacactttcaacaaaatatctagaagccttgttatcgattttgttccgggttttttttgtgtgagtgtgtgttgtgtgaagcgcgcccgcgggtgtgtgggtgagtgtgcgtgtggctctcggcgcg

SEQ ID NO: 1316 - DNA, 2624 bp, DROSOPHILA
aaacgaaaacaattattttgcatcgcaggcgataagttaaaagtgatttagaccgcactgaaaccatgtcagcggctggtagatcggtggacgatcccggccagagcccactcgtagaccaagagccggatccgggccaatcaacgccagcggtggccgaaatcgccgcttccagtattcgatcgggcctggcggagctggagctgcgatcttcgcaggtgctgcagcgcttagagaacgttaaggtgtcgaccacgccggagagcccaaatcccgtcgagaacgaggaagaggctggggagcgggtgaccagcgaggacctcctgccagcgaagcatcgcgtgccctccgacattcttaagtcgctggagcaattggtttcttacacggacagcgacgatgatccggagttcccgctgcccgccctggatgacgtctcccacttggctctcatatcgcacagcattgtggcctatttgtcgcatctggaccgtcagcaactgctccgggtgacgaacagcatttccggggacgccacccgctggttgggcacgctgtttcactttgcccacccggcgagcagcttccatgcggacaatgcagacgcggtgctgcgtacggtgcgactggccatcgtcgccaggtgtccggggtacttggagggtggcatacccgccctggcgcagcctacgttttacatctcggagaatacgacgccgatgaggctgcactacgcatgccgccagttgggcataccgctggaggctattaaggtcattccggagcacagtcagtccgggacaatggatgtgacgctgctgcaaaagcaaattcagcaggatgtgggcaataacaggactccgctgctggtggtcgccgacattggagcctcgttgtgtggctatgtggacaacctgctccggctgagggacgtatgcaaggcgcacaacatgtggctgcacgccagtggccacggactggccgccttggtgtgcgcccaaaatcagggccatgtggaggaggtactccactcgatggccctgaatttgggcagctggctgggtgtgcccagtctgcccatcgtcctgctgcaccgtccgctgcagaacagcgctctgagtgccttcgaatccgatcccatactgtcgcgtcgtcttaatgccctgtccttgtggaccagtttgcaggcgctgggccggaaggcgattgcggagcgtctgcatgtggccttccagacgtgcagtattctcttcgagattgcctccaagtgtgagggcatccgggtgttgagccatactccaggagcgcagaccggagcctctttgtcggacgtcattcagagcccctttgatgtgcaggcgctttttgatgccgccgcccccgtggtcgcctatcagttcgacggcagcaccaccattccactgggcgggagtggctcttccgccgccgctgccgctgctgagcgggaaacggccgaaggcctcaagccgctagagaagattaacaatgcttcctacttcgaccggctcaactcctggctgggtcaaatcttgcaacgcgactgtcccaattttgactttgaggtaattgaacacccgacgcacggcagctgcattcgctactgtccgctggaattggggttgggtgagcagccgccaagctccgagaacctggagagcttcgctcagagcttagaggcacatgtggacatcctgcgcgcgaccatcaagcacaaggcacggttcattcatctggtggagtgcagcgacgtgctgcgcctcgttccactgcccgaatgggcgggcatgggcggtgttcgcttcgtgcccgagggctgggagtccctgctgacggaccaggccaaaacagagctaaacaagctgaacatcgacctggtggaggccctgaaatccacggacaatgccttttcattaggcgaaggcaccgatggtctgatttgtgtgcgattcggaatggtgacccatgaaacggaggtcgaagagttgttagacttggtggtcacggtgggcaagagcgtccaggaaaactcgcgggtattggacaccatgtcggagattgttaaaaagggcattgaggcggttaccgctgatctgcagcgcgaatcggaggagaagctctggcaggagggcatcctgcgccacgtgcctgtggtgggacgcgtcttcaactggtggtccccaccggccaaggagtcgggcatcaaggggcggagcctcaatcttacccaaggtgttgtcgaaagcaccgagaacatttacaagtaccacatgcagatgaccggagccactgctcatcagttgccagcgaatcgttcgcctcccacacccatggtgcagacgcccgtggtcgcgcctgccttgccgcccgtctttcccacggtggagcccgtacccggaaatggaaacggatccggagcgagcgagggcacgccagtgcagtcgggagaagcttcgggatcgatgccagcagcctcgggagcggctccgtctgcggcgccgacccaaaaccatgtggatcatgcccgcaccgtcagtcagagcagtgccgcctcgtccaccgttccggagttagtggccgccagcagtgcaattaacaataactaa

SEQ ID NO: 1317 - protein, 852 aa, DROSOPHILA
MSAAGRSVDDPGQSPLVDQEPDPGQSTPAVAEIAASSIRSGLAELELRSSQVLQRLENVKVSTTPESPNPVENEEEAGERVTSEDLLPAKHRVPSDILKSLEQLVSYTDSDDDPEFPLPALDDVSHLALISHSIVAYLSHLDRQQLLRVTNSISGDATRWLGTLFHFAHPASSFHADNADAVLRTVRLAIVARCPGYLEGGIPALAQPTFYISENTTPMRLHYACRQLGIPLEAIKVIPEHSQSGTMDVTLLQKQIQQDVGNNRTPLLVVADIGASLCGYVDNLLRLRDVCKAHNMWLHASGHGLAALVCAQNQGHVEEVLHSMALNLGSWLGVPSLPIVLLHRPLQNSALSAFESDPILSRRLNALSLWTSLQALGRKAIAERLHVAFQTCSILFEIASKCEGIRVLSHTPGAQTGASLSDVIQSPFDVQALFDAAAPVVAYQFDGSTTIPLGGSGSSAAAAAAERETAEGLKPLEKINNASYFDRLNSWLGQILQRDCPNFDFEVIEHPTHGSCIRYCPLELGLGEQPPSSENLESFAQSLEAHVDILRATIKHKARFIHLVECSDVLRLVPLPEWAGMGGVRFVPEGWESLLTDQAKTELNKLNIDLVEALKSTDNAFSLGEGTDGLICVRFGMVTHETEVEELLDLVVTVGKSVQENSRVLDTMSEIVKKGIEAVTADLQRESEEKLWQEGILRHVPVVGRVFNWWSPPAKESGIKGRSLNLTQGVVESTENIYKYHMQMTGATAHQLPANRSPPTPMVQTPVVAPALPPVFPTVEPVPGNGNGSGASEGTPVQSGEASGSMPAASGAAPSAAPTQNHVDHARTVSQSSAASSTVPELVAASSAINNN

SEQ ID NO: 1318 - DNA, 8326 bp, DROSOPHILA
tcctagcaatatgataaaataaaataatttttaaaaattcgcggcctgactattataattttaaagctttttaattttgtttgctaaaatcgccgaattagctaccgtttacacatttatatttttgtttaattctaatttgtctttcatctgacaattttttaaaagcgaaatattttttttaaacacttttaatgttaatgttacatcatattaagtcaaatgacttaataaatatactaaataattaaaggaagtacaatagaaattattataactactgtaatttcataaatttcataaaaatatgataactgtttattgcaaaagtcatatcaaagacactagaataattctagtgtctttgctttgttcatatctaaaggcacgaagtgcggacacaagcactcaacaatcattgccttattaatttttcacacgccgcaagatgaatactctaatgacaactattcttatataaaatcatttttgaaatttatttttgtgataatacgtacatagatttggctatttctaatctattttcaaataataataacgttaaggcaatgcaaaacaagaatttttcgcatggtgccaattgatcaaaaataatatagatttaaagtctaagaacttctgaggtgaagggcatattttgtcaaatttacaatgcatgagcatacgtgtgcacacatacagttgtctgctatcactttgtgcgttgaaaagagctgttcgctgtagcgctcttcgctctctcgctctctaacaaaaattcgagagagcctggagccacctctagagccacggcgaaaaaatcgtgtgccaaaaaatcgtatggcgttacgcatcttgttattctagtgtctttgatataatgcactattacaaactatttacaaacaaaaacgttttatttaaaatataattatattgtttcagactaggtagttaaataataaatcttgaagcaaacaacaattaggtattgattgacgaaaaaacataatctttggggagatcacgcttgggatgtttaatatatatatttgttacaagaaagtattagcctactattattttaattataactgtgagttggttttcatgacatcttaatactaaaaatttccagtcaacaccaaatcatctgcttaagaaggtttttcttggaatcgaaaaactgtcgcacgtaaaatgtagaaaatgaaatgatgttttgaaatgatggaacgctgagttgggcagcttctcattgttcttatattactggttcataaatcaaaaaataagaaatactaaattgtacataaaacatatgtacatacataaaattattaaatttattgtattgcaatgcaatgtaccgcatctattattcgtaagcaagtttgctgcaaatgtttggttgcgttgatttgtaagagaaaaagtcaaattatttatagagttcagaaaaactcaaacctagaaattgcataacaaaatgtaaattgtcaatttgaaatccaatagcgtatactattagttaagcagtaaccttacgccatgaatattattaagagatgaaacggtgcaggtgcgctgcacattatatgttatttgattggcattttcgattgagaaattatatcggattcgttagtacgagatatttactagactagaacaattgttaaaattcaaaaatgtaattcaaaacattataaatgtaacattattttgaatataaactttgctactgcgatgctgcatttgtgctgccacccgacttgttcatttcttgtgcatgactttgtacagattgctgcgaagagagaacgttagaagtccacgctccagtcgctgctgttggagtggtagagtcttggttactgctattgctagaatcaaaattagcattgctattgctgttaagtgccattcgctgcatttgtcggatcactgtagcggcgtagtaggcttgctaaaaaaagtaattaaaaaatgtaagcattacatttttttctattgtatctattctattctatctatttattagacctaccttccaacgagattttgcaaagtttttctttaactgctctgacacggttccgtgaatgtttctgctgctggcctcatttccagaaatcctggtttgtaacggcacactaaattaaaaatattctatatttgttatttaacacttaccaagcatggccaagtgcttgcttgcaagtatacctcttctctaccgtcacgcacataaggtttttgatgaaatgctttgcggactcactaatttcatcccaatagggtgaatcaaattcgaaatcgcctaagatcaaaataaagttgttaataactgatcaacacatagggataatgaacgatccataggctgtgattttctaaaattatttgtatctttccctctttagtgtcgttgctcgtcaaaaaattagttcctttaaatattaaaaatgttgtacatattataatatatggattatatttactacattgaaattgttttttgttatccactattttcttaagttttatgacacttttaagacagcaataaaattaagagaccattttgcacagaatcggtcggacagacatagctaacagatttggctgttgatactaatcaagattaaatattatttatatggtcgaaaatgtctctttcactgcattgtaagctttttgctgaaattattttttcctttgaattattcctttttaaattatcctgtcacccagcgataaaagggcatatttcggcagccattttgaaacgactttttatttaaaaaatatcataaattaatattaatatgtctattcacctaaaaaagtttaaatcataaatattctttgctatacgaatcaatgattttgataaacatgtttattggagaaacctggccataatcaagggaagatacgttttatatccttgcagagagtattataattgttgtccaacaaatctgagttgattaaggctcggaaaactgtattttcttacatcatcgtagcggtctgcaagggtatacaatagaatcctacgtgaatcaacagtatttacgtttaaatattttgtctgataaacttaaaaagtgttggaaataatctaaattgacttttgtatcaaaacaaattttttattaatattatatacaataataattatattatatataattattttaattatatatacatatatacatacacatatctgtatgggacctgatgtggaaaattataaaaaattcaacagctccaaacttaaccacgaaagtgtgatctacgttattttattatattttacatcctaaaccaattttcgtatttgaaaacatttcaatagtactgtaaaaatgtttggaagaaaaacatgtttcgaacactgttgatttgtgcagggatctacctataaacatcggcttaccgaagttaggttccttcactgtttttatataacaccttttaaaatctgtgcgaaaagattagcatcattttcgtcataaaacggagggtagccgcatagaagaatgtatgatatcactccaatactccacacatcgacagcttttccatacggtttttgcgccagcacctcaggagccacatatcctggagtcccacaggctgtagccataattccagaatcctccattttagataaaccaaaatcgctaatcataattttgctatcatcatcaggactatagtaaagtaagttttccggctgtaaaaattcagtattgttactaaaaaaacaaaagagaatgctctagtcgagttccccgactatcagatacccgttactcagctagtgcgaatgcgaaggccgaatttcatcacttttggggaataaaattgttctaacgtgtgggcgtgactgttatgggtttctggtacaccgatagaaaatgggaaaaactaaacatttttcaaaagtgtgccagttttgggcggtttgtagtcaataaaatgagcgtggcaaaaagttgtttggcaaatcgatagaaaagttcaaaagagtgggtgtgaacgttttgggcggtttgaaggcgtggcagcattgatcaacaaacttgagttgcgtctatgtctctagaacctgtacgctcaaccccaaccttctagttcttatagttcctgagatctcgacgttcatacggacggacagatagacgggatgttgatcctgatcaagaatatatatactttcatacttttcaacgaatcatctagtatacccatttactctacgagtaacgggtgtaaaaagcaggcgagcctatatgtattacatttcgttaacccatatagatttcaaagatccgttgcctatacattaatctattttcctttcctaagtgccaaatgatcattgaagatataaatcagataaaattgtcttaccttaagatcacgatggacgacaccttgttcatgcatataatcaaccgcttctagtatctgtcttataagatgagaagcgtccttttctgtgtaggaccccttttcgacaatgcgatcaaagagttctccaccagtaaccctggaagttccaaaaatgaagtaaaacaactaggtacagatagcattaacgtacaactccataacgagatacacctttgacttatcctcatacgtttctaagagttgcactatatttggatgagttaacctgaaagtaaaattgtaatcactttattttttgtgggtatcagccagaataaaaaaatataagcaataattatttgccctcgtgggatttaggatatcgcaaaagtttttaaatacacctttaactcaatacctaaagttaagtcttgagaagatattttgaaatataatcaatctgaagttatgtgacagaagcctcgaatcgctgttctaagactgacttttatatgggagtgcacagtaagttcaaaatgggattgggatatgaactcaccgcgttccatttagacatttgccatcgaaatgatttgcactgaacctaaacgtgaaaagaaagtaaattaaggaaacaacaagaacgagtttgtaaaacaagaaaatcaatataaaaagccaaggaaataaagatttttgcgcaaacactctgttaacgctttcctaataggtttttatacccgtagagtaaagagtatactagattcgttgaaaagtatgtaacaggtagaaggaagagtttccgaccatataaagtatacatatttttgatcagggacaatagccaagtcgaactagccatgtccgtctgtctgtccgtataaacgtcgagatctcacgaactatgaaagctagaaggttgagattaagcatacagattctagagacatagacgcagctcaagtttgttgaaccatgttgccacgcccacaattctgcacactgttttaatttttttatttgtatcgatttcccaaaaaacttgttgccacgcccattctaacgcgcacaaaccacccaaaactgccacgaccaccatttttgatgctttgatatttttccgttttttagtagccttgtgaatttctatcgattttccaaaaaacttttccatggcccacaaaccggccaaacctgtcactcccacactttgaaaaaatattttcatcttttttcatatttttattattaatgtaaatttctatccatttgatatgatagggagaacgctatagtcgagtttcccgactatcagatacccgttactcagttagtggtaatgcgaatgcaatttcataagttttcttggatatcgatagatatatgggaataaagtgagaaacatttttttttggtataccgataaaaattggcaagacaaacaataaaacacataaaaatgaaaacattttttaaaagtgtgggcgtggcagttgtgggcggtttttagggcgtggcaacatgggtcaataaataatgcgtctttgtctctacaatctgtatgcttaatcccgaccttctagcttttacagttcctgagatctcgacgttcatacggacggacaaacagacgggcggacaggctcagatcgactcgactattgagcctgatcaagaatatatgtatgtactttaaatggtcggaaacgcttccttctgcttgttacatacttttcaacgaatcttgtatatcctttcactctatgagtaacgggtataaatctttttagggcattaaaaacaacaatgtattatataaaaaaatgttggtattcattaaatattaatgaaattggccacccacaaaaaaattagaacgaaaacacggagatcaaagtggcctcgaccattctcagaagaataacccttcttgatatcgagacgataacgatctctaagtcgataatctcaagcgtaagcagtcccggtttttagatttaagaagcggtacattaacggaagactaaggatgtacatatactaacaatattttttttggaacatttagcgcgtttctttaatttagtttaataaagtatctttttaaattttttttgattcgcaatgggaatatgttcaaaagttgggcgttagagtgggtgtgaaattttgtgcgttagagtgggagtggcaaaaacttttcttgtatatcgataaaaattgacaagaccaataattaaatgaaaaaaataattaaatgaacaaacttgcactgcagactctagcttttatagacagatcgattaataaatttaatcctaattaagattatattcactattaagggtcgaaaacgtttctttaccagttacgtacttaacagcaacctagtatagccctttattctacgagtaacgggtataattaagatcaaaagttcggcctgtagatattactgctatagtaactttgatatcgatatcgaaaggaagctaccttcggcaaaccaagattatataccctggcatagaaaatatgaaaaaattctttttggatgttctcaatacctagaaggataaaaccaatatacaaaatattttaatttcacctaatggttggttggttaaaaagcacttgatttttaacagacgagcatcgcaacgattaagtgttatcctaccttttagttaaaatgatcgctaatctgaatttataagccattgcggtcatctacataaactatgttttggtttagcattcattactcaagttatattaaatgcaaaagctactattttcacaattgtaatatctggatcggtattataataaaacaaaatatctcgaaaattaacctatacttttatattttttagtaataaaaaatctaagatcaagtaaaagaagtgaatattaaacataaattagacagaacaaactgaggattttactatgcccaacaccaaacagtattctacagtcgcgattttaatatgtatattgattttattgtttttaatgggtttatgatcacatactaagtttttctaccacgagtaagaaatattcattgcgaaatctaaatttgtatatatatgtaaatatgtatagataataagaaacgatttcgattaaagtttaatgatcaaatgcgacattaagaattgtcagtttcatattttctttcggtgtacaggcacaaaatgtatatcactctttattttatttattccgagttgtattggtgcctattttctttttaacgtcaactctaaattattaacttccttaccttctcaaaacgcgaatttcattctccagagattcttcctttccctttagagctttcttatcgataattttcactgcaaaatgttcgcctggcgaatctttgctttcggctaggcgtacttctgaaaaggctccacttaagcggtaaaaaaaggttagtcattaaagtatttaaaaatctttttgcttagcagcacgtacgtccccagaagtccgtgaagattgtatttctcttcaattgacacttgcttattgagctcctttaagtccttcgccttggctttcttgcccgaatcctttttgccaaacaaaggcatttctaagcaagttgattttgaagtagtatgtattttagattgccgaaattcgcatggttattactcttcaacagtttaagccagacttctcacagggttctaaaagttataacgacgaaccctatcagcgaagacgatcatatatattcacaaaagcaggttacatacatacatagctagacacaaagcaatgcagttgttttcggtttgggagctcaattattccgctcagtaatgagcccagctgccaaaggttaaattttagctgattaccttatattgcgtacatctgtagtcgaaaacag

SEQ ID NO: 1319 - DNA, 2264 bp, DROSOPHILA
ctgttttcgactacagatgtacgcaatataaggtaatcagctaaaatttaacctttggcagctgggctcattactgagcggaataattgagctcccaaaccgaaaacaactgcattgctttgtgtctagctatgtatgtatgtaacctgcttttgtgaatatatatgatcgtcttcgctgatagggttcgtcgttataacttttagaaccctgtgagaagtctggcttaaactgttgaagagtaataaccatgcgaatttcggcaatctaaaatacatactacttcaaaatcaacttgcttagaaatgcctttgtttggcaaaaaggattcgggcaagaaagccaaggcgaaggacttaaaggagctcaataagcaagtgtcaattgaagagaaatacaatcttcacggacttctggggactggagccttttcagaagtacgcctagccgaaagcaaagattcgccaggcgaacattttgcagtgaaaattatcgataagaaagctctaaagggaaaggaagaatctctggagaatgaaattcgcgttttgagaaggttcagtgcaaatcatttcgatggcaaatgtctaaatggaacgcggttaactcatccaaatatagtgcaactcttagaaacgtatgaggataagtcaaaggtgtatctcgttatggagttggttactggtggagaactctttgatcgcattgtcgaaaaggggtcctacacagaaaaggacgcttctcatcttataagacagatactagaagcggttgattatatgcatgaacaaggtgtcgtccatcgtgatcttaagccggaaaacttactttactatagtcctgatgatgatagcaaaattatgattagcgattttggtttatctaaaatggaggattctggaattatggctacagcctgtgggactccaggatatgtggctcctgaggtgctggcgcaaaaaccgtatggaaaagctgtcgatgtgtggagtattggagtgatatcatacattcttctatgcggctaccctccgttttatgacgaaaatgatgctaatcttttcgcacagattttaaaaggcgatttcgaatttgattcaccctattgggatgaaattagtgagtccgcaaagcatttcatcaaaaaccttatgtgcgtgacggtagagaagaggtatacttgcaagcaagcacttggccatgcttggatttctggaaatgaggccagcagcagaaacattcacggaaccgtgtcagagcagttaaagaaaaactttgcaaaatctcgttggaagcaagcctactacgccgctacagtgatccgacaaatgcagcgaatggcacttaacagcaatagcaatgctaattttgattctagcaatagcagtaaccaagactctaccactccaacagcagcgactggagcgtggacttctaacgttctctcttcgcagcaatctgtacaaagtcatgcacaagaaatgaacaagtcgggtggcagcacaaatgcagcatcgcagtagcaaagtttatattcaaaataatgttacatttataatgttttgaattacatttttgaattttaacaattgttctagtctagtaaatatctcgtactaacgaatccgatataatttctcaatcgaaaatgccaatcaaataacatataatgtgcagcgcacctgcaccgtttcatctcttaataatattcatggcgtaaggttactgcttaactaatagtatacgctattggatttcaaattgacaatttacattttgttatgcaatttctaggtttgagtttttctgaactctataaataatttgactttttctcttacaaatcaacgcaaccaaacatttgcagcaaacttgcttacgaataatagatgcggtacattgcattgcaatacaataaatttaataattttatgtatgtacatatgttttatgtacaatttagtatttcttattttttgatttatgaaccagtaatataagaacaatgagaagctgcccaactcagcgttccatcatttcaaaacatcatttcattttctacattttacgtgcgacagtttttcgattccaagaaaaaccttcttaagcagatgatttggtgttgactggaaatttttagtattaagatgtcatgaaaaccaactcacagttataattaaaataatagtaggctaatactttcttgtaacaaatatatatattaaacatcccaagcgtgatctccccaaagattatgttttttc

SEQ ID NO: 1320 - protein, 405 aa, DROSOPHILA
MPLFGKKDSGKKAKAKDLKELNKQVSIEEKYNLHGLLGTGAFSEVRLAESKDSPGEHFAVKIIDKKALKGKEESLENEIRVLRRFSANHFDGKCLNGTRLTHPNIVQLLETYEDKSKVYLVMELVTGGELFDRIVEKGSYTEKDASHLIRQILEAVDYMHEQGVVHRDLKPENLLYYSPDDDSKIMISDFGLSKMEDSGIMATACGTPGYVAPEVLAQKPYGKAVDVWSIGVISYILLCGYPPFYDENDANLFAQILKGDFEFDSPYWDEISESAKHFIKNLMCVTVEKRYTCKQALGHAWISGNEASSRNIHGTVSEQLKKNFAKSRWKQAYYAATVIRQMQRMALNSNSNANFDSSNSSNQDSTTPTAATGAWTSNVLSSQQSVQSHAQEMNKSGGSTNAASQ

SEQ ID NO: 1321 - DNA, 3604 bp, DROSOPHILA
ggcccctgcaaggagcaaagtccgggtctgcttcaactgcaggccaagagcaagtggcaggcttggcgcaatctgggaacaatgtcccagtccgctgcccggcaggcctacgtccagaagctgcaggagcttcaacccaactggcggtcccggcgcaacccaggctgggtcgttcattccattgagtcggtcccactggaggaccaacgtttggacagtgaaaagaccctgtttgaccacgtgaaggagaacaatctagacaggctgagggaactgctgcagccaagtgacttggttaagctggacgagcatggcatggcgctcatccactgggctaccgatcgcaatgccgtcgaaatcatacagttcctggtgcggagtggggccagtgtaaatcagcgagatgcggagcaacagactccgctgcactacgccgccagttgtggacacttggaggcgctccaatgcctgttggagctacacgccagcctggagctacgcgattcagatggacagacttgttacgacgtggctgacgatgagcagatctgccaggtgcttcaaacggaacgggaacgactcgctggatccgcgtcctaatgtcaaaatcttaagttgttcggtgctcatttgctttaaaaacagcaaggtgttgtgaaccattgtaaatctccgacaagtcccctgtaagttctttggaactataataaacatacatacataaatgtaattttggaagtactttcctttcggatttttaggaatcattgagatcgaaaaaacataaaaaagaaagagatggataacctctctttttttgttctgatcaagcagccagttgaaaacactgcaatgtactttttacaaagctgctactgtaatctgataatctattcaattcttcagatatcattgaacgaaagttatctgtgaagatcataattgggttgtgcgtactgactaaggagtaaatccaatgacacaataatgcatttatgttactaactgatgtatttattgaaaataatataagggttcttttgcaatggccgatcaacgcctacttccacagcttcttgatagacatgttcttctccgagtccttctgcatcaccttggccacagccatctcgaagtcctcctgggtgacatggacgcgtcgttcgcgcagcgcatacatgccggcctccgtgcagacgcccttgacttccgcacctgatgcgcctggcattagctcggcgatcttgcgcagattaatgccacgcgtgaggttcatcttacgggagtggatcttcaagatgtccagacgcgcctcctcgtttggtggcgggaactcgatcttgcgatcaatacggccgggacgcagcagagcgggatccaggatgtcaatgcgattggtggccatgatcaccttgatgttcttggtggcctcaaagccgtccagctggttaagtagctccagcatagtacgctgcacctcggaatcgccgccggaacctgactcaatacgcgacgagccaatggaatcgatttcgtccatgaaaataattgatggtgcatgttcccgggccattacaaagagttctcgaaccatgcgcgaaccctcgccgatgaatttctggaccagctctgagccagagacgcgaatgaaggtgcactcggtgtgatgggcaacggccctggccagcaaagtctttcctgtacctggaggtccataaaggagcactcccttcggctgggcaatacccaaggcatcaaacagctctggatgctttacgggcaactcaatcacctccttgatctctttaatctgtttgtccaggccgccaaccatttcgtatgtggagtcaggaactttttcaaccatcataagcgagaccagcggatccaccttattgggcagaatcttgtgcagcgtatagctctcattgcgcagggccacgcggcaattgggggttacgtcgttgatatctatgtttttgtccagatcgacgacgaacttgccctcgggatgcaccttgaccagcactttcttcttgtccatgggcttcacaacctcgcccacatagctaccctgttcctggagcagctgcagctcctcccgcagcatccgaactgcaaaagacgtgctaattaggattgctttctcaaatttaaagattttttgatattaagaccaagaacaagtcttatatgttttctatatcctacagctaaccaactatgcacattatctacatatgtgtaacagtaaatttacctttagcattgagctcattgcgctgggcctgcagtcgtctcaaattctggtgcttctcggccaccaccagctgcagttcctcgatcttttggatgtagtaggaccggaatccctcgcctttatggtaggccgactcgatttccatctgcgaaaacatggagcattggtttttcgcggtggaagagctgggggaatcaaatgtacatacccgattcgtcaccgtcatctttcgttttctgtttacactttaatttgttattatttgtcgaactgaaggaccacaatgcaagatgtcgaattaattcctctttattgtatgactctgcatttgcttttcgagatgacacatgccggttatcgcactgcattcggaatatcgatgccatcgagcaatcggcatcgataaaaacgctaggtggtaaaaaacctagctaaggttttcgaattaaatgtgtccagtaaacaattaaaattaaatataacaaaacacgaccttactcgtaggattatacccgtcgtagagtaaatggagtgtactagatacgttgaaaagtatgtaacaggtagaaggaagcgtgtccgaccatataaagtttatatattcttgatcaggatcaatagccgagtcgatttggccctgttcgtctgtccgtccgcataaacttcaagatcttaggaagtttaaaagctagaaggttgagattaagcatacagattctggagacagcgctagtttgttgacccaaaccacccaaaactgccacgcccacttttttaaaaaatgtcttaatattttatttttatattagtcttgtaaatttctttcgacatgccaaaaccgatacattttttcaatttatttaccaatttctagacagaaaaatgatgatatttctctgagtaacggttatctgatagtcggggaactcgactataggtttctctctgattcgtggtaaaatacattgtgttctctcttgtttttgcgtagcaccagcgatttttaagtaatgaacttgaattagcctaataccgctgctaatgaaaaaaatgtaatgtatttctaattaattgtgaatacttaatgtgacaaattctaagcttgaaggtgttcaatattatctatgaaaatttcaaaacattgggcatgtaaatgcgtagtctgaaatagtcatcaaaatgtgctttgagaacaaagtactggtatgttttaaggcaaaataagaatattttcaaaatcccctgccgaaaatcaaacttctcacactcaaaccatccgttttgtgcgggagtgcagacccgccaaccaatttctgtcgtttgttaaatttatattttaaattg

SEQ ID NO: 1322 - DNA, 1396 bp, DROSOPHILA
tcatctcgaaaagcaaatgcagagtcatacaataaagaggaattaattcgacatcttgcattgtggtccttcagttcgacaaataataacaaattaaagtgtaaacagaaaacgaaagatgacggtgacgaatcggatggaaatcgagtcggcctaccataaaggcgagggattccggtcctactacatccaaaagatcgaggaactgcagctggtggtggccgagaagcaccagaatttgagacgactgcaggcccagcgcaatgagctcaatgctaaagttcggatgctgcgggaggagctgcagctgctccaggaacagggtagctatgtgggcgaggttgtgaagcccatggacaagaagaaagtgctggtcaaggtgcatcccgagggcaagttcgtcgtcgatctggacaaaaacatagatatcaacgacgtaacccccaattgccgcgtggccctgcgcaatgagagctatacgctgcacaagattctgcccaataaggtggatccgctggtctcgcttatgatggttgaaaaagttcctgactccacatacgaaatggttggcggcctggacaaacagattaaagagatcaaggaggtgattgagttgcccgtaaagcatccagagctgtttgatgccttgggtattgcccagccgaagggagtgctcctttatggacctccaggtacaggaaagactttgctggccagggccgttgcccatcacaccgagtgcaccttcattcgcgtctctggctcagagctggtccagaaattcatcggcgagggttcgcgcatggttcgagaactctttgtaatggcccgggaacatgcaccatcaattattttcatggacgaaatcgattccattggctcgtcgcgtattgagtcaggttccggcggcgattccgaggtgcagcgtactatgctggagctacttaaccagctggacggctttgaggccaccaagaacatcaaggtgatcatggccaccaatcgcattgacatcctggatcccgctctgctgcgtcccggccgtattgatcgcaagatcgagttcccgccaccaaacgaggaggcgcgtctggacatcttgaagatccactcccgtaagatgaacctcacgcgtggcattaatctgcgcaagatcgccgagctaatgccaggcgcatcaggtgcggaagtcaagggcgtctgcacggaggccggcatgtatgcgctgcgcgaacgacgcgtccatgtcacccaggaggacttcgagatggctgtggccaaggtgatgcagaaggactcggagaagaacatgtctatcaagaagctgtggaagtaggcgttgatcggccattgcaaaagaacccttatattattttcaataaatacatcagttagt

SEQ ID NO: 1323 - protein, 405 aa, DROSOPHILA
MTVTNRMEIESAYHKGEGFRSYYIQKIEELQLVVAEKHQNLRRLQAQRNELNAKVRMLREELQLLQEQGSYVGEVVKPMDKKKVLVKVHPEGKFVVDLDKNIDINDVTPNCRVALRNESYTLHKILPNKVDPLVSLMMVEKVPDSTYEMVGGLDKQIKEIKEVIELPVKHPELFDALGIAQPKGVLLYGPPGTGKTLLARAVAHHTECTFIRVSGSELVQKFIGEGSRMVRELFVMAREHAPSIIFMDEIDSIGSSRIESGSGGDSEVQRTMLELLNQLDGFEATKNIKVIMATNRIDILDPALLRPGRIDRKIEFPPPNEEARLDILKIHSRKMNLTRGINLRKIAELMPGASGAEVKGVCTEAGMYALRERRVHVTQEDFEMAVAKVMQKDSEKNMSIKKLWK

SEQ ID NO: 1324 - DNA, 5145 bp, DROSOPHILA
aataattatattatatataattattttaattatatatacatatatacatacacatatctgtatgggacctgatgtggaaaattataaaaaattcaacagctccaaacttaaccacgaaagtgtgatctacgttattttattatattttacatcctaaaccaattttcgtatttgaaaacatttcaatagtactgtaaaaatgtttggaagaaaaacatgtttcgaacactgttgatttgtgcagggatctacctataaacatcggcttaccgaagttaggttccttcactgtttttatataacaccttttaaaatctgtgcgaaaagattagcatcattttcgtcataaaacggagggtagccgcatagaagaatgtatgatatcactccaatactccacacatcgacagcttttccatacggtttttgcgccagcacctcaggagccacatatcctggagtcccacaggctgtagccataattccagaatcctccattttagataaaccaaaatcgctaatcataattttgctatcatcatcaggactatagtaaagtaagttttccggctgtaaaaattcagtattgttactaaaaaaacaaaagagaatgctctagtcgagttccccgactatcagatacccgttactcagctagtgcgaatgcgaaggccgaatttcatcacttttggggaataaaattgttctaacgtgtgggcgtgactgttatgggtttctggtacaccgatagaaaatgggaaaaactaaacatttttcaaaagtgtgccagttttgggcggtttgtagtcaataaaatgagcgtggcaaaaagttgtttggcaaatcgatagaaaagttcaaaagagtgggtgtgaacgttttgggcggtttgaaggcgtggcagcattgatcaacaaacttgagttgcgtctatgtctctagaacctgtacgctcaaccccaaccttctagttcttatagttcctgagatctcgacgttcatacggacggacagatagacgggatgttgatcctgatcaagaatatatatactttcatacttttcaacgaatcatctagtatacccatttactctacgagtaacgggtgtaaaaagcaggcgagcctatatgtattacatttcgttaacccatatagatttcaaagatccgttgcctatacattaatctattttcctttcctaagtgccaaatgatcattgaagatataaatcagataaaattgtcttaccttaagatcacgatggacgacaccttgttcatgcatataatcaaccgcttctagtatctgtcttataagatgagaagcgtccttttctgtgtaggaccccttttcgacaatgcgatcaaagagttctccaccagtaaccctggaagttccaaaaatgaagtaaaacaactaggtacagatagcattaacgtacaactccataacgagatacacctttgacttatcctcatacgtttctaagagttgcactatatttggatgagttaacctgaaagtaaaattgtaatcactttattttttgtgggtatcagccagaataaaaaaatataagcaataattatttgccctcgtgggatttaggatatcgcaaaagtttttaaatacacctttaactcaatacctaaagttaagtcttgagaagatattttgaaatataatcaatctgaagttatgtgacagaagcctcgaatcgctgttctaagactgacttttatatgggagtgcacagtaagttcaaaatgggattgggatatgaactcaccgcgttccatttagacatttgccatcgaaatgatttgcactgaacctaaacgtgaaaagaaagtaaattaaggaaacaacaagaacgagtttgtaaaacaagaaaatcaatataaaaagccaaggaaataaagatttttgcgcaaacactctgttaacgctttcctaataggtttttatacccgtagagtaaagagtatactagattcgttgaaaagtatgtaacaggtagaaggaagagtttccgaccatataaagtatacatatttttgatcagggacaatagccaagtcgaactagccatgtccgtctgtctgtccgtataaacgtcgagatctcacgaactatgaaagctagaaggttgagattaagcatacagattctagagacatagacgcagctcaagtttgttgaaccatgttgccacgcccacaattctgcacactgttttaatttttttatttgtatcgatttcccaaaaaacttgttgccacgcccattctaacgcgcacaaaccacccaaaactgccacgaccaccatttttgatgctttgatatttttccgttttttagtagccttgtgaatttctatcgattttccaaaaaacttttccatggcccacaaaccggccaaacctgtcactcccacactttgaaaaaatattttcatcttttttcatatttttattattaatgtaaatttctatccatttgatatgatagggagaacgctatagtcgagtttcccgactatcagatacccgttactcagttagtggtaatgcgaatgcaatttcataagttttcttggatatcgatagatatatgggaataaagtgagaaacatttttttttggtataccgataaaaattggcaagacaaacaataaaacacataaaaatgaaaacattttttaaaagtgtgggcgtggcagttgtgggcggtttttagggcgtggcaacatgggtcaataaataatgcgtctttgtctctacaatctgtatgcttaatcccgaccttctagcttttacagttcctgagatctcgacgttcatacggacggacaaacagacgggcggacaggctcagatcgactcgactattgagcctgatcaagaatatatgtatgtactttaaatggtcggaaacgcttccttctgcttgttacatacttttcaacgaatcttgtatatcctttcactctatgagtaacgggtataaatctttttagggcattaaaaacaacaatgtattatataaaaaaatgttggtattcattaaatattaatgaaattggccacccacaaaaaaattagaacgaaaacacggagatcaaagtggcctcgaccattctcagaagaataacccttcttgatatcgagacgataacgatctctaagtcgataatctcaagcgtaagcagtcccggtttttagatttaagaagcggtacattaacggaagactaaggatgtacatatactaacaatattttttttggaacatttagcgcgtttctttaatttagtttaataaagtatctttttaaattttttttgattcgcaatgggaatatgttcaaaagttgggcgttagagtgggtgtgaaattttgtgcgttagagtgggagtggcaaaaacttttcttgtatatcgataaaaattgacaagaccaataattaaatgaaaaaaataattaaatgaacaaacttgcactgcagactctagcttttatagacagatcgattaataaatttaatcctaattaagattatattcactattaagggtcgaaaacgtttctttaccagttacgtacttaacagcaacctagtatagccctttattctacgagtaacgggtataattaagatcaaaagttcggcctgtagatattactgctatagtaactttgatatcgatatcgaaaggaagctaccttcggcaaaccaagattatataccctggcatagaaaatatgaaaaaattctttttggatgttctcaatacctagaaggataaaaccaatatacaaaatattttaatttcacctaatggttggttggttaaaaagcacttgatttttaacagacgagcatcgcaacgattaagtgttatcctaccttttagttaaaatgatcgctaatctgaatttataagccattgcggtcatctacataaactatgttttggtttagcattcattactcaagttatattaaatgcaaaagctactattttcacaattgtaatatctggatcggtattataataaaacaaaatatctcgaaaattaacctatacttttatattttttagtaataaaaaatctaagatcaagtaaaagaagtgaatattaaacataaattagacagaacaaactgaggattttactatgcccaacaccaaacagtattctacagtcgcgattttaatatgtatattgattttattgtttttaatgggtttatgatcacatactaagtttttctaccacgagtaagaaatattcattgcgaaatctaaatttgtatatatatgtaaatatgtatagataataagaaacgatttcgattaaagtttaatgatcaaatgcgacattaagaattgtcagtttcatattttctttcggtgtacaggcacaaaatgtatatcactctttattttatttattccgagttgtattggtgcctattttctttttaacgtcaactctaaattattaacttccttaccttctcaaaacgcgaatttcattctccagagattcttcctttccctttagagctttcttatcgataattttcactgcaaaatgttcgcctggcgaatctttgctttcggctaggcgtacttctgaaaaggctccacttaagcggtaaaaaaaggttagtcattaaagtatttaaaaatctttttgcttagcagcacgtacgtccccagaagtccgtgaagattgtatttctcttcaattgacacttgcttattgagctcctttaagtccttcgccttggctttcttgcccgaatcctttttgccaaacaaaggcatttctaagcaagttgattttgaagtagtatgtattttagattgccgaaattcgcatggttattactcttcaacagtttaagccagacttctcacagggttctaaaagttataacgacgaaccctatcagcgaagacgatcatatatattcacaaaagcaggttacatacatacatagctagacacaaagcaatgcagttgttttcggtttgggagctcaattattccgctcagtaatgagcccagctgccaaaggttaaattttagctgattaccttatattgcgtacatctgtagtcgaaaacag

SEQ ID NO: 1325 - DNA, 967 bp, DROSOPHILA
aaggtaatcagctaaaatttaacctttggcagctgggctcattactgagcggaataattgagctcccaaaccgaaaacaactgcattgctttgtgtctagctatgtataaccctgtgagaagtctggcttaaactgttgaagagtaataaccatgcgaatttcggcaatctaaaatacatactacttcaaaatcaacttgcttagaaatgcctttgtttggcaaaaaggattcgggcaagaaagccaaggcgaaggacttaaaggagctcaataagcaagtgtcaattgaagagaaatacaatcttcacggacttctggggactggagccttttcagaagtacgcctagccgaaagcaaagattcgccaggcgaacattttgcagtgaaaattatcgataagaaagctctaaagggaaaggaagaatctctggagaatgaaattcgcgttttgagaaggttcagtgcaaatcatttcgatggcaaatgtctaaatggaacgcggttaactcatccaaatatagtgcaactcttagaaacgtatgaggataagtcaaaggtgtatctcgttatggagttggttactggtggagaactctttgatcgcattgtcgaaaaggggtcctacacagaaaaggacgcttctcatcttataagacagatactagaagcggttgattatatgcatgaacaaggtgtcgtccatcgtgatcttaaggtaagacaattttatctgatttatatcttcaatgatcatttggcacttaggaaaggaaaatagattaatgtataggcaacggatctttgaaatctatatgggttaacgaaatgtaatacatataggctcgcctgctttttacacccgttactcgtagagtaaatgggtatactagatgattcgttgaaaagtatgaaagtatatatattcttgatcaggatcaacatcccgtctatctgtccgtccgtat

SEQ ID NO: 1326 - protein, 190 aa, DROSOPHILA
MPLFGKKDSGKKAKAKDLKELNKQVSIEEKYNLHGLLGTGAFSEVRLAESKDSPGEHFAVKIIDKKALKGKEESLENEIRVLRRFSANHFDGKCLNGTRLTHPNIVQLLETYEDKSKVYLVMELVTGGELFDRIVEKGSYTEKDASHLIRQILEAVDYMHEQGVVHRDLKVRQFYLIYIFNDHLALRKGK

SEQ ID NO: 1327 - DNA, 7249 bp, DROSOPHILA
aagaatcctgcatccaaatgcgcaggtaagtcgatggagatggaaatgaaagagttgtcagttgaattcttggtatttttattgggtttttttttgttccgtttattttgtacacataaataaattgaattatttgctgcataaataataatagcatatagcggtagtagattaataaaatatgatttcttgttggctctcttctcatttgattcggtttttcgaaacggaaacggatgtgggcgcggacgcggatctcgattccttcgctatatagttaacaaagaaaaagcactaaactgtgtattattgtaatttattaattaattttatgttgtctagtcctttgcatacatttttatcatttcatgtttaaaaatcacaaataattgtttgaaacaaatcttatatttttcatctcccatacatacgcctttgccatctctttcgatttgctgctcgaatatatgcatatatatatatatatccaccgccatcgtcttcaagtttatcttgcgtctcgtttggtgactctttttgttttgttaatcgtatgtttcgtttaaagttaaacttgttacatagttgcgtttatttgtttacagctcttcctctctcgtttacctataatctatatataatgctcctcttgttggttgcttttatttagtttatgttctttctttctatgcccttctattaggtttaaggtttctcatttccttttctttgctcgaccctccttcactttttctttctttctttacataatcttgcttttgcttttacttttgtttctttctttctttctttctttttgcttataattttattggacaactagcaacgaacgcttatttacacttggacaaaaggaaacgattcgcttcgcggcgagttcacttctacttctgcctgcgattaaacaattatcgattaagaatattatgtagcatagaagaatattatgtagtagaagcctaagcctaaattgaagttactttagttcaagcaatgagtcagcgtcaacgggagttcgaggtactggactcgatgcgaaagctgatactctggtcaggattgttcggcggacgaaacggaaacggaaacgagagtaagaggaaaggaagagcggtaaaacaaagtaagaagaatgaagggagcaagtttgcgcggcatggcgtggccagtggatctccaaacactgccgtcgtcggcggggactaataaatacctaaatattacttagctgttagactacaaacaatatatatgtataaaagtaaaaagggtaagttccgcgcatgtgtgtgtatgtgtgtgtgtgtgtgtgtgtgccgtggtgtgtatgaatcgtttccaagaaatatgctctttgtttttgaattttgaaaaacaataaacacgtgcggccataatcccttgcccgcaatccatccttttaatcccgctccgcacgcaaacttgctccgctccgccatcatccagtttagagcgtgaattcttctcctcttctccggttcgtgtcaccgccctagttatatatcttgatggccttctcggagaagttaagcgaactgcgcttacgcgacttgttgatgtgatccaagccaaagaagggcaactggccgctggtccacgagcgataaacctccagatcaacgggcgtattgtcattaacatccgcattgtgacccatagagattacgcagaatttgtagttttcccactccttgtcctgcacattcagacgacgctggatgcgctgcttaagtgcaccgtatggctcaccttggcgcgccttggttaggaagggtatgccgaatgagttgtacagctctttgctgaaatgggccactggtatgaggaactcattctccgccagttgcatatcctccgccggcacctcctcgatgcgaaaagtcttttgagcgccctgtgcggtcgttattgactcgttggactttagcagcgtatccagcggtatatcgtccttgcataccgccacaatcttatgattgctaatcttcaacaggcgcaatttgcgacggctgttctccgcaaacgagattttctttgccgcctcctccagcaatcctttcaccgtatcgttcttattggggtaaagtaccagctccttttcgtccttaagatcactgctcacccagacgcacttgaactgcttcttattatccagctcgtggatgctaagcgatagtcgttgatagaagatacgcttggttgagctctgtttggtgtaagaaaccagatccttgatggtgcccttcaataaatagtaaactttaatggaaaaagcattaattgcatatttatatttaccttaaatgtgtagggtacagcattgcccgccgtctccttgtagttgttgatgcacatgaagaactgcagcttctgtggatcggtattcaagcgctcggccaccgcattggcgagctgatcgtaattatagcgattggacagctccagcgtaaagtccggttcattgggattgcatttgtcgctgaagatgatctcgatgcggtagactagatccaggaagtaatcccctaccgtgggcaggtcgagtttggcgtcaacgttttcgcgctcgaagattaaaatgtggccttgcagatgatcctgcggtatgaacagcgcactctcgatgggctcattcagattgaccagcttcttgtcggcatactcatcgtagatggtcagctcggtgtccggttcgaagcccagtttgctattaacatccggcaccagatcaatgagtcggcgggtgtgcggctgttgggtacatccaatataatttagccgcttattgcgcggatcatagtatttgaggaacagcagggattcggtcttgggattaaagggcggcaggggaccaggtacatccgtccaggccagctgcagccagatgacccacggtttctgtgacgttgatatctgctcgatggtgcgtgatccctccgccacgaaatcgaaatgcgaaaacttttgcgtctgggcggtgcacaagttccacatgcgcatacgttggcgcgacactccgaaacccctgacaaacaagtccaccagctcgtcgacagtctgattttgtttgatgcggaagacgcgcggatggaccttctccagatcgaagagacgacgcttgtgctgttcctcgaagttctcctcgaggattacgtgcacggacacatatgtgttggcctcgccgcgctctttgcgtcgcgccatttcgattcgtttctccagatcgagccgctccaccagatcgcttgatatctcgctttccgttatgtcgccaaggacgcgatccaactccgactgtcggatgtagaccagcatataggcattgctgcacttggcatgaaacgagatctcatcgtccatgccgccgtagttctgttcgatcgcctcctgtttgcggcaactggagaccacatcgtcgtcgaacttaaaccaacgtccgtcagcctttggattaatgaagaccacatagtgcccgccatggttatcgcccgaatgcaccagcacggcgtgtagaacgtagtccgccaaggtattctcactctcggccagatagcgatccagattgatgtgttcgtagaactcgaaacgatcgttgtacttgatcgagctatccgtgacgggatcgtactggaagcgcatcaggtgcagatgcaaaacgggtgggaatgaagtgaagatgacgcccttgctggcttcctaaattcacaagataatatatatcaattactatcatgaataaacgggcaaatagttaccgattttggtggctattgattttttatttaattctattcgaattccgagactcacctgcaagccatgcacaccagcatcgtatttgttgtcaccctccagcgtttcgggggctacgtaatcctgaaaggattcgtagatgttcttcttatccttgatgttcagctgaatgtcgtagaacgtctcgtagcgtgtgctattgtaatcgacgttcttgcacttaatgtacgacgacattttgccctcaaacagacccggtatggtgccctccaggatggtgcccttcatcttcgactcgagcttgtcgagcagcacgcgcagaaactcctggacatcgtgctgcataaacgaatcgagcgtctcccagccaaaggatttggttaactttttggtgccaacgggacggtcaccaaactgcaattcatggaacacacgctgcagcgataatccaacggatttggaactatcgtcagcctccgtgggtatgcgatacacagacagtcttagcgaattggtgaagtacaatgtctgcagcagcgagttcatatagcaagtggcgccctgatttttaaggccaacatagcctgtgtgcttcttggagtcccacagaacgccatgcggtgcatccgcaacgacgtgaacctccagggtaatgctattattgtgcacatagctcttttcggaatccttcagctcctgccaggtgataaaattcgagtagccatagtcattctccttggagtagaacaaatgcttaatccgggcacgtgtgaatggctgtgcatccggcttgtggcacttcaaacgcagctcggcaatggcattgcacgaccaggtgggcgaatcattctccccgttgcactgcagaaagaagccgagcgctcgatcattgggtatgaccatgatccgccatggcagcatgcggacataaactggcggcgatagtctctgcgatttcaattgtaccacattctcgacggtaaaggagaatgtcgtctccgaacggaactgatcctccttggactcatcgtcaatgcccatggcctcgccatcgccgaatgaagtggagctgctatcggccaatagttgttgtggcggcatattgccgttctcgctgggcaactgggtcactgcaccaacggcatgcaattgtggctggataagattcttgaatttcggcaattgaggcggtgaatttcgctgctgctgtgtctgttgtaggtcactggtgaggatctcgacctcttgggtgtcctgggtgtccatcgcttcaatagactgatctgtttcaatttccattttagtcggcacttgaatagtgctaaaattggcggcacctccgcggaggatcggatttctctgtaggattgtcgctactcactggatgctgcttttaactggacgactgctgccgctatgcggcttcttctttgcttttctagcttcgaattcgcccactgtatagaaagtcctgtcgtaagcaaatgttcaattacaatgatgtacgcacaagatggtaaaacatacgcacgctatcggcgcacatgtacatacatacatatatataaatatatatatatatatatgtatatgtattgtaaaatgactggatgcatgtaccaaattgcatatggatatatacaagtctatatattttgttttatgcaatttgttgcggctgagtaggaagaagaagaagcagcagcggcggaatcatctttaaatgcgtcgccgcttcagcgtcttcttcttcgtttgctccgcacacgcaggggcatgcacttattttgcgtacatacatatgtacatccgcctatgtacatttgggatctaaatatgtatgtatgaagcttaccttgcttgttcgaccgctcgctctccgattttgccgtattggaatacaacaaacaaaaaaaaaaaacaacaaaaaaataagaagagtgggtggcgctttgcggaggatatttccgtgggcgggcaaggttgttctcacgcacaaacgctgattttacggcaattgacaatcaaatcggcgatgtaacaaagatgtaacgttgcgtactgaaaatttggcaaatagtgaagattctttgcgtatttttcgccgtatgcgtgtgctagcctgctttctttccagcaatacaataactacaaatacactcgaacttatggcatttgcatgggtgtgtgcgtttttcgtttgtcttcgatgtactcttccgtcgcttcgcttcggttaattttttatttcttttttttgtaggctcaagcaacggagcaacgttatgccgaaaaaaaccaaaaaactaatgatgtcacatgtgttaaattttgagaatttaaaaacgaacagttttgaagtatttcacacggcactgcatcgcagcgttaacgtatcaattaatattttcgcacacacacatacacatgcagcgcgcagctcgtgcagctgtcaaaaacgaaacgataacggcagcatatgttatcggcgccagcaacgctgcgtgccgctcacgcgactatcgatagctaccagggcggcaggaattgggcagatgtagctagattgtagctatttccccgacgttggcgaagatcgatgttttttttatgtttttggcgaaaaacatcgatattttaaatataaacaaaaaaaattgagatttatttaaatttatagattcttatatttatatattttcgggagttaaaaacttacttttcagatatttatccatgtcttccacgacgctagtcacattaaatttgatatgctttttttaattgaattagaaaatatggaaaattaatttataattacaatttataaacttttctcctactttgcgcttggaaaaacatcgatgattccttgaaaaaagtcgatgtttgtgatttttccaaaacatcgataagtaattaatatttaacgaaattattaggaaaacttattcgtaccgcaaagtaaggacgtcaaaatgaaatatttataattttggtatggcttaatattaaaatggtttcgctcttttctaagttagttatatttagaaaccatgtacatatttccgacagcataatataagttatataccgtaaaaatgaattttgataactatttagatgtagaatatataacatatatctaaatatctaaatatatctaaataaatatatatttttttgaaaccagaaatgataatttaaaacacctattttattgttttaaaaatgacacatttatgccctgctgggctttcagaaccatttgggcctccagcctgagcggagcctgctccggactcagttccatttggaattccctaacaagacgagcggtgagcagcttcatcaggagcagggagtaccgcctgccgatgcagacatgtggtcctccagagaagggtatataactgaaggcgggtggggcgacagcgccatcctccggcaacca

SEQ ID NO: 1328 - DNA, 4695 bp, DROSOPHILA
gacagctgcacgagctgcgcgctgcatgtgtatgtgtgtgtgcgaaaatattaattgatacgttaacgctgcgatgcagtgccgtgtgaaatacttcaaaactgttcgtttttaaattctcaaaatttaacacatgtgacatcattagttttttggtttttttcggcataacgttgctccgttgcttgagcctacaaaaaaaagaaataaaaaattaaccgaagcgaagcgacggaagagtacatcgaagacaaacgaaaaacgcacacacccatgcaaatgccataagttcgagtgtatttgtagttattgtattgctggaaagaaagcaggctagcacacgcatacggcgaaaaatacgcaaagaatcttcactatttgccaaattttcagtacgcaacgttacatctttgttacatcgccgatttgattgtcaattgccgtaaaatcagcgtttgtgcgtgagaacaaccttgcccgcccacggaaatatcctccgcaaagcgccacccactcttcttatttttttgttgttttttttttttgtttgttgtattccaatacggcaaaatcggagagcgagcggtcgaacaagcaaggactttctatacagtgggcgaattcgaagctagaaaagcaaagaagaagccgcatagcggcagcagtcgtccagttaaaagcagcatccagtgagtagcgacaatcctacagagaaatccgatcctccgcggaggtgccgccaattttagcactattcaagtgccgactaaaatggaaattgaaacagatcagtctattgaagcgatggacacccaggacacccaagaggtcgagatcctcaccagtgacctacaacagacacagcagcagcgaaattcaccgcctcaattgccgaaattcaagaatcttatccagccacaattgcatgccgttggtgcagtgacccagttgcccagcgagaacggcaatatgccgccacaacaactattggccgatagcagctccacttcattcggcgatggcgaggccatgggcattgacgatgagtccaaggaggatcagttccgttcggagacgacattctcctttaccgtcgagaatgtggtacaattgaaatcgcagagactatcgccgccagtttatgtccgcatgctgccatggcggatcatggtcatacccaatgatcgagcgctcggcttctttctgcagtgcaacggggagaatgattcgcccacctggtcgtgcaatgccattgccgagctgcgtttgaagtgccacaagccggatgcacagccattcacacgtgcccggattaagcatttgttctactccaaggagaatgactatggctactcgaattttatcacctggcaggagctgaaggattccgaaaagagctatgtgcacaataatagcattaccctggaggttcacgtcgttgcggatgcaccgcatggcgttctgtgggactccaagaagcacacaggctatgttggccttaaaaatcagggcgccacttgctatatgaactcgctgctgcagacattgtacttcaccaattcgctaagactgtctgtgtatcgcatacccacggaggctgacgatagttccaaatccgttggattatcgctgcagcgtgtgttccatgaattgcagtttggtgaccgtcccgttggcaccaaaaagttaaccaaatcctttggctgggagacgctcgattcgtttatgcagcacgatgtccaggagtttctgcgcgtgctgctcgacaagctcgagtcgaagatgaagggcaccatcctggagggcaccataccgggtctgtttgagggcaaaatgtcgtcgtacattaagtgcaagaacgtcgattacaatagcacacgctacgagacgttctacgacattcagctgaacatcaaggataagaagaacatctacgaatcctttcaggattacgtagcccccgaaacgctggagggtgacaacaaatacgatgctggtgtgcatggcttgcaggaagccagcaagggcgtcatcttcacttcattcccacccgttttgcatctgcacctgatgcgcttccagtacgatcccgtcacggatagctcgatcaagtacaacgatcgtttcgagttctacgaacacatcaatctggatcgctatctggccgagagtgagaataccttggcggactacgttctacacgccgtgctggtgcattcgggcgataaccatggcgggcactatgtggtcttcattaatccaaaggctgacggacgttggtttaagttcgacgacgatgtggtctccagttgccgcaaacaggaggcgatcgaacagaactacggcggcatggacgatgagatctcgtttcatgccaagtgcagcaatgcctatatgctggtctacatccgacagtcggagttggatcgcgtccttggcgacataacggaaagcgagatatcaagcgatctggtggagcggctcgatctggagaaacgaatcgaaatggcgcgacgcaaagagcgcggcgaggccaacacatatgtgtccgtgcacgtaatcctcgaggagaacttcgaggaacagcacaagcgtcgtctcttcgatctggagaaggtccatccgcgcgtcttccgcatcaaacaaaatcagactgtcgacgagctggtggacttgtttgtcaggggtttcggagtgtcgcgccaacgtatgcgcatgtggaacttgtgcaccgcccagacgcaaaagttttcgcatttcgatttcgtggcggagggatcacgcaccatcgagcagatatcaacgtcacagaaaccgtgggtcatctggctgcagctggcctggacggatgtacctggtcccctgccgccctttaatcccaagaccgaatccctgctgttcctcaaatactatgatccgcgcaataagcggctaaattatattggatgtacccaacagccgcacacccgccgactcattgatctggtgccggatgttaatagcaaactgggcttcgaaccggacaccgagctgaccatctacgatgagtatgccgacaagaagctggtcaatctgaatgagcccatcgagagtgcgctgttcataccgcaggatcatctgcaaggccacattttaatcttcgagcgcgaaaacgttgacgccaaactcgacctgcccacggtaggggattacttcctggatctagtctaccgcatcgagatcatcttcagcgacaaatgcaatcccaatgaaccggactttacgctggagctgtccaatcgctataattacgatcagctcgccaatgcggtggccgagcgcttgaataccgatccacagaagctgcagttcttcatgtgcatcaacaactacaaggagacggcgggcaatgctgtaccctacacatttaagggcaccatcaaggatctggtttcttacaccaaacagagctcaaccaagcgtatcttctatcaacgactatcgcttagcatccacgagctggataataagaagcagttcaagtgcgtctgggtgagcagtgatcttaaggacgaaaaggagctggtactttaccccaataagaacgatacggtgaaaggattgctggaggaggcggcaaagaaaatctcgtttgcggagaacagccgtcgcaaattgcgcctgttgaagattagcaatcataagattgtggcggtatgcaaggacgatataccgctggatacgctgctaaagtccaacgagtcaataacgaccgcacagggcgctcaaaagacttttcgcatcgaggaggtgccggcggaggatatgcaactggcggagaatgagttcctcataccagtggcccatttcagcaaagagctgtacaactcattcggcatacccttcctaaccaaggcgcgccaaggtgagccatacggtgcacttaagcagcgcatccagcgtcgtctgaatgtgcaggacaaggagtgggaaaactacaaattctgcgtaatctctatgggtcacaatgcggatgttaatgacaatacgcccgttgatctggaggtttatcgctcgtggaccagcggccagttgcccttctttggcttggatcacatcaacaagtcgcgtaagcgcagttcgcttaacttctccgagaaggccatcaagatatataactagggcggtgacacgaaccggagaagaggagaagaattcacgctctaaactggatgatggcggagcggagcaagtttgcgtgcggagcgggattaaaaggatggattgcgggcaagggattatggccgcacgtgtttattgtttttcaaaattcaaaaacaaagagcatatttcttggaaacgattcatacacaccacggcacacacacacacacacacacatacacacacatgcgcggaacttaccctttttacttttatacatatatattgtttgtagtctaacagctaagtaatatttaggtatttattagtccccgccgacgacggcagtgtttggagatccactggccacgccatgccgcgcaaacttgctcccttcattcttcttactttgttttaccgctcttcctttcctcttactctcgtttccgtttccgtttcgtccgccgaacaatcctgaccagagtatcagctttcgcatcgagtccagtacctcgaactcccgttgacgctgactcattgcttgaactaaag

SEQ ID NO: 1329 - protein, 1129 aa, DROSOPHILA
MEIETDQSIEAMDTQDTQEVEILTSDLQQTQQQRNSPPQLPKFKNLIQPQLHAVGAVTQLPSENGNMPPQQLLADSSSTSFGDGEAMGIDDESKEDQFRSETTFSFTVENVVQLKSQRLSPPVYVRMLPWRIMVIPNDRALGFFLQCNGENDSPTWSCNAIAELRLKCHKPDAQPFTRARIKHLFYSKENDYGYSNFITWQELKDSEKSYVHNNSITLEVHVVADAPHGVLWDSKKHTGYVGLKNQGATCYMNSLLQTLYFTNSLRLSVYRIPTEADDSSKSVGLSLQRVFHELQFGDRPVGTKKLTKSFGWETLDSFMQHDVQEFLRVLLDKLESKMKGTILEGTIPGLFEGKMSSYIKCKNVDYNSTRYETFYDIQLNIKDKKNIYESFQDYVAPETLEGDNKYDAGVHGLQEASKGVIFTSFPPVLHLHLMRFQYDPVTDSSIKYNDRFEFYEHINLDRYLAESENTLADYVLHAVLVHSGDNHGGHYVVFINPKADGRWFKFDDDVVSSCRKQEAIEQNYGGMDDEISFHAKCSNAYMLVYIRQSELDRVLGDITESEISSDLVERLDLEKRIEMARRKERGEANTYVSVHVILEENFEEQHKRRLFDLEKVHPRVFRIKQNQTVDELVDLFVRGFGVSRQRMRMWNLCTAQTQKFSHFDFVAEGSRTIEQISTSQKPWVIWLQLAWTDVPGPLPPFNPKTESLLFLKYYDPRNKRLNYIGCTQQPHTRRLIDLVPDVNSKLGFEPDTELTIYDEYADKKLVNLNEPIESALFIPQDHLQGHILIFERENVDAKLDLPTVGDYFLDLVYRIEIIFSDKCNPNEPDFTLELSNRYNYDQLANAVAERLNTDPQKLQFFMCINNYKETAGNAVPYTFKGTIKDLVSYTKQSSTKRIFYQRLSLSIHELDNKKQFKCVWVSSDLKDEKELVLYPNKNDTVKGLLEEAAKKISFAENSRRKLRLLKISNHKIVAVCKDDIPLDTLLKSNESITTAQGAQKTFRIEEVPAEDMQLAENEFLIPVAHFSKELYNSFGIPFLTKARQGEPYGALKQRIQRRLNVQDKEWENYKFCVISMGHNADVNDNTPVDLEVYRSWTSGQLPFFGLDHINKSRKRSSLNFSEKAIKIYN

SEQ ID NO: 1330 - DNA, 6873 bp, DROSOPHILA
atcggtgatcgagaacggcttgttcgcgggcctttgtttcgatgggagtcccttcgtagaggaccaagtcttcgaggaggacaccctggagagctactcgaacattcagccgatgctcaactacacgatcctcctgcccagcgagctgaggatgctggacggcgactttcggatggccaactggatgactctgtacaatgatgatccgaacacttttgtccttacccgtctgaaccagccgtatgagggcggattcgttggttatgttcgtgagggtttcattcggctccagaagtccgtcagcgagtccttcctggtcctgaccagtcacaagtccttgccgaccattcagattagacgctttcccatcacaggccgcgaacaggatccactgatgggtaatctcaactacggcatgccctttataatcataatagggttcctctttccagcccagctattcgtctgggtaagcaaaagatttcaactccgtgtttgcagtgattttaagcttcttattttatttattttcagcaagtggtatctgagaagcagtcccaagttcgccagtttctaatcaacatgaacattggcaatctcattcacttcgtgtcgtggtatctcaagggattgatatacgagatgataagttccctaatcatagcagcacttttgaaggtaggttaaaaatgtactatcattcaaaatatcacatatcatcatgtgctatgtgcatctaacgaaataactgaagttgtccgaataactttactacttaggggaaattaataaattgtacctaaactaactatagctagacgatttatgcgtttaggaagtccacctttgatcagtaaagtacagatttaattggcaaacgatatatccttagtcttggctttcttgtctacatttgcaaagaagttcagaagtgcagatataattttagttcgatgattatcgctatgattacaaatactttaatttcttcactgtacagataaggtgggaccaggaccacggggtgctgacccaaacaccatggtacatactgatcttagtgctgttctgctacaactgcgccgccgttgcctttgccataatggtggctgcctttttccggaacgctctcaacgccgttcgggtgttgacaatcctgtggataatgtcctacgtgcccaccttcattctgtcgaacaacttggagggcaatattcacgccctgcgctacgtgtcgtatgcgctgccaaatgtggtggcaactctggtgattgaatttctcatcgaacgggagtcgatcgtccatatcacgtgggaggactctgggtacagactcaactatgacggcggccacataacggtaaccgcgagctcctggatcttcatgctgaatgctttggtttactgtgcaattggtctctatgtggacatgtggcggggtggcgaccgatcgggtaagaagatgaagaaacccaacacgaatgccagtgtacaagaagatccataccacgaacggggggacagtttcactcatcagggtcaggccattggcgttaactcaacgaaaatctatgaggtggaaccctcacatcggcgcttcaagctaaagatcaagaagctgtgcaagcgatttgcgacaaacgatcgtccggcattaaatctcttctcgtggaatgtatacgagaacgaggtcaccgttctgatgggtcacaatggctgtggcaagagtacactgctcaaaatactagccggcttggtggagcccagtcggggcactgtgatgatatccagccacaatatacagaccgaaaggaaggcggcctcaatggagctgggcatcgcatttggccatgacatgcttctcaccggcttcacagtcattgattacttacgattcatttgccgagttaagggattgcacaataacatcgagatcgatggtcagtccaactactttcttaacgtcctgcaaatcggaggcctaaagaccaaacgaatccgcaccctcactgatcgcgatttgtgcctggttagcatctgctgtgcctttgtcggtaatagtcccataatcctcatagacgacgttcactccgatctggacaagcgcacgcagtcgctggtctggaacctgattaacgaggaaaagtccaagcgcaccattatcctggtgtccaactcgccggctctggccgaaaacattgccgatcgcatggccattatgtccaacggggagctcaagtgtaccggaacgaaaccgtttctaaagaatatgtacggacatggctatcgattggtgattatttgatcctatcctattcgatttaacacgtttaatcaatactccatttgattactttcagacctgcgttaaggggaagaactacaaaagggatgaactgttcggcatgatgaacagctatatgcccaacatgagcatcgagagggatattgggtacaaggtcacctttgtgctggagaacaagttcgaggatcagttccctatgctaatcgatgatctggaggagaatatgcagcagctgggtgtggtcagttttcggattcgggacacgtcgatggaggaaatcttcctgcgatttggatgcgaagacaatgaccaaagtggcgcttttcaatcgcacgaaaacgcgcaagtcctgctggaggagtactattccacactggctgaggccaatgaaaaaggtcgaaggactggctggaagctgttttttttgcatggcaggtatttgaaaaacaatactctataaaagctatatacatacatatattttgaaaaaaggtcgatcaataggtatttcttttaaatagtgttatggctatatatatataatagctgctgaacttactgatccattaactactttttttttaccacaaaaacttcggctggccgaatcttacgtacatatatatccttgtatttaatacataaccccaatgccagggcggtgatctacaaacgttggattgcggcccaccgacactggatcgtattgatttttgaggttctggccatggccctggtcgcggtgtgcacattctccagcattttcatctacggcaagaactatgagttggaaccgctgacctttaacctcagccagctgcacactgtggacgccttcgtggagctcttttccgaagaggaggatgtcaaggatatgcacgcctattacacggagctgctctattggtacgacgctcatgtggcgacgctgacaaaaaaccgtcataacgcatacgccctgttgacccaaaaccaattcaccgcccacgtcaactcgcgctacattttcggagccacgttcgatcaaaagatcgtcaccgcctggtttaataatataccactgcactctgcaccctatgccttgaatgttgtccacaatgcggtagccaggtgggttttggtttgcatcagagttttttccagcaacgcatactttctgagcgagctcataattgtttgtgactcaggtggtaacttattgcaatatactcgtagtgtttatatagtttttgcatttgaaattatttagtgatacaaactatatgcacacagaagtaggatacgtccaatttgcgctgtggtgcttatatataacctaatcagttcttatgccgcaggcacttgttcgacgaggaggccaccattgatgtgaccctggcgccgctgccgttccggacggccattaacacctttccgcctagcagccatacatttggtggctgtttagcatttggcatttgcttcgtgctgacatttatttggccagcattcgcgatttacatgatcaccgagcgtggaagcttgctgaagaaacaacagtttttggccggagtcagggtgtgcagctactggacgtttacggtgttatatgacttgctcttcctgctgatcttctgcgcgtgcgttgtggtcatggtggcattatacgagaatccgaaccacgacgttatgctatacggtgatatgtccatcctatgccaacaccaatatatataacgcctgtcggttaagtgacgatgggaaatgtcaaagatttccatcatcactagacttgatacaatagatatgtgccacacagagttttgatcatgcctattgacacatccacaggttacatatcggtcacattgatgctgggaggattctgggtgatcctgcttgcgtatttaatggcgagcctgtgccggaacccgtgctatggatttttgtggctatgcgggattaacagtatcggcctcgtctgcttctcgcaattctatagaactcatccagaatctatgctcctcgagccgacctttatggccatgtacacggtggccacagttatatgcaagcttttcatgatctacgaattcaagctaatctgcatggatcccgtcgtgaattttacctccgtcgaggtattcaagtgcaatagcatccccaattgctgcagttgagtatatggtaccccataagaaacacaatttttctataggtatctctttaatattttatagtaaaatcgaactacggcacttttaccgctggcatctaccacgatctggtgatattgacactacttgatattatccttctggcttgcctctttgtctccgagtatcattccatcttgggcttcgcagactgtcgtctagataccaggacgaatgaatcgccggatagcaaccaggaaagccgtgctttccctggcatcttatctaatgacaccgctgctcttgtagataaagaacacactagtcgtttgaatgaagaggagcgcagcaaatatgccgctgtcgggattggaattgtcagcaaatatcgccgaaaccgcgtgcttagagatctggacttcactctggccaagcaagtattctttgtggaattacattttaataagcattatttaatcgtaataacatttaaaacaagacagtcgattccatcgactagcagatacccgttactcagctacaggcagtgctagggagaaatgttagaattcatttagcatatcgatagaaattggctagaaaaacaaaataaaacaagagagaatgctatagtcgagtttccggactattttgataccctttactcagctagtgacaatgcgaacgcgaatttatttttaatgtttgtttgttttttattattgttaaaagcaatttagaagttatacttccagtaggtgagttgagttgggtgtcttacagttatataactcgattatagcgttcatagcttccttgttaaaatataaaacaactgcaattgcatataacattgcttcctttctggtttgaatcatattctataacatacaaatgtaagcaaacgtttataaatattatttgtacctagatcggagtgcttgagcatcacgggagcaaacaactccggcaagactacgctgctcaaggtggtggtgaatgagacaaagatgaacgctggacagctctggatccatgactactcggtgaacacccaccgtgtccagtgctaccggatggtgggctactgtccgcaaaaagacagccttccgtcggagtttaccccgcgtgaattgctgtacattcacgccatgcttcagggccacaggcaccgcataggccgcgaattgtcggaggcactgctccgtctggtgggactcaccccttgctggaatcggtcagtgcgcatgtgcaccacaggtcaaatccggcgattatattttgcctacgccgtgctgggatccccggatctcatctgtgtggacggtgtaccagctggactggatccgaccgggaagcgaatcatcctgatgatgacctccaccatgcaggcgatggggtccagtttcttgtacactatgctcacaggtctggacgccgagcgactgtccctgcgcacgccacttcttttagagggccaactctggatgattcggcccatggacacagagaccgagaactataagagtggctaccagctggaggtacgattcaagaggaaggtcaatcctaatgtcagcatgtcccgggccacctggaacctaatcaaccactttcccatgtcaccaaacaagaagttcagtgccttcatggagatcaagtttcccgatgccgtgctcacgtgagattaacctttggctatttgtagaaagaatagctgaactcaaatcaatgatgctgtttcatttccagaattgaaagagatgactcgatggtatttgtattgccgttgggcacgaccaccttctcggagatatttcttacactgcgcaaagatgccttcgaaatgaacatagaggactactttatcacacgcaacatgctcgtgggcttccagatatttacctatgatcaacatcaggacaatccataagacataagtgcatggactattccaacagtatagtttggtttcactgcagtttttatctgtctgttttaagttacttggaaagattcattgaattgccttgtcggatttaaaaaagttcacatttccttcttaaatacaagagctatagtttacatttagataaaatttaattcaatcgtatagttttacatatatatagaatacatttaacatagtttgtaaattctcatatgtatcgtagagtttgtgccacaattaaattgacttatttacacgctttggtaagccggtctaagtacatcgaaataaatacacatattactctatatgcaacaagtttcctttgggcgctgggaatagtttcgggccaaatctggccaatacttttaaaagtcgaaaattaaagaataaatcaaaactaaaagatcttgggaactaatcgtgcatatcaagcatttgtatatggatatatatacatacacacacacacacatatatat

SEQ ID NO: 1331 - DNA, 3696 bp, DROSOPHILA
ataaggtgggaccaggaccacggggtgctgacccaaacaccatggtacatactgatcttagtgctgttctgctacaactgcgccgccgttgcctttgccataatggtggctgcctttttccggaacgctctcaacgccgttcgggtgttgacaatcctgtggataatgtcctacgtgcccaccttcattctgtcgaacaacttggagggcaatattcacgccctgcgctacgtgtcgtatgcgctgccaaatgtggtggcaactctggtgattgaatttctcatcgaacgggagtcgatcgtccatatcacgtgggaggactctgggtacagactcaactatgacggcggccacataacggtaaccgcgagctcctggatcttcatgctgaatgctttggtttactgtgcaattggtctctatgtggacatgtggcggggtggcgaccgatcgggtaagaagatgaagaaacccaacacgaatgccagtgtacaagaagatccataccacgaacggggggacagtttcactcatcagggtcaggccattggcgttaactcaacgaaaatctatgaggtggaaccctcacatcggcgcttcaagctaaagatcaagaagctgtgcaagcgatttgcgacaaacgatcgtccggcattaaatctcttctcgtggaatgtatacgagaacgaggtcaccgttctgatgggtcacaatggctgtggcaagagtacactgctcaaaatactagccggcttggtggagcccagtcggggcactgtgatgatatccagccacaatatacagaccgaaaggaaggcggcctcaatggagctgggcatcgcatttggccatgacatgcttctcaccggcttcacagtcattgattacttacgattcatttgccgagttaagggattgcacaataacatcgagatcgatggtcagtccaactactttcttaacgtcctgcaaatcggaggcctaaagaccaaacgaatccgcaccctcactgatcgcgatttgtgcctggttagcatctgctgtgcctttgtcggtaatagtcccataatcctcatagacgacgttcactccgatctggacaagcgcacgcagtcgctggtctggaacctgattaacgaggaaaagtccaagcgcaccattatcctggtgtccaactcgccggctctggccgaaaacattgccgatcgcatggccattatgtccaacggggagctcaagtgtaccggaacgaaaccgtttctaaagaatatgtacggacatggctatcgattgacctgcgttaaggggaagaactacaaaagggatgaactgttcggcatgatgaacagctatatgcccaacatgagcatcgagagggatattgggtacaaggtcacctttgtgctggagaacaagttcgaggatcagttccctatgctaatcgatgatctggaggagaatatgcagcagctgggtgtggtcagttttcggattcgggacacgtcgatggaggaaatcttcctgcgatttggatgcgaagacaatgaccaaagtggcgcttttcaatcgcacgaaaacgcgcaagtcctgctggaggagtactattccacactggctgaggccaatgaaaaaggtcgaaggactggctggaagctgttttttttgcatggcagggcggtgatctacaaacgttggattgcggcccaccgacactggatcgtattgatttttgaggttctggccatggccctggtcgcggtgtgcacattctccagcattttcatctacggcaagaactatgagttggaaccgctgacctttaacctcagccagctgcacactgtggacgccttcgtggagctcttttccgaagaggaggatgtcaaggatatgcacgcctattacacggagctgctctattggtacgacgctcatgtggcgacgctgacaaaaaaccgtcataacgcatacgccctgttgacccaaaaccaattcaccgcccacgtcaactcgcgctacattttcggagccacgttcgatcaaaagatcgtcaccgcctggtttaataatataccactgcactctgcaccctatgccttgaatgttgtccacaatgcggtagccaggcacttgttcgacgaggaggccaccattgatgtgaccctggcgccgctgccgttccggacggccattaacacctttccgcctagcagccatacatttggtggctgtttagcatttggcatttgcttcgtgctgacatttatttggccagcattcgcgatttacatgatcaccgagcgtggaagcttgctgaagaaacaacagtttttggccggagtcagggtgtgcagctactggacgtttacggtgttatatgacttgctcttcctgctgatcttctgcgcgtgcgttgtggtcatggtggcattatacgagaatccgaaccacgacgttatgctatacggttacatatcggtcacattgatgctgggaggattctgggtgatcctgcttgcgtatttaatggcgagcctgtgccggaacccgtgctatggatttttgtggctatgcgggattaacagtatcggcctcgtctgcttctcgcaattctatagaactcatccagaatctatgctcctcgagccgacctttatggccatgtacacggtggccacagttatatgcaagcttttcatgatctacgaattcaagctaatctgcatggatcccgtcgtgaattttacctccgtcgaggtattcaaatcggagtgcttgagcatcacgggagcaaacaactccggcaagactacgctgctcaaggtggtggtgaatgagacaaagatgaacgctggacagctctggatccatgactactcggtgaacacccaccgtgtccagtgctaccggatggtgggctactgtccgcaaaaagacagccttccgtcggagtttaccccgcgtgaattgctgtacattcacgccatgcttcagggccacaggcaccgcataggccgcgaattgtcggaggcactgctccgtctggtgggactcaccccttgctggaatcggtcagtgcgcatgtgcaccacaggtcaaatccggcgattatattttgcctacgccgtgctgggatccccggatctcatctgtgtggacggtgtaccagctggactggatccgaccgggaagcgaatcatcctgatgatgacctccaccatgcaggcgatggggtccagtttcttgtacactatgctcacaggtctggacgccgagcgactgtccctgcgcacgccacttcttttagagggccaactctggatgattcggcccatggacacagagaccgagaactataagagtggctaccagctggaggtacgattcaagaggaaggtcaatcctaatgtcagcatgtcccgggccacctggaacctaatcaaccactttcccatgtcaccaaacaagaagttcagtgccttcatggagatcaagtttcccgatgccgtgctcacaattgaaagagatgactcgatggtatttgtattgccgttgggcacgaccaccttctcggagatatttcttacactgcgcaaagatgccttcgaaatgaacatagaggactactttatcacacgcaacatgctcgtgggcttccagatatttacctatgatcaacatcaggacaatccataa

SEQ ID NO: 1332 - protein, 1197 aa, DROSOPHILA
MVAAFFRNALNAVRVLTILWIMSYVPTFILSNNLEGNIHALRYVSYALPNVVATLVIEFLIERESIVHITWEDSGYRLNYDGGHITVTASSWIFMLNALVYCAIGLYVDMWRGGDRSGKKMKKPNTNASVQEDPYHERGDSFTHQGQAIGVNSTKIYEVEPSHRRFKLKIKKLCKRFATNDRPALNLFSWNVYENEVTVLMGHNGCGKSTLLKILAGLVEPSRGTVMISSHNIQTERKAASMELGIAFGHDMLLTGFTVIDYLRFICRVKGLHNNIEIDGQSNYFLNVLQIGGLKTKRIRTLTDRDLCLVSICCAFVGNSPIILIDDVHSDLDKRTQSLVWNLINEEKSKRTIILVSNSPALAENIADRMAIMSNGELKCTGTKPFLKNMYGHGYRLTCVKGKNYKRDELFGMMNSYMPNMSIERDIGYKVTFVLENKFEDQFPMLIDDLEENMQQLGVVSFRIRDTSMEEIFLRFGCEDNDQSGAFQSHENAQVLLEEYYSTLAEANEKGRRTGWKLFFLHGRAVIYKRWIAAHRHWIVLIFEVLAMALVAVCTFSSIFIYGKNYELEPLTFNLSQLHTVDAFVELFSEEEDVKDMHAYYTELLYWYDAHVATLTKNRHNAYALLTQNQFTAHVNSRYIFGATFDQKIVTAWFNNIPLHSAPYALNVVHNAVARHLFDEEATIDVTLAPLPFRTAINTFPPSSHTFGGCLAFGICFVLTFIWPAFAIYMITERGSLLKKQQFLAGVRVCSYWTFTVLYDLLFLLIFCACVVVMVALYENPNHDVMLYGYISVTLMLGGFWVILLAYLMASLCRNPCYGFLWLCGINSIGLVCFSQFYRTHPESMLLEPTFMAMYTVATVICKLFMIYEFKLICMDPVVNFTSVEVFKSECLSITGANNSGKTTLLKVVVNETKMNAGQLWIHDYSVNTHRVQCYRMVGYCPQKDSLPSEFTPRELLYIHAMLQGHRHRIGRELSEALLRLVGLTPCWNRSVRMCTTGQIRRLYFAYAVLGSPDLICVDGVPAGLDPTGKRIILMMTSTMQAMGSSFLYTMLTGLDAERLSLRTPLLLEGQLWMIRPMDTETENYKSGYQLEVRFKRKVNPNVSMSRATWNLINHFPMSPNKKFSAFMEIKFPDAVLTIERDDSMVFVLPLGTTTFSEIFLTLRKDAFEMNIEDYFITRNMLVGFQIFTYDQHQDNP

SEQ ID NO: 1333 - DNA, 3991 bp, DROSOPHILA
atcgtgggtcttgccgtttggatactaatcctagcccccaatgcgtccatattgatcaatccgtatctgagtggattgtcggtaagatgaatgtgtggaatggttggattagtatgtataataagaatgaacttacctctcgctcagctgctattggccagcattgcggggctcatactgctgcgaagggatcacaagatcacggagcacagaccgcagaccaatagttgctacaaggtcctgctggccgagtcgtatgtgttcactggcctggcgttgatcttctgctgcttggccctcgtctgtgcggcaattgagttcgcggagctcatctcatccgcagacggagaatgtggaccaacatcgagctcattgcttagctatcacaattgcacctgcttggcggcaggtgaggtggtggccaactactcctccgaggctccaatggcatttgcagttggtcaggaggaggcgtcacagtaagtttcgaactgcagttatacttaaacattggcattgagaatattctcatttctagaaacgatggttgtgccgagcttcggatcgaatggaagtatctgctcgccttctccatggcgctcaacactttgggcattgttgcaacattcttatacataacgttatttatttgttgccaccgcaagcgagaacacttttacacgtctgtgtagggatatattgtaacttaaattcaacatactacttaaattatttttagcaactgatacaaattacaaataaattattttttatatctaagtaccattaaagtaacacaacgtttaaaaacaaatactgtttgctttcgtgcgatagcatctaaaaaaaaactaaatactaacttattgaaaaataatttgttaattcattcatatttgagcaattaacgtgtttgaataagtttctgctggaaaacataattaatactttgtgtaaatactatatgtttggtatagtttgtgaaaagaattcgacttttttaaaatccactaactccacctggcttccgaaaatccgagttcacccagatggtgtcgttagcttgagcgattccacagatgacggaaccgcggttctcataacgctcgcatcgatgtcccctctccgccaagctatccacatagctctgccgtagtccatactcgtagagcagaacattgggcagcatttgatgatggatgcggctggcatcgatggcggccttgatgcttgcctcctgccacaggatgcgcacgaggaggggagagagggcagagattattttggtaccgccagcggcacccacaaccaagcgaacgttgccagtggcgcgttccgtgacaatcactggacacatggaggacatgggacgggcggcaggagctacaccattcgtgccaggcacgaagggcagatcgaagtagttcttgagctgttcgatggagaaatccgacatggcattgttaaagatgacacctgtgcgcctgccagttcgtccactgccaaaactgcaaaatgaaatgggatatatatatatatataggaatatatataaataagattcttaatatataattactagaaattgatggagcttgtcactgaaactgcatcgtttccatggagcactgaagtgtgcgctgtgccgtgctcatcacgtatttgaattccaggtgaagctccatagaactctggtcggttaaaggtgtgtgtgtggttaatttgcctggccacggattttgccaattcatgactggtcaaattcgacaaaagctgtaggataaatcaacgaatataaagggtatattattaatcaatttcacacgaattcgaaagagatggaaatatgctcacctcttcgctcgcggattcatccagttgccatcgcttgacgaatccaaacttcattgcctcgaccatcaaatggatttgacgtgggctcatagttccggctcttgagaattccgcccggaactcctttagtatgttcattatgaagccgagaacgtgaccacttccaggtggaggagtcaaatggagatcatactcatccagtggcatcacaatggcgctactcaatttggcgtgcgcttggttgaggtcttccttagttattgcactgcccgcgtccttcaagtcggccagcagatcatcggcgatagatccgcggtagaaactgagtggtccctcgttggccaaccgatcgtaggtgttgcacaattgagccgcagggcgaatgagatgacccaatggccagaagcgcccggtgtcgggatcgatgaacatccggcgtaggccggaatcggccctgatcatgtcctgattgagtatgagcgcatcatactggtgcttatacaatcgatagccacgacgacacaattccaaagttggcagcaccaaatccttccactttagccgcccgaatctctggtgggccaccgcataaccggccaattcagctggcacggcaatggaccatccggatctcttgaaatcctgctcatcgcgaaatgacgagaagttatccgcacgcaatgccagcggcgccatttccctggccagaatgctgtaggatttgttctccttggccacataaacattcatcaccatgccgccaccgatgcccatgctctgcatcccgatgagtccgttgcaaatgagagcagccaaggcgccatccacagcacttcctccattctccaggacttttttggccaattggctgcacacatcgctgtcggagcaaatggccgcccgggagaatcgatggagcggcgaattggagggcggcagtggatcctccggatttggcggtctcctggacgccttctttttgccagctagaacagaaatgtgaattaattgtgggcaaggagctgcttcctggtcgttgtacccaccatttccgtccggataccggtagatatagactgccaccaggatgacaatcaccacggatatcaaactattcaatcctatcctaatgtacatcgctagcacctagatttacattgttctcaaccccattgccgcaccattgcagttcaaatggaaatatccatatccttttcatttcaaaaaacagctgttctctgctgttttctagtggtcatactgccgtcgataggccaaaataatcgaatatactaaaattttgaaaaaactcgaccgccttacgttcaatataccaagccgaatttcgcgcgttttaatttaaaatgtgtgccccttgttatcgagtgtcagcgtatgcgcgttgccagacagctggcaactccaatgagtgtagaaggtggcagccctttaaggcaccagctgaccccatagagcgtttttgttgttctatcttttatcttttcttttaccgttttgtttagtaattatcttgcttaatttaaccgtagttaattgtgatttgctaattgcttatcttcagtaagtaaccacaggttgcaaggtgatgcacagacgctgcaaatctgtctaatttgcacaattattataaccttgacatagaacagggggcaataacattatcgatgaaaacaacaacaaaaaaccgtttcaccaagcgctgtttacttcttacattgcgttgccaatctttttgaatgtaacggtagttcggcaacaatatgttttcaatccaaaaatctatttacgtatataaatataagcaaacatataacataacatatataacatttataacatatatcgtattttttatgctttaaagttaagttcagacttatccaaaagcaaaacgccccaaaatcgcacaaaaatcgcgcaaaaatgaaccaaagcgaaacggtaaaatatattttattcagacgcgttttggacgcgactttacgcgttcggcgcgtttttcgtgcggtttgaaggcgttttttggcttgggattgtaatataaagaacagaaccatttaaaataacttctttagatacatattatcaatagaagctaaataatctatattcccat

SEQ ID NO: 1334 - DNA, 1839 bp, DROSOPHILA
atgtacattaggataggattgaatagtttgatatccgtggtgattgtcatcctggtggcagtctatatctaccggtatccggacggaaatggtgggtacaacgaccaggaagcagctccttgcccacaattaattcacatttctgttctagctggcaaaaagaaggcgtccaggagaccgccaaatccggaggatccactgccgccctccaattcgccgctccatcgattctcccgggcggccatttgctccgacagcgatgtgtgcagccaattggccaaaaaagtcctggagaatggaggaagtgctgtggatggcgccttggctgctctcatttgcaacggactcatcgggatgcagagcatgggcatcggtggcggcatggtgatgaatgtttatgtggccaaggagaacaaatcctacagcattctggccagggaaatggcgccgctggcattgcgtgcggataacttctcgtcatttcgcgatgagcaggatttcaagagatccggatggtccattgccgtgccagctgaattggccggttatgcggtggcccaccagagattcgggcggctaaagtggaaggatttggtgctgccaactttggaattgtgtcgtcgtggctatcgattgtataagcaccagtatgatgcgctcatactcaatcaggacatgatcagggccgattccggcctacgccggatgttcatcgatcccgacaccgggcgcttctggccattgggtcatctcattcgccctgcggctcaattgtgcaacacctacgatcggttggccaacgagggaccactcagtttctaccgcggatctatcgccgatgatctgctggccgacttgaaggacgcgggcagtgcaataactaaggaagacctcaaccaagcgcacgccaaattgagtagcgccattgtgatgccactggatgagtatgatctccatttgactcctccacctggaagtggtcacgttctcggcttcataatgaacatactaaaggagttccgggcggaattctcaagagccggaactatgagcccacgtcaaatccatttgatggtcgaggcaatgaagtttggattcgtcaagcgatggcaactggatgaatccgcgagcgaagagcttttgtcgaatttgaccagtcatgaattggcaaaatccgtggccaggcaaattaaccacacacacacctttaaccgaccagagttctatggagcttcacctggaattcaaatacgtgatgagcacggcacagcgcacacttcagtgctccatggaaacgatgcagtttcagtgacaagctccatcaatttctattttggcagtggacgaactggcaggcgcacaggtgtcatctttaacaatgccatgtcggatttctccatcgaacagctcaagaactacttcgatctgcccttcgtgcctggcacgaatggtgtagctcctgccgcccgtcccatgtcctccatgtgtccagtgattgtcacggaacgcgccactggcaacgttcgcttggttgtgggtgccgctggcggtaccaaaataatctctgccctctctcccctcctcgtgcgcatcctgtggcaggaggcaagcatcaaggccgccatcgatgccagccgcatccatcatcaaatgctgcccaatgttctgctctacgagtatggactacggcagagctatgtggatagcttggcggagaggggacatcgatgcgagcgttatgagaaccgcggttccgtcatctgtggaatcgctcaagctaacgacaccatctgggtgaactcggattttcggaagccaggtggagttagtggattttaa

SEQ ID NO: 1335 - protein, 612 aa, DROSOPHILA
MYIRIGLNSLISVVIVILVAVYIYRYPDGNGGYNDQEAAPCPQLIHISVLAGKKKASRRPPNPEDPLPPSNSPLHRFSRAAICSDSDVCSQLAKKVLENGGSAVDGALAALICNGLIGMQSMGIGGGMVMNVYVAKENKSYSILAREMAPLALRADNFSSFRDEQDFKRSGWSIAVPAELAGYAVAHQRFGRLKWKDLVLPTLELCRRGYRLYKHQYDALILNQDMIRADSGLRRMFIDPDTGRFWPLGHLIRPAAQLCNTYDRLANEGPLSFYRGSIADDLLADLKDAGSAITKEDLNQAHAKLSSAIVMPLDEYDLHLTPPPGSGHVLGFIMNILKEFRAEFSRAGTMSPRQIHLMVEAMKFGFVKRWQLDESASEELLSNLTSHELAKSVARQINHTHTFNRPEFYGASPGIQIRDEHGTAHTSVLHGNDAVSVTSSINFYFGSGRTGRRTGVIFNNAMSDFSIEQLKNYFDLPFVPGTNGVAPAARPMSSMCPVIVTERATGNVRLVVGAAGGTKIISALSPLLVRILWQEASIKAAIDASRIHHQMLPNVLLYEYGLRQSYVDSLAERGHRCERYENRGSVICGIAQANDTIWVNSDFRKPGGVSGF

SEQ ID NO: 1336 - DNA, 7450 bp, DROSOPHILA
aattaacccacaatggccagatgcagattatcgccaccaacatccagtttgattttacgcaaggatccgaccataccctggcaaggaccacaccattccgagtaaacatccaaaactgatggaagggattacatatagagtttttagtagactaaaatgggctgcagacgaacccaagagtcctggtcgctccatgaaacgctccagctcctcgtccgtttggatgtcagcctgcagttgttgttgtccccccttctttgccatttagcctacctacttccaaaaaaaaaaaaattaacaaaataaacgagttttggattttgttgctgaattttgaatgcctattttttcccttttcaattggatgccaaaacgaaactgaatgttccatgaactattgattaaacaagacgccccattttcgcccgccccccaaatcatttcccagtttttcttttttcctttttttttgcagtgaattcaaatatacacttggcaatcgtaaataaattagtcaaccacaatcgtttaattgttcgtaaaattaacgctttttacattacacacattggcgagttcttacacattgcataacaaaaaaattgttcactcctcacgctacaatacaattcaaataatttaaacaatataaacaaacaaaaatacgagtatgaatatggagtgcatatctttcggctcgtgatccaaaattcctacgcgacaagtcacgatttcagtacatggactgcagagtaggtacatcgatttggatatgttaggttcatataataattataattataataatagtaataataataataataataataataataatagattatgcggtatatggatagacctatgtcatgcgtaggggctacagtgtacatgtgcgcagggtgagcaagttttaaaatttaggcgaactacgagtaactcaaaacctcccttaaacaattaatatgtacagttattaacacaaaactaacgtttaacgtttgtcaattaattctgccatccctttggatttcgatatcaacacaaagttgtattgatatagatatcgatatcgatatagatatcgatctctatctgacggaaatcccattgatggtgatgacattactggccaccggttccggttcgtaaacctcatcattggtgcgcatctcatagggagcgtcgtagaattgctcgtttggtatttgatcgtaaatgttttctgtaaagaaaaaagaaaagaaaaattgagtaaaatatacaaaagatatagataaacagtgaatttctattatatttttttacattttcccaatatttatcatgtcatttaatatctatatatatgaatattatgttgtatataatttaatttccacttacccgaccgattgttgttcagtctttcaccattgctgtttgcatccggattaccgccgccgttgctccttccgccggctccgccatggaacgtgttgaacgtcgccgacggattgttgtccatgtgcatccgattgttggcctccagcgtcgagtaggacattacggcggcattgcgttcgtccttcgtctccgccgcctgcacattctccgtatttttgacgggtctcgccttgttgcgatataggaagatcagaccaaagatcaccagcagggcgacgatcacggtggcaccaatgccaacgcccgtgcccagctccgaagtctcctgaccctccgccgtggccaattcgcagcgcggctgcttgccgctccaggctccatcctcggtgcacttgcgcaaatactggccaatccgattgtagttcggtatgcagtgatactccgccgatccgccgtacaacgtggaatcgttgaccacaatcacgcgaccattctcgatggccagaggacgaccacagtcgacggctgagttaaagacgttgcgaattgaattatgaatctttggctagaatggcatacacttacgtctgcaggtgggactcttgccagtccatttgccatttttctgacacacacgcgtatcgtttcccatcatgatcctgcccttggcgcacttgaaggtggccacggagcccacagcacgcggacccgcctccacgatcagattctcattgatgttgggcgtatcgcagaccacctccacgcattccggtgcctcgtggctccagttgccgtgctccgtgcacaggcgtcgggatactccgtttagcttgaagttcacattgcactcatagaggacagcggcgccgtagtacgtggcatttgtggccaggaccaccttgccattgttgatgccctccggagcaccgcactccacatctgaggaggattgcaaaatatcatattaagttaatatcatgaactatgtaaattcttggtagatttggctgtatatacacttacacacacattccggaatggtgccgctccattgtccactatccgtgcaggtggccagtgcctcgcccaccatcttgtagccccgttcgcatcggtacttggccagtgctccaatcctacagaagaaagcaccaccataagaattagaaggagcattacgaatggtgggatctatcaattacttataggtttgagctgtgttctgcgaggattcggaggtgcggataagtgtccttccatacatgcgatcatttccggtgacggagagcagactgtgcgcagccagtttcggttccggacagcgaatctctgtggatgatgtacgcaatgagcatagtgcatcgttgggtcatctattcgcttggatactcaccctcgcacttgggcgacgcatcgctccagacagccgattccaggcacgtgcgcttgaggactccgctcagtttgtgcgattgggagcagctgaagaccacttcggagcccacataggtggtattcgtcacgtacttgtggctgccatagggaatgggcaggattgtgccgcagtcgatatctgtatcgaagtaaaatattatattaaacatatatagttataattactctgcagtttaactatgtttatgtaaatatacatatatacggatcacttacattcgcagtagggcgcatcggcactccattccccggagtccaggcactcgagcaccggagtgccgtgcataatgtgaccgggatcgcagttgtactggatcttcgaatggacattgtaatcgtagccaatgacaaacgaaccggatggcaccgatggcgtctcgcaggtgaccagttcacagacgggcgcctcacccgaccacttcccttcccgggtgcaatagagctccgactgcccgtccagccaatgatcctcgtcgcactcgtatttaaccaccgaattgacggtggtggtgccgttcagcaggatggcaatgccacgatttggtcgtgccggtgcaccacaatcgacgaatctgcacgagggcgtcttgctggaccactcgccgcccaaaccgcacgagatgatctacagagtgtggttttaaagtgtggcttagttagtgtacgaaacgggataattgataacctaccgcctcgccaactagcacatagcccggctcacaaacatacgtggccgtggaaccggcacgcttgtcattgaatcgcacatcgccaccggctatgggctgcggatctggacaccagtccaccaggcattccggctgcttgccgctccagccgtccatggcgcacgtgcgattctcattcccgattagcgtgtagttctcgtggcaactgtatgtggccaccacgccgaagctagtccgctcctccgacatgtggatggatccaaacttcagctccggcagactgccgcagtccacatctgcgtgagagttcaaggattgaatttaattacaaaaaatgaaattgcaacccatttgccataatatttctgcataattgtttgcagcgagataattgatcattacacttctctttgtttttggctaactgaagcagtgcgattgcacaatatcgcttacatttgcaggtcggcgaggagccactccaagtgccatcaagtctacactcccgttccgtctgaccgagcagcgaatggcccttgggacaggtgtactgaatcttctcgcccagagtgaactttttgcccatgacagtggtgttttgctgggcatccggcgagccgcaagacaatggcgctgccggaagatggtaaagagagacaaaatgagacgagctggtgatgtgccgatggcactggcaagacctacagtgctggcagatgaagtgcaaatagtccagattgcagcccacatcattccacagccaattgcgacctccatcgaggaccacgcaattctgctcgccattgtagttgttcggctggtccttgccccatgttggcttttgaaccacatcgcctgagagttgataagatcaatcattagtaaaatgatagtaagtcatttgatagccagtcccctaccgttcacccatttccaggtgcgcgatgtaatgcccggctccttttgggcgccaatccacacaagctgcggtttcagttcgctcttccggcgttccagctcggacaagatgtacgaactggtggcgccacgaaagtcgtgtaccaagtcgccacctatgattattgaggaattcatcagtgccgcggacatcggacatacccgcatagagaggcggatggacaactaactcaccagtttgcttgcaaatggcttgcgccttgtcgaagctttctccttttgtgatatgaaagtcgtagcaggttttcgagaatgtcgttaccacagtgtccacaccgattttcggactcaggcatcgatccacggagaactcgtcgttggtgaaggtctccacctcgcacaaactgaggctgccctccacacccaccagctgaatggccacatactggccgaccaatgggcgcgcgcacgtgaaggtcttcaccacgccctcgtccagggtgcccggataccaggcgcacaacggatttcgctgcagatccgcactgctgttgcccacacggatctccagatcctgcagtggctgatggccgcagcagccgcgcgtcgttatccgcaccacgtgcaccgcctgcggagtgagaaggtcgacgcgccaccacggcgatggctccttctgcgtctcggagcactcctggccatcgggattctggcaagggaatcggaaaggaacctcattttattccaagctaagcgattgattagctaatgtagtgcatcttagttagtttgagcctcaaaatgaacattttctaccaagccaacatggcggatgagtaatatttctagttatttgcatatattttcatatatatatgcatatttccatgctaatataaagccttattatcaatttcaatagctttttgtaaattctattattttaaatctatgatactaaatttaacaacttgtttcaaatcacattttggatatgaatacatcaatatattttggcgaagcctgacagatattattgcttaaatggcacattaaaaaataagaaaaaaagaactgcacaactagcaaactgaatgtataatttgcatgcgatcaatacaatattaaatttgacacctgaacaccttgaactttgacttttcgtatgaaaaagccaaacaaagaagcaaattgcaacaaaatggttgttcgcactacggattaataatatatttggaagtaattaaatcagttacaacagccaaatgaaaactaaatgaaagtaaaatggttaatgttgaattttgcctatttgcgctgctgtttttcgccgagtgtatgtatgttggatgttatgtgtccaatggaagttggtccaactcaccttgttgcccggcttgccatcgttcgcatagctggcaggaccgctgcgcgtataggagctctggttgaccggcttgcggtacgccacatttaccccgcagaagggcaggtcccgatcccagcccgtccgccggtcacacttgaccgccgatggcccgaagagctcgtagccagcgtcgcactcgtagtgcgcctccgcgatctgggagtcaacggtgatggttcgcaccttggcattcagcggcaccgccggcggaccgcagactacaaaaaaaaaaaaaaacaaaaacaaagataataaacagcagacataagacggtgatatttgtatgatatatatatctatactatatatacaacacgaaagacttaaatctcgagtatccacactcgccgcttgacgcaatcgagttttttttttttttttgccaagaaactggattaattaaatgtagtcggaaagcgatttttaatcgctttagactcgcctcggcttaattcatttttgaaagtgctaattgctgtgagttttatatttatcgagggaaatgctgaagatttcaatgggtgttaggaaatgggtactttggttttaactagttcgtaaagcaaacatatgaaaattgctcaaaaatgcttaagtaaagaagaagtaatccacaattagttattttgattatttgttgcaaaaaacactttaatatatattccaaatttaagctttcggtgcgaggaaatatttgtatacttatttcaatatatcgactttcttttcattatatatatattttttttttaagtagagtgttaaaaatatatctaaagcacgtagagccgcaaaaaaatcaaaccagttaagtcgactgagttgggagtttgctaaacgactccttatatagtaatagtaggacgccaaaagtcgtgtctctttgtgtttttttttcacattgcgtgggtatttttttttattttatttttttacttgctcgtatctctcagctttgtttctccatccgaaacccgtgacccattcaggcaaattgtaattttataaacgaacactttgagctaagaacttgtgaaaagtattttccctattcccatgttaaatatgcaaaagcctaaaaattccaatgctcccacaattgttcgttgcccactaaattggtaaaacaaaaacaaaaaagactacataattatgctgtgcatatatatatacatatatagatgtgtatttctttgggcctgagtaatttcattaagaataaagcggcaattaggggacaatgtgaaaaaagagcgcgaaacggttttgcaaacatgtttttggccaagttaaagggcacaagttggccaagccaagccaagccaagtcttgtttccaaggggaacgccgttttgcgaggcaaacaaagtggttgcgaaatgcaaagtgcggtttgagtggcccagttaccacttttctgtatttgccgactgtctttcgaacctaatctcccaaaaagatgcacaagccaggtgaattcaaacgtatttatatgcattcaccaactctcaggctttggcaaaaaaaaaaaaaacaaaaaaaacacaagctgcctcgaaatctgtccaaa

SEQ ID NO: 1337 - DNA, 3469 bp, DROSOPHILA
atgtttgctttacgaactatctgcggtccgccggcggtgccgctgaatgccaaggtgcgaaccatcaccgttgactcccagatcgcggaggcgcactacgagtgcgacgctggctacgagctcttcgggccatcggcggtcaagtgtgaccggcggacgggctgggatcgggacctgcccttctgcggggtaaatgtggcgtaccgcaagccggtcaaccagagctcctatacgcgcagcggtcctgccagctatgcgaacgatggcaagccgggcaacaagaatcccgatggccaggagtgctccgagacgcagaaggagccatcgccgtggtggcgcgtcgaccttctcactccgcaggcggtgcacgtggtgcggataacgacgcgcggctgctgcggccatcagccactgcaggatctggagatccgtgtgggcaacagcagtgcggatctgcagcgaaatccgttgtgcgcctggtatccgggcaccctggacgagggcgtggtgaagaccttcacgtgcgcgcgcccattggtcggccagtatgtggccattcagctggtgggtgtggagggcagcctcagtttgtgcgaggtggagaccttcaccaacgacgagttctccgtggatcgatgcctgagtccgaaaatcggtgtggacactgtggtaacgacattctcgaaaacctgctacgactttcatatcacaaaaggagaaagcttcgacaaggcgcaagccatttgcaagcaaactggtggcgacttggtacacgactttcgtggcgccaccagttcgtacatcttgtccgagctggaacgccggaagagcgaactgaaaccgcagcttgtgtggattggcgcccaaaaggagccgggcattacatcgcgcacctggaaatgggtgaacggcgatgtggttcaaaagccaacatggggcaaggaccagccgaacaactacaatggcgagcagaattgcgtggtcctcgatggaggtcgcaattggctgtggaatgatgtgggctgcaatctggactatttgcacttcatctgccagcactcgccattgtcttgcggctcgccggatgcccagcaaaacaccactgtcatgggcaaaaagttcactctgggcgagaagattcagtacacctgtcccaagggccattcgctgctcggtcagacggaacgggagtgtagacttgatggcacttggagtggctcctcgccgacctgcaaatatgtggactgcggcagtctgccggagctgaagtttggatccatccacatgtcggaggagcggactagcttcggcgtggtggccacatacagttgccacgagaactacacgctaatcgggaatgagaatcgcacgtgcgccatggacggctggagcggcaagcagccggaatgcctggtggactggtgtccagatccgcagcccatagccggtggcgatgtgcgattcaatgacaagcgtgccggttccacggccacgtatgtttgtgagccgggctatgtgctagttggcgaggcgatcatctcgtgcggtttgggcggcgagtggtccagcaagacgccctcgtgcagattcgtcgattgtggtgcaccggcacgaccaaatcgtggcattgccatcctgctgaacggcaccaccaccgtcaattcggtggttaaatacgagtgcgacgaggatcattggctggacgggcagtcggagctctattgcacccgggaagggaagtggtcgggtgaggcgcccgtctgtgaactggtcacctgcgagacgccatcggtgccatccggttcgtttgtcattggctacgattacaatgtccattcgaagatccagtacaactgcgatcccggtcacattatgcacggcactccggtgctcgagtgcctggactccggggaatggagtgccgatgcgccctactgcgaatatatcgactgcggcacaatcctgcccattccctatggcagccacaagtacgtgacgaataccacctatgtgggctccgaagtggtcttcagctgctcccaatcgcacaaactgagcggagtcctcaagcgcacgtgcctggaatcggctgtctggagcgatgcgtcgcccaagtgcgaggagattcgctgtccggaaccgaaactggctgcgcacagtctgctctccgtcaccggaaatgatcgcatgtatggaaggacacttatccgcacctccgaatcctcgcagaacacagctcaaacctataagattggagcactggccaagtaccgatgcgaacggggctacaagatggtgggcgaggcactggccacctgcacggatagtggacaatggagcggcaccattccggaatgtgtgtatgtggagtgcggtgctccggagggcatcaacaatggcaaggtggtcctggccacaaatgccacgtactacggcgccgctgtcctctatgagtgcaatgtgaacttcaagctaaacggagtatcccgacgcctgtgcacggagcacggcaactggagccacgaggcaccggaatgcgtggaggtggtctgcgatacgcccaacatcaatgagaatctgatcgtggaggcgggtccgcgtgctgtgggctccgtggccaccttcaagtgcgccaagggcaggatcatgatgggaaacgatacgcgtgtgtgtcagaaaaatggcaaatggactggcaagagtcccacctgcagacccgtcgactgtggtcgtcctctggccatcgagaatggtcgcgtgattgtggtcaacgattccacgttgtacggcggatcggcggagtatcactgcataccgaactacaatcggattggccagtatttgcgcaagtgcaccgaggatggagcctggagcggcaagcagccgcgctgcgaattggccacggcggagggtcaggagacttcggagctgggcacgggcgttggcattggtgccaccgtgatcgtcgccctgctggtgatctttggtctgatcttcctatatcgcaacaaggcgagacccgtcaaaaatacggagaatgtgcaggcggcggagacgaaggacgaacgcaatgccgccgtaatgtcctactcgacgctggaggccaacaatcggatgcacatggacaacaatccgtcggcgacgttcaacacgttccatggcggagccggcggaaggagcaacggcggcggtaatccggatgcaaacagcaatggtgaaagactgaacaacaatcggtcggaaaacatttacgatcaaataccaaacgagcaattctacgacgctccctatgagatgcgcaccaatgatgaggtttacgaaccggaaccggtggccagtaatgtcatcaccatcaatgggatttccgtcagatagagatcgatatctatatcgatatcgatatctatatcaatacaactttgtgttgatatcgaaatccaaagggatggcagaattaattgacaaacgt

SEQ ID NO: 1338 - protein, 1124 aa, DROSOPHILA
MFALRTICGPPAVPLNAKVRTITVDSQIAEAHYECDAGYELFGPSAVKCDRRTGWDRDLPFCGVNVAYRKPVNQSSYTRSGPASYANDGKPGNKNPDGQECSETQKEPSPWWRVDLLTPQAVHVVRITTRGCCGHQPLQDLEIRVGNSSADLQRNPLCAWYPGTLDEGVVKTFTCARPLVGQYVAIQLVGVEGSLSLCEVETFTNDEFSVDRCLSPKIGVDTVVTTFSKTCYDFHITKGESFDKAQAICKQTGGDLVHDFRGATSSYILSELERRKSELKPQLVWIGAQKEPGITSRTWKWVNGDVVQKPTWGKDQPNNYNGEQNCVVLDGGRNWLWNDVGCNLDYLHFICQHSPLSCGSPDAQQNTTVMGKKFTLGEKIQYTCPKGHSLLGQTERECRLDGTWSGSSPTCKYVDCGSLPELKFGSIHMSEERTSFGVVATYSCHENYTLIGNENRTCAMDGWSGKQPECLVDWCPDPQPIAGGDVRFNDKRAGSTATYVCEPGYVLVGEAIISCGLGGEWSSKTPSCRFVDCGAPARPNRGIAILLNGTTTVNSVVKYECDEDHWLDGQSELYCTREGKWSGEAPVCELVTCETPSVPSGSFVIGYDYNVHSKIQYNCDPGHIMHGTPVLECLDSGEWSADAPYCEYIDCGTILPIPYGSHKYVTNTTYVGSEVVFSCSQSHKLSGVLKRTCLESAVWSDASPKCEEIRCPEPKLAAHSLLSVTGNDRMYGRTLIRTSESSQNTAQTYKIGALAKYRCERGYKMVGEALATCTDSGQWSGTIPECVYVECGAPEGINNGKVVLATNATYYGAAVLYECNVNFKLNGVSRRLCTEHGNWSHEAPECVEVVCDTPNINENLIVEAGPRAVGSVATFKCAKGRIMMGNDTRVCQKNGKWTGKSPTCRPVDCGRPLAIENGRVIVVNDSTLYGGSAEYHCIPNYNRIGQYLRKCTEDGAWSGKQPRCELATAEGQETSELGTGVGIGATVIVALLVIFGLIFLYRNKARPVKNTENVQAAETKDERNAAVMSYSTLEANNRMHMDNNPSATFNTFHGGAGGRSNGGGNPDANSNGERLNNNRSENIYDQIPNEQFYDAPYEMRTNDEVYEPEPVASNVITINGISVR

SEQ ID NO: 1339 - DNA, 3967 bp, DROSOPHILA
gcagcaaaggcagcaacatcggcagcattggcagctatggcaacgacttaagtggattacagcggcaacttgttggccgggtaaaaggatccggagatccccgggttcagtgttcaataaacacacccccagaaaacaccacggccaggataaccagcatagccaggataatcgacagggagtgtggggatggggggaggactcaggaaaaacgttcgaaagttggcaaatcgatcagaaaacatttgaaaagtcacaggacttgcgtagctcatcggttaatctgacaggcttaagactttcttttttgtgcaatagtaggtgcagtcttacataatattaaacgtaatatcttgcagtttagaattactttggaacttttcttaaacatatgaatgtaactatttgagcggaaatacgtattgataaataattataagtaaatagatttcatcctttggcctattcttctatgcctcaaatctgggattttctttttgcgacagtgtgctgttttcgagtgccgagcctcgaggagttactccatcggaggacgacaactgcagcttcattcccatctcatctgtctcagaccagtgggctctttggggcttatggattttccatttagcacaggacaggcgactctgctactcaccggatttggtcgcttcaccagccaaacactccacaaccggcacttcatcgatgcacgcggcgtatacgcaatgcgggtgctctaaagcgcctcgagtgctctgaagaggggggaggccaagggcgagggtgagggcactttccagagacagcaattagccgggaaaagaatgctgaagatgccgctccaggagagctggtcacataatttaaaactctcgcccaactgcaatttaaactttgtttgctgccttcgtttacaacgcgtcgccggctcagaaattgttttcattcctcgtcctttggcacgtcctttgcgtttggtcctcgccattccttttcagcgttttgcgtttttttttttgcgtgtctgtacttttagcagttatgcagttgcctagcaaataataacttccgtcttgactgctttgactaagaaatgaaatgattacaaaacagagaagcggatccagttactgtgcattttattgctaaaagggaaatttacatgactgaagcccaggctgaagctgactctgaagctggaactggagctggggtaaactttattaccagggaaactttgccggataaaagtgcacccgccgccggctgatagttatccttatgtactgctaataagtacaacaaataacagggccaacaaccacgttgcagcgacataaataaataacattcatttccgccccagcatcaccgccactcccactgccatttcatacccattgtagcccctcgggcactcgaggattaagcgagcgagctacaagactgaacactgagagctgccccgcccacttgatagtttgcccaatcgaatccaaaacccactcattgccagtcgatggagcgcgagcgactgaagagtcctccaaagtttcctcaagttgatcgaaaaataaagcgcggatagttggcgtggggcaatccgatggatgtcgtgagctgctggccccaaaactttcggccccctcagattcattatgttgcgcgacaactcttttgggccagcaatcaggcatggtttgtttgcgaaaagtcatggaagtctaagcacccaaaagtgcttccaaaagaaccgaagtcattggctcaatgtatagtattgtcaaattttgacgggcctcaactttcaagtacttggccaaatcgcgtcaaaagataattattggtgcattgtgcattctctcactaccaatcgaattttatacagaattaacgaaaatgctcattttcaattttcaatcacccaacaaggtgatgttctttgtaaaacagagcgactttaggtttcctgagcaaatcactttaagacgaattatatattaatatccctaatcctctagttttaagttttaaagattaaattttcatatattttttaatgttcatgattgttaaatatttagagtacacatacatatgtgtatattctacaatcccgccttctccgcgatccaggctctaaccttggagatcctaaggtagccatcaggagccgctcttccacagccaccaccgaggagtaagctggccagccccaccactttgcctccgtaggtggccggtccgccggagtccccataacaggcgccgctattcttggaatgcagcaggcaaatcatggtttctggcaaacgagagtagaacatccagcgacaggcccccctcgatatactcgtcacctgtacgaataacaggctgtcagagaggggtcccttctccgcaatgttgccccaaccggagatgtctacggcgacacagttgggcggatcctcggtggccaactggatggcggctatgttggcgtcaaaggtcagcggactctgcagtcggagcacggccaaatcgttgtgtccaccagtggcatagttgggatgcatgataacttcggccactggaatcctcactccgtcgcttgagaggagcagactgcccgcctggattgaccatagatctgccggaactctaaggcagatatatataagcagatatatcttgcagtgtcgaaccaaaaggtttcgataatacttacacatcattcccgtgcttcacacagtggccagcggtgattacgtgagtggccgagattatgactccaccgcagtagtgttctccacgtagacgcagggaaatctggtgcggaaattggccctgcttcgccttgattccgccaacgattcgaggctctatcgcggattcactctgattttgggctacgtcctgtcccagtattacctggacaccacataaaagcaatagcaaaacagtccacagtgtggtccacatgacttaatgggttaatttcctgttaagttttgcttgctacaaaacattttcagctgtatatatggagaataagttataaataagtaatgacactcattatcattagtattgctatccagctatatgctaagtcaaaagccgacctaattacatgaaaatattgtagtaatgatctaaatagaagactttcaggaaaggttatacaatctaaaagcagcaatatcacacattaaaccaaaccacagcgcacattgctatccaattagatacgcatgcgaagtgaaagtgaataagattcgccgattaggagagcatacaaagctttaacccttaaccctaaccaacatctgatatagttcactttgcgaatggctcgctaacaattgacccacgaaaactactcatacgagtggtcgtctctttcagcagctttcaatggacagccaggcgaagacagctgtccgagtaacatctgctgcctcctctttcagccatcggattaactcagttagtgaccacccaccgcagcactgaactccaactcttcactgcacaacaccttccatcgccgagtgtcatgcatttttcatggcccgccacgagctcagctgctcaactaaattaacgaaatcaatcatcatcatcgtgtcggcatggcacctgacatacagagaaaaatactgcaaacagcttggactcgcattttgctaatttgctgagcaacgagtgaaacgagaaaatattgtcaccagttacaaagttttccatatcatatcatccctactatggttaaaggcactgcctcctacaaaataccaaatacaattgaagaaaatagcaataacttttgaaatgaagtagctctgttgcgtgactactttggctgagctatacttatatcgttacttatattcataattggtatttggttcgtccaaaaagtcactgttttctatcagtgccaaatcgatgacccatttcttgccgtgcacttttgtcc

SEQ ID NO: 1340 - DNA, 881 bp, DROSOPHILA
atgtggaccacactgtggactgttttgctattgcttttatgtggtgtccaggtaatactgggacaggacgtagcccaaaatcagagtgaatccgcgatagagcctcgaatcgttggcggaatcaaggcgaagcagggccaatttccgcaccagatttccctgcgtctacgtggagaacactactgcggtggagtcataatctcggccactcacgtaatcaccgctggccactgtgtgaagcacgggaatgatgtagttccggcagatctatggtcaatccaggcgggcagtctgctcctctcaagcgacggagtgaggattccagtggccgaagttatcatgcatcccaactatgccactggtggacacaacgatttggccgtgctccgactgcagagtccgctgacctttgacgccaacatagccgccatccagttggccaccgaggatccgcccaactgtgtcgccgtagacatctccggttggggcaacattgcggagaagggacccctctctgacagcctgttattcgtacaggtgacgagtatatcgaggggggcctgtcgctggatgttctactctcgtttgccagaaaccatgatttgcctgctgcattccaagaatagcggcgcctgttatggggactccggcggaccggccacctacggaggcaaagtggtggggctggccagcttactcctcggtggtggctgtggaagagcggctcctgatggctaccttaggatctccaaggttagagcctggatcgcggagaaggcgggattgtagaatatacacatatgtatgtgtactctaaatatttaacaatcatgaacattaaaaaatatatgaaaatttacaaaaaaaaaaacgcaaaacgc

SEQ ID NO: 1341 - protein, 262 aa, DROSOPHILA
MWTTLWTVLLLLLCGVQVILGQDVAQNQSESAIEPRIVGGIKAKQGQFPHQISLRLRGEHYCGGVIISATHVITAGHCVKHGNDVVPADLWSIQAGSLLLSSDGVRIPVAEVIMHPNYATGGHNDLAVLRLQSPLTFDANIAAIQLATEDPPNCVAVDISGWGNIAEKGPLSDSLLFVQVTSISRGACRWMFYSRLPETMICLLHSKNSGACYGDSGGPATYGGKVVGLASLLLGGGCGRAAPDGYLRISKVRAWIAEKAGL

SEQ ID NO: 1342 - DNA, 5404 bp, DROSOPHILA
attcttcttctttcccatctctttctcgctccaattgtgtttgtatgagtttaaaaggcaagggaattgttaattttagtacattgcttagcacttgatttaaacgcgcaaattggtgacacaaatatcgatttattaagtttgaactatttaatttgtcgcgcctttcagcttgcaaatagaagtatttactttagacaatcggatgacgcttttgatttcgcatttgtttgcgactgtgtgtgtgcgacgagccttctaattccgacaaaaagaagaagagcaccattcggtggcctaatttgtttcacttctccggaatcaagcttttccgatgcctgcttctattaacctttatttaatatgactcgtgcgttcgacgatatttttgcagtagttattttcttttcgtgcttgtggagtgcacctcttttatgccgcgtttgaagaagaagcacaacgtagtagtgtttgaatgtactgcggaatttagggatgggaatgcgtagctcttgcaatcgatagctcgataagtcccctttcgcgtttcgcagcacttgggcgggatttttaaatctaaggtgtgactattgtgaatcgagaaaaaatgcacatttccacttttccagtaattttcgagttgctcaaaagatattaaaaacttgttgcatttgaaaattaaatggtctttgttcgtttaagtttacaactatatcgagtcttaatctctgagttttcacatagaaatatagtttttatgcaaggaatctccaataatctcttgagtagaatctacaagtccctaaaaatgaggttgcacatttcgttgtttttttggttgagggcaaaagtgcagccggcagttttgtgggagagtgtagagcgcacatgtttggcataaggacgatcaacagactgcaggaaaaccgaacgaacgttggtttgtctgtgaaggaggctttcaattagcatgtgagtcattaaaatagttctagcaaacttacttgagaagctgttcaggtcgctggagttgcatgcacaatttaatgccgctgtagaagtccaagtccgcattcagactcaactttggttcgtgggtgatgctgaaatcctgcactaatttcgcatacgtaaagccaacggccaaatgaccaagaacagcgctgccagtgctataagccaaaagttaatcgtgagttaaataacattccaatcaaatgctttggctttttcacttacttctgctggatttccgtctgggcatttcgattccacaggctgaatcccaccttgccattgagatccacactcctggcgcccagaactcgccagtggagcgtcgccccggaggtcaggattatgtagtgctcgttatcctgggacaaagtggttgcctggtaagcgggcgttgagtccgaggcacttcctccccacacgtgacccattagctcggtctgaccgctgaagaatactaggggtcgcaattgagcaccctgcacactgatctccatgcccgcggtgaccgcttcgtcttcgctgaactcatcatccgccgggattgcatcatttccatcgccggagtcaccatcgcctaccagcgagcccaagccggcagtgtagatgcccaatttaaagctgctggcttgggaacggcctgcgtggagcagaaattccacggagccacgtttcaggattccctgatacacttcctgggtacttagcagggtttcgttgaaggctggagcctgggaaagctgacgggtgaggactgtcgtaagacctgtaagtattaaagttcataattgtttgaacagtgtcattaggaaattaggtactcacccttttgtcccagcacattgtagttgtttacatgcctccgcttgacaagctccgatttgaacaaagccctaaatcgcgggcacttctcagccagcattcttagcttctgcagcacgtatgttttgatctcaaactggcgatcattggaggctaggtaatccaagaagttgcccaattgctcctgagttggccggagggacaggataatatcaagagccagagtgcgagcggagctatcaaagcgacgctttcgctggtagaatatgctctcgaactgcaagcgatgtgaagagttaaagctacctaggggaaaggctttcagagcctgtaaggcagccaccgataaattgggagcctcgccagtttgagcgtgctccagcagagcttcaatggtagcaggatcctggagattttgcagagcccttatgtacaaggtaggctccttggaggtgagaccttgcagtagataagaacgcacttccttcaacaaaggatcttcaacatctagtccgctttggcgggtcaaggtggccacggtttggataacgctttccctcagctttaaatgctttttgatagattcctgttctagcaatccaaacaagtgctcaactattttcctgtctggatgggtggcgaccgccagggactgcaggtatttctctagcagatccaattgctcgcttgtggtttccgactccttgtaaaggaatccaaaggtggcattatgagcatcgaacgtttgaacagcacccaaaagatccaccaactggggcagaacttctgcgtgttccgtaagtagatcttcaaattgttcttgccttgtgatgcgagccaggggaattagttttacgtacgcaagagccagcgaggatttgcccacgtcggcggattgcaattccgtcagagaggcctttaattggtcctccagctggaagaatatatttttagttcagcaatccccaaatttgaaattatttacataccgtttgctctttgatcgcactgatcatgccatctacatcggactctagctcaaaaacgcgataccattcgagcaggctctggatggccttatctaagctgcctagttgcagttgcttgacttcctccgatccttgcgagacgtgttgcagaatcaacgaactcttcacgaagcttcccacatccggtttggcagctagattgaggcggtgattctcctgagactctgcatgcaagagtgtgccctctgaagagagctcgtagaagaccgtctcctgggcttgctgagtaactccaagagcttcttctgggttatagttgaccctgagatcccacagagagcagtcccttttggttttctccactttcgtggatgatttgacattataggacacacgacacaggccagaaacatccagttcctcctcctgggaagcatccaatctgagctgcagcagggaagcaattccgcgctccaagttcaacagggattgatctttggatgtatgggcgatgaccttgtcaggctgtcccctaaccagactaatataaaaaggtctatcgggtatccgggtaattgagcgggcttttccagaggcgtcgaccttgcttccgctgataaaaacctccagtaactggtcctcatctccactccaaactgagttgatcttgagatctgtctcaaatgtatagctcgtctccgcggagcttgaatctcgtcccagttcctggagtatcacttgattctgtagcttgaaaatttgctgactgttcggagctattagggccgtttttccatcctctacagaaatgtggccgaaaagaaatagtagaacacgtcattagtcaaacgaattgttataactttcacccagaagcagcgctacatgctgatatgtattttcgtcgtttactaagcctgggtcgaggttatcaacaagtggccctgcacagtgggcagcgataaggcaaatagtggaagcaacgtgtacgagggagtgataatctgaaggagggatggggtgatagatagcaaaggtcgatgtggatgtgtttaaatccggggatctttgggaacaaatatgatgatgtttatctatgtttcggtttttaacaattcagggtcgggtaactgcacgtttttgtctaactttacagaaacaaaacgaaacacctgtgcaggtcacatttccttgaccttcaatactgttacttgccccactgtaaaaacagctgcttcaattggaaagtgtgtcagataaaagttctctttcggccttttgtttgtgtgcgtaggcggaggtgtggcactgtcaatgttgttgtttatcgccaaacgctacctaccacaaagagttcattcaacttgatcaaaacccatttacccaactaatcgcaaatattggcattacttacccaaaagtcccaaaaagagggccagcagtagcagggttcgcaggcacttcttatttttgttctccattttcccaaggtctttgttcgattctgtacttatattaaactgagcagaggtaaattaaacttaattcattgataataccgagccgagccggcaggcgacggaattaaaagcggaatgaaaacagaacggagctgaggagcgagattctgacttgtggtgactttaagcagctgagagtcgctgagctgggctgtggtgagattgaacagctggcgagcaagagggcgccactgttacggagagtgccagaatgtatgtaaattattcgagcttctacaaacttttttattttatttaaatgagtatacatgttattataacctccaaaaatattcatactatattcatgtaacaggcacaaggaagcgtttccgcgcatattaagtatatacattcttgatcaggatcaatagtcgagtcgatctggccatgtccgtctgtctgtccgtccgtttgaacgttgagaagccaggaactttaaaagttaaaaagttgagattagaaacaaagattctagggacatacaggcagcgcagtttgttgatccatgtcccacgcacactctaacgcccacaacgtttcacgtttttgaaccgtttttcggtattttttcataatggtattagtcttataaatgtctatcgatttgcaaaaaactttttgccacgcccactctaacgccctaaagtcgccaaaccttgcacgtccacactttagaacaattttttttatttattttattacccaatatctaccgatatcccagaaaaattatgaaacttccgcgtttgcattcacactagctgagtaacggttacctgatagtcggggaacatagactatagcattatctcttgtttttaatctgatgtagcttaagtatgactgtaaatgtctaaagtaaggctgagttaataaacgcttaaaacaaatgtatgtatgttcatctttggatatacatatttgcttttggggaacaactacggatatggttatctttccacggggttctattttttatatttttaactaaggattggcgactggaccgttgttcaatcactatagcactgaaaaagttggcagcctcaaaacttc

SEQ ID NO: 1343 - DNA, 2609 bp, DROSOPHILA
tcgcctgccggctcggctcggtattatcaatgaattaagtttaatttacctctgctcagtttaatataagtacagaatcgaacaaagaccttgggaaaatggagaacaaaaataagaagtgcctgcgaaccctgctactgctggccctctttttgggacttttggaggatggaaaaacggccctaatagctccgaacagtcagcaaattttcaagctacagaatcaagtgatactccaggaactgggacgagattcaagctccgcggagacgagctatacatttgagacagatctcaagatcaactcagtttggagtggagatgaggaccagttactggaggtttttatcagcggaagcaaggtcgacgcctctggaaaagcccgctcaattacccggatacccgatagacctttttatattagtctggttaggggacagcctgacaaggtcatcgcccatacatccaaagatcaatccctgttgaacttggagcgcggaattgcttccctgctgcagctcagattggatgcttcccaggaggaggaactggatgtttctggcctgtgtcgtgtgtcctataatgtcaaatcatccacgaaagtggagaaaaccaaaagggactgctctctgtgggatctcagggtcaactataacccagaagaagctcttggagttactcagcaagcccaggagacggtcttctacgagctctcttcagagggcacactcttgcatgcagagtctcaggagaatcaccgcctcaatctagctgccaaaccggatgtgggaagcttcgtgaagagttcgttgattctgcaacacgtctcgcaaggatcggaggaagtcaagcaactgcaactaggcagcttagataaggccatccagagcctgctcgaatggtatcgcgtttttgagctagagtccgatgtagatggcatgatcagtgcgatcaaagagcaaacgctggaggaccaattaaaggcctctctgacggaattgcaatccgccgacgtgggcaaatcctcgctggctcttgcgtacgtaaaactaattcccctggctcgcatcacaaggcaagaacaatttgaagatctacttacggaacacgcagaagttctgccccagttggtggatcttttgggtgctgttcaaacgttcgatgctcataatgccacctttggattcctttacaaggagtcggaaaccacaagcgagcaattggatctgctagagaaatacctgcagtccctggcggtcgccacccatccagacaggaaaatagttgagcacttgtttggattgctagaacaggaatctatcaaaaagcatttaaagctgagggaaagcgttatccaaaccgtggccaccttgacccgccaaagcggactagatgttgaagatcctttgttgaaggaagtgcgttcttatctactgcaaggtctcacctccaaggagcctaccttgtacataagggctctgcaaaatctccaggatcctgctaccattgaagctctgctggagcacgctcaaactggcgaggctcccaatttatcggtggctgccttacaggctctgaaagcctttcccctaggtagctttaactcttcacatcgcttgcagttcgagagcatattctaccagcgaaagcgtcgctttgatagctccgctcgcactctggctcttgatattatcctgtccctccggccaactcaggagcaattgggcaacttcttggattacctagcctccaatgatcgccagtttgagatcaaaacatacgtgctgcagaagctaagaatgctggctgagaagtgcccgcgatttagggctttgttcaaatcggagcttgtcaagcggaggcatgtaaacaactacaatgtgctgggacaaaagggtcttacgacagtcctcacccgtcagctttcccaggctccagccttcaacgaaaccctgctaagtacccaggaagtgtatcagggaatcctgaaacgtggctccgtggaatttctgctccacgcaggccgttcccaagccagcagctttaaattgggcatctacactgccggcttgggctcgctggtaggcgatggtgactccggcgatggaaatgatgcaatcccggcggatgatgagttcagcgaagacgaagcggtcaccgcgggcatggagatcagtgtgcagggtgctcaattgcgacccctagtattcttcagcggtcagaccgagctaatgggtcacgtgtggggaggaagtgcctcggactcaacgcccgcttaccaggcaaccactttgtcccaggataacgagcactacataatcctgacctccggggcgacgctccactggcgagttctgggcgccaggagtgtggatctcaatggcaaggtgggattcagcctgtggaatcgaaatgcccagacggaaatccagcagaacactggcagcgctgttcttggtcatttggccgttggctttacgtatgcgaaattagtgcaggatttcagcatcacccacgaaccaaagttgagtctgaatgcggacttggacttctacagcggcattaaattgtgcatgcaactccagcgacctgaacagcttctcaagtaa

SEQ ID NO: 1344 - protein, 836 aa, DROSOPHILA
MENKNKKCLRTLLLLALFLGLLEDGKTALIAPNSQQIFKLQNQVILQELGRDSSSAETSYTFETDLKINSVWSGDEDQLLEVFISGSKVDASGKARSITRIPDRPFYISLVRGQPDKVIAHTSKDQSLLNLERGIASLLQLRLDASQEEELDVSGLCRVSYNVKSSTKVEKTKRDCSLWDLRVNYNPEEALGVTQQAQETVFYELSSEGTLLHAESQENHRLNLAAKPDVGSFVKSSLILQHVSQGSEEVKQLQLGSLDKAIQSLLEWYRVFELESDVDGMISAIKEQTLEDQLKASLTELQSADVGKSSLALAYVKLIPLARITRQEQFEDLLTEHAEVLPQLVDLLGAVQTFDAHNATFGFLYKESETTSEQLDLLEKYLQSLAVATHPDRKIVEHLFGLLEQESIKKHLKLRESVIQTVATLTRQSGLDVEDPLLKEVRSYLLQGLTSKEPTLYIRALQNLQDPATIEALLEHAQTGEAPNLSVAALQALKAFPLGSFNSSHRLQFESIFYQRKRRFDSSARTLALDIILSLRPTQEQLGNFLDYLASNDRQFEIKTYVLQKLRMLAEKCPRFRALFKSELVKRRHVNNYNVLGQKGLTTVLTRQLSQAPAFNETLLSTQEVYQGILKRGSVEFLLHAGRSQASSFKLGIYTAGLGSLVGDGDSGDGNDAIPADDEFSEDEAVTAGMEISVQGAQLRPLVFFSGQTELMGHVWGGSASDSTPAYQATTLSQDNEHYIILTSGATLHWRVLGARSVDLNGKVGFSLWNRNAQTEIQQNTGSAVLGHLAVGFTYAKLVQDFSITHEPKLSLNADLDFYSGIKLCMQLQRPEQLLK

SEQ ID NO: 1345 - DNA, 24227 bp, DROSOPHILA
tttcggtgtccctttgtatcgattgttttgtgatcgcctatgtttacattggctgatcgttccaatcgttcaatttatgagcctaacatgttaatgactcaatagaaatgttattaaatcatttgttgatctacgctgtccgacaaatctgtaactttctttggcatcttcaggggctgtgtgatcaattgatggacgttttgatttcttcctcgattctgctgcacctttctattcaagttgacttcgttttgggctcctaattcatttaaactgcggtgctggacagcttttatggagcataaaacgcacgacactgcctggctgaccacaagacgagtgaaaaatgagaattcaagttggccaagaagtaatatcataattttcatgtaccaataactcgactaagtgcgatctcatgggccaaattgatttttccccggttctagatctccagttcgatctccttctctacgatctcagctcgcagctcgagaactgatttcaatttaattaatgatattgaacgtcgtgtgtgcccgttttgaaccctcgtggttccgtttcagccgggggatttggtaatcgaaattatgaatggaccgcgacgggactcaatgaaatatgccacatgtgccccagaagagagcacctgaagcgaagagagccccagaagagcgtcatcccgagagaaatgcaatacccactcgcttttcccccacagctcagcacaactcactcaaacgagagtttggctttgagccgtttgtgtttgccactcatttctctggctttggcattggctttctttgcccgaccgctttgtgtgttttttggctttcttttgagctctatgctcggcagcactttatatcgttggccattgtcaaggcgaacgcacgcgagcagcgcagcaaagcagctaaagaaaggcaactgaagaactcaaaactcctccgtgagcaacttatataacgactgattagcccggagtttgctttagttattcggtcaactctcgacggtcaagctcgcagcgatctcgcgacttggcaaccaaaaaataattcacaaaagcaccgaatcgcgttacaaggaactttagtccgcggctttgacgaggagcaacctaccagcaaagtcaagtgcaacattcaatacccaccgatgtgcaatgtgtgtaatcagcaaacagtgatcatttacatacatgaataaaactcatctcgaaagtgaagcgtgactcagcatcgatagccgaaaaaggcaggagaacaagacaatccgaaaggaaaggatacttttcggtcacttccagaactcacgaccccaagttacagttgcagttgcaaaatattctggccaagtgagtgtttattaacttttaccacacacacgtaatatgcgcaatgacaagtaagaaattcagaaacagtgatcggcaagaaatctccttcttcgttaaacaatctgctttgagaacaaccttgggtcgattgattacagaatttcccccaatccccattgagttcaaaataaataattcaagtgctttccatagcggttcacttacctttggaatcaaaaatatttttttaatttttgtagttgttcttccttaaatatttgctctcagataacagaagatttcgaactgtgaatataaaaagatacagtattaaatgaccttagataaggactaagtagctcggtcgatcaataaaaaaattcacattatacttcaaaaatgaattaatgcatccttaaagggcacagaaaaaaagtgttgtaatcaaattacaaattttgtatatattcacacaagttgcagaaaaaataataaatgtaaagacaatggccgccgaatgcttcttagacttactatttctcgctgcaatcaaaaataatgtatccagattgcaattgtgatggcatccagacatttgcattaattggcaacagattcattaagtttcgttgtcttgtgctgtcttttatagatcatctagagtccccacaattaaaagtgaacacagggcgggcaattaaaataattaagcccccgatgtggtgtgaaatccacaatgcaacgtgtcagaatagaacccacgagcaaagagtggggaaaaagagatactagaacaggaccccgaccctgataaaaggcgttgatgatctgaagagcaaggctaaagccagagaaccaaagaaagccaaagaccaccggctgaaatgatccattgagtgtcagctaccgtgttggttggctagcgagggttcttcttcggtgagctggtatttaaatttgcccgcaataattgccctggccatgactgggctttgctctcaaacttggctccggctccggctctgcagttgtgggccagaaagctagggagttggcatcatggcatcatcacgatgacatgacagttacaacacagccttcgttcgcctggcagctattcatttacgcagcctgccagtcgccgttgattagacgaagcgtgcgctttaattgccgccaaatggcagggaaaagaccatgcaggcaagaaaaccacgatgaagaaagagaatcttcaagagccttcgccttcggcctggcaatttgtcatgtgcatttaatattcgccgggccttggcttccgtgccttaaaaaacaatttgcgtttgtttgtccagcttgtttgttgcagttagcgttgattagcctctgcaaaaagttctcccattgcaattacaggcaaccaacatcaaatgccacaacaccaggtagccaggctgagccagctgagccagctgtgtgcctctagtatctaaagcatcttgcacctagccactccccacacactttggtgtcagcaaagcaatttcaaatgtctggccatgcggaatttatatgggctctatacgagacccaccgcatttgggcgttcattctgccgtgaaattgatagatttaatttgacatttggcgcaggtccgcgcatttgtttttgcatttgatttctagcttgcaggctatgtgcgcttatgctttttctattccctccattttgtaatttacttttgcggctgacagtggtcatcaatggctaatcatcgtagtcgtcgagaagaaatcgcgaaatggattctaagtagcgagattgcgactgtgattgtcaggcagaaaaaccgcttccgtttcagtttaaccaagataattgattgatggaccgccgcattttcaattgccaagacaacgtagtccatctctccaagagttgtccgtctgtaagcctcatttgggccaacagttttactgtttggttttcggtgtgccaaattaccatttatgtttatttgcgattgtcaacttttgggtcagttggctgtttgggctggcaattagcacagatctacccaacaatggtcgacggatgggaaataacataactgtttggattactttgcatttggctttggccagcgattagctcttctactgttttggcacctttttttggggctaatgccgcttgatcttagattggcttcatgataatttatgcacaagatgcacgaaattgggttgagaaattatcgaaggaaattggctgatgatatcatcagctgatgagagccgctttctacacatcgcatttcccccaagaagattatctggctggcagtacagtttatcccacgattttgcgtggctctatcaaaccattttgatcatgtgaattactcttattaagtatacgccctgttcgtcgcctttagatcgctgccatagctccagaggctaatagcatggcaacagcacaacctgtccatcaaaatgctagctcgtttcgcacttgattcgctttcattgaaaagtgtccgatttgaagacatgcagtttggctaattcgatcagaagtgctgcccgaaataatttgcaattgtgtgaaagtattttgctgccgtttgtattgccgtaatattttaattgaaatttaatcgaaaagtaaaaagctttcaaatgctgcattggcagccgccagaggctaagatatctgagccaagttcaccgacagagacatcggcaattgagagtttcacttttcgcacactcgaaatatcaatgaacccaaagtcccaggccgaagacaatggcaggagttgctatcgcctcctgccgcctgcagccaatctgaaatccaaaaaagcaaaaatccgaaaatccaaaaagaagaaaaatgaacccgaggtggggataaatgacaccatagtttgggcaaacgatttcggccagaagaagcggccgccgaaaatcagcaagaaataatcgttgaagaatttgactttcgcttcttcggcttccttggccataaataaaaacgtctttcccctcgaaaagccttgtgattgtcgccgattgaatgcgcgaatacgaaacggaggaggcgcaaaacgctttgggtgcaactcaaactcaaacccatctggcacgaccaaatggcaatcgccatcgcaatgccaatgccaatgccaaggcgtttgtatttacttaaactttgacatttgccagctggctcgccgatggatatgtggatgcagtgcctcatacatatttgtcggtctgccgccaatgataatgtcgaaaaggaaaagcgccaattacctgggaacaaaagtaaaagtccgctgaaggatctaggcgtgtgattggaacatctgctagccgacttaaaagccagcatttataaaactaatgagcagaataaataaattaattattgaattaatcgcaagatttaatcaatgatcctaaaattaagacagcgaggtgcaaattattagaatagaataggttagcagaattcacataatatcttttgacagtatcctactatcaactgaattgaatatctatctatgaatatctattgaagagaatgcagatctaagctaaatcggatcctttttaactcaaatacgtgacctctgcccaaggtcactgcaagacgagtagcgcctcttaagatcagacctctgactcatggcaaagaccttccatcccagccctctctggcgagtttctcccgtccggatttcgctttcaagactttccgcgaagccaaacaaatttaatgacaataatccaataaacgttaaagtctggggatcgtgacaaaaatcttggttgggtgcacaaaagaaagcgccgcagacccccagacctagcagacctctactctataagagcctccatccagggaggcgaaaaaaaaaagccggtggatgccattgagtgctattaacattttgacattgcatgcgtttcagttcaggagtgtgtatatataaaataaagaggagcccagcagaagattgggagaagaattacattaataggttggacttccagagttagtggatctctcctcaccggtgggggaacgtgcctggcattttggggcacttttccattgtgccggccatgcatgcctgtccgcctttatgagccaacgaaccacgagtttttctagccgcttctacacccattcaatggcatttttattattgttcgctggtggttggttttttgactgaccccaatagaaagtgttacagttcaatgtctgagaggctgaggcttccgcctgttgtattgtagatctttcgttctttgccgccagcggaaatctcttgttgttctgaactgctgacgtcaggggtgaggaggggataacttgatacagatcgaaagtaagagttgaagatcttgcggaaatctcgagttgattagaatgcctggcactccatcatcaaaacaatttgcattttaaaactgccaaaagaaagtggccaaaacgaaacgagcatcgggagcatcgaagtcgggcgcgtgcattgcatagttaattgtgcaaatgttttcagtcttcagttgctagttggtagttgatagtcggtagaatacagtaaagattgaccgagagaaacttttgcaaatttccaagttaaatggctgcacagaaagaaaaaaaaagacgattgctataaaatgtagattttaagactaaataatgtttcgattttttgcacgcagttctgcgcatattttatttattcaaaataatgtcgaaataaatgttggttatatggctataacgcgctaggcttaatcatcaaatcgagcatacattttcccactgtgccttgtaaatgtggtagtccttagttgctagttgagttatttggcttttggccatatttaatttcgttatttataagcaaatttgcactgcctcgactggcaacccctgccgcctccgacgacagaaacaaaaaccgcgatcgtcgactaggtcaactttcgctagcatggaatgcgaaatgcagcagcagcagcagcagcaactgcagcaacgacagccactgccacaacaacgacaccactgtcagccaataataaagctagaagctggagaagaagctctggctccgggaaaaaagccaagttctctgagtgactgagaccctggccagatctctggcttggtttgcctggcctggcctggctttttgctttttgcttgttgcttctctgctttttggcctggctttcttggcttccttcttctcgtcgcttaaatagttgcaaataaattgtgtgggtagcggtggaaactggcaacagcaagtaaattacttcaatgtcacctgctgacgattcaaactcgagataagcgctcgacgtcaagacggatacaacatccaaccatccagccatccagccatccagccatccagccatccagccatccagccatccaaccatccgaccatccatccgctggatccactacactataccgatctccctaagttttctctcttttaatgaaattatcgctgcatctcattgtttgtctgccttcccttgcctcacagcggtaaacattatttatttagttctcgttttcacattaaacgttgtcacactaaactcaattgccgcagatgcagatgcagatgcctagatctgtatcacccgtactttggctttaagtgggtttgtggctcaaaaccgggccaattgttgtaggcaaatatttaactaatttgcatttgtttgccttacagatacaacgacgacaagacccgatctgaagttttagaggattgaagacacgagagcaaacagttaaggtatgtgccaaatcaaatatggccaggggttatgtcaagttcagagtgtcagggtctcggagtcgaccataggatgagaattctagttaagaaccgccaggattcctgtgtattttaataggccatccagttgacacaatacaataaattatgcataggcaaattcccagaacacggaaacgatctggcagaaaccataaccgtttttcgattgcaccggaaggtgtctgcttttatagaacgggaaatatttaaattttccgtaaaacgaagtgagaacgatgaaagagaaccataaaaaccgaacccgtgggtttaataggggccacggtgaaaaatgcagccaagaaagtgctcttgtttggccataaagtttagtaccgacgccactctctagaggggttttgtccaatttttaaatgcaagccgtaaacagtttacaaaacattaaagcaatcaagttagtttaatgggaagtgggacttagtgcgttagcagtacgtgaaataccccgaccccgtagttaatagaatcaagataaagagacgggatcttcgcatcttttgatattcgtccacaaggtcagccgagtgaaattcgtttaagcccaactcagcttgggtgcattccagtgcatatcatcgacccagtttcgggtttctccgccaactaggctgatgtttgactaaatagcaaataatttggcgtgggctgggacccctccactctcgtggatatacgtgtatctgtatcttccgccagctgactgacgtgcagacactgcataaattagctgtccatataaagcattaagatctggtataagaatcaggcaaggcataattgtgcaatgaatattgttagccaagaacagaaacagggagagggagcccagatcggttgtcgtggcttctttccttgccaatgttgcatgccgttggcctgttccacttttgagatgctttcttgccagcattttcgcgttgctgcctatcggcagatacaattccacggccacggcagcgcgaataagctgaataaagtgaataaactgcacgcagaggaccagcggctttaatatttattgcgttttaaagacgcattcgaaatggaagcgatcgccacaaatggcaactgtggccgggccataaatcttggccagtgcaaattatataatgcgatacgttctatatataacgtggccaattgggctactgactctctttttggtggttatttatggctccatagaagtgcggtccgcttcctttcccaaaggacttgatttctcttcctgtggcaaatggtggggataaatacaaacacctgaacggcaaccggaagtccaactgtgatgctgagatattgattctgattgcccggcagcagcgaaagatcagcggccatcgaatgtgtgtaatgatggttaataaatcaaacggagaattacctggaattctgcagacagtctgcggcggcagcgtttgtctgccagattcttcagctctctgcagctctgcagcttggctttttgctgccttcctgtcttggccaattccactcgatggatgccaacaaattagcgcaacgtcggcaaaggcgaaatcataaggcttgcaaagccaaagccactggccagtcatttggtccgtcagtctatcaatcagtcaatccatctggcaaacaaacaaatcccattcccattccaacgccaaactaaaattgttttgcttctgtttgcttaggccagtgtgctgtttgagcaacacaaaacttgtttgtttccccgcgatgtttatttgtttgaatgtttgttgtcttagctgccgtaagccgcttttaaccccttgagtgccacatatttaagtgcctgccattcatcctttggtccgcctgtacctgttgtgcatacagaacttgttgacaaatgactggatggaaaggtatttaaaacgacaaaaggaacggataatagataggtgaaatataagaaatatgtttcttccttagaggttttcaaagagtgtaaatataggagttaaaataaaaaccaattgcactgtgagctcatatttggtccttcaaaccgggtttggagaagttagtacggcctttagtaagaggtcacgactgagaggtatttcacctgcatagatgtatagatgtatgtaatcttataccacatatcataaaactatcctgtcataacttttaacaagaaccaaacgtgtgtcggtaacttatctatgttatctttaatgggttaatagaatttgtcgccagtttcgttgtgtatttaaattgcccattttatgtgcatcttttgcgcccaaacgccaaagcgccaaagcaccgctcgcaaatgggttaatggcacattctaatcggaccgaacacacgaagaagatatggctgaaagtagagatcttggccagaattctggcttcgagtttagatatttagatggcagccgttttccagcagccagacgggcaacaatgtgaacgcaaattggcttaaatgcaaaaagcgtcgacaattagctccgcggtcggtggctcaatggctgaagtggcaaaaggtggttcggtcggttggtggctcaatggctcagtggttcggcggctccattttctgcagtgggtggttgttggcatatgcagtttacagttagtttgcgccatgttgacagttacgtgcgccgacagcttccacctgccaagcgaacaaatgttgcataaattagccagcaaaactggagcggccaattcacattgttgcctgaatgtggactgctggcaatggatgatgatgttgccgccaccattcacagccttttgtacttgcgtaatgcattttcacgcaatttataaccgttttcccccttgggaaactgggtcaccaggaaaagacccccaacaggtgcagctcagctcagctcaaaaattcttgcaatttgcatttgattgagtcgtaaatttgcaacgcacacatgagttagtatgttgttggttggtcggtgggtgaacagttaactgggcataaatcatatgactgtgggaggcgcgaccgccaagcgacctgatttccagatttccaggtccagttttctagctctcgatgatgatgatgcgactttggcgtgcgcttttcaatttgtttagattttttacgggcggtttttcctcttctctctcggccgtttcgaccgtttccttttcgggctttgtcgggatttatgtttgactgtcagcggctatgaatctctcccccaagaattttccaaaagaaaaccaaaaaaacgagaaaatccggcgtgacgacacgtgccaacagagcattcgatttcgaaaaagcatgccttttctattgttttttgcctttcagtcgccatttaatttacttctgcccggctttctttcacttctgtatagttgcgccagtttgctagaatttctaatagccagcagcacagagcaactagcattcattattgtttgccattaaacgcttttttattggctcgaattaacgcttaagtagaatttgatgccatcggacaatggaacgcagaatggccaggtgaaggccggaataccataatgtgggctgtcagaaagcgaaatgtacttggacacatgtcccacagaactctctattctcctccggtaccttcttggattcgcggcttctactgctcgccataaagttctttttgtcacgtagttcaaataaaatgtgtttttatgaggcgattagtggccgccgttgtatggggcctaaagcatatcaacggttgagaaaaagtgaaaagatcttcaagtgtttattgcctggcttatgaccataaagtggctccagtgccactcgctctgatgaagattaagatgtcgctgatgacgtgtgtttttttaatggtgttttaaggggcatatttacaatggaatctcttagatatttctgctataaggaccataaatgattatgaatgtccatcctaggacctttgaagctgtaggttttagctttgtctttggataaagaattcaaaaatgtgtgccatatacgtatggtgttcatattgttgatcttggattccaattacttctctatggccagtctgaatggtgagagtttggagattgtcaatccaaatgcttccgctacataccaccgatcgtagctcgagcgaattcaccaatcaaaatcgatattcttcagtcaaagaatgctacccgtacatttacctatactttccatgccaactgtcgttcttcatccttatcagaggcatttatcgagctgctttgccagcgaacttgttctgtatcgcgccgagttccttaagcatttttctgatacttgtgcgagagcattctgaatgacataatctataagctaaacaacgcaatttgcattgctaaatggctggggatacatcccgggattctgggcgaaacacgccccgcatggggcggccttaacataactgagattcctttgcatgtcatgagcatttgtgcgggactccgttactctgaatgttagatgttagatgttagatggagttcgctctgcttcgtactccgcggtacggtgttcttgcggccgtggccatgtatttatgcgctctaaacattgttagttatgcaacaggcagcaaccagtcctctccacttatgcagcatgacaacagtgccgagaagaacacaaagaagacaaccacgaacgacaacatcaacatcagcagcaatcattgacgggcatcgatgatggcaaggcctacatttcaatgtcagctggcccagtgctaccaatcaagttgttaactatgcaaaagtagtaaattgcatcagcatcagagcaccattcttcgctgcgctcactgcaacaattgttatgaactgaactttaaataacaatcagccaagtgccgttaaatgaatgcgacattgttctgcagttgcagctccgagctgagcaatattaatttgcggtcttacgttaaggctaaaatatttgcataataaacgccaacgccttggcaaaagctggctgtttatctccggttaccgcctgcccatcggccaaaagcgcattctcatcgcataagcattctgaatcccattttattggcgaggtggccatggccatgaccaaggtgctggtgctggtgctgagccactgcagtcgctcacctcgtacatttccgaaaagtaatggcccggccaacagtgataatttatcactggccagcagccggacatgcggcaaagctcaacggtacttgctggccaacacaatgcctgttctagccaggtcttcggtcttcaggcttcagtcttcggctagtagactccagccggcagtccgcaagtctttggactgaaccgccattgtgcaccggtctcaatttgtgcgctcttggccagcacaatcaaattgatatttgctgctatatttagtttatgataatgccgcctcggcaactccagtgctaatatgctgcttccttctggtagagagcactcatttctcggctggccacatttattatgcatgctcaggctggctggaattgtaagcctgcagtcaaattttcctcgtttctactgagaaagtgttttttttttttttttttgcagagctgcaaagtcaattagcatttggcatttagttggcataaattcgaatcgagcgatcgaaaatattatgcctactgtgggaaccagcatacgaaactagagaaatttgtattgattatattgaaaagagcagagctgacctttctcgggcggccagtaaagcgaatcgaattcaatttaaacgttttcaattagattttcatcggcaaatgagttcatcttttgttttcacttgcctccgagttgcagagacggggcaaaaagccattagcaaatttaatagaaactccgaggcctcaatcaaagcgccatacacatatggctagttcgttccgtgagtcttttgtttatgggccagacattaacaaggaagaatctttggaaactaggaagcagctgcgaatggccaatggccaatggccgggtctcacctaataactaaccaaattgtatctctctcttcgattggaatcgcagagtagtttacatgattgatagatggaaaaccgcttccagctacgatgcggcggctggttaacgttcaattagtgaaattgatagacatatctaagctcgtcgggcggggggaaatcaacggccgttgaagaaccaaaagtcagggagtatgaaaagaataacagaaaaacggaaaaaacaaaaaaaaaaacaaagatttggctggccacaaattacagcaactggttaattaaaatgtagctacccttttttcggaggttcggttacgctcacatgaaaattctaagtgccacgaaaccacagaacgtttttccatttcccgactccagaattttgagctaaccgcatgccacacacacgcacgtttaccgttcctccggtggggccattcttctcttgacttttctgtccactttggtcaacggctcattacatttgtgggttagcaggtgaaattgaaccgaatcgaaaggaaaggaaaacccacggaagaagggacagaagggccagagaaaagccaaaaggccaagagataagaatgggtctgaaatcaaagtcaatgtttcggcccgcggtgccttattaaaagcgcgttgcgttgtctgcggaggcctataattagcataaattcattcatacaactaattgcaagtggaagtgagcgttccgtaatgagttcgcctctggtttattctcctccgtgtctttatttccttcgtattttgccgttcaatcgagcagaagaatggtggtgagcaccacccggatgatcgaggggttcaggttgcaggttccaggttcgagccacatattgtttttagtgcagtatcttgaagcatgttattaacattaacggttctttctctccactcttgtttggttttcataatttatgtgtgagccgttgttgcagtccaccagtcgcaggaggaggctctcgtggtgtgggcgtggctttggttttgcatgcaacccacctgccggctaaccccggctcctaattaattatgtaactaacgaaacattaaacaagcgcctggccggccagagggccaaagagtttataaggaaaaatgtacaaaaagccaggaaaatccgaacgaaactcttttctcacgcagccgcttattaaccgctaaatcttcttcgttgtctctccgcaaaataatgagccacactttagattatctctaagatggctcagcagtgcgaatctcgattttctgactgctttgtctttttacggctggccggtgaaacttaacttaacttactctcttgcgggcgatcgacagccgaaacacataaaaatatttaacgacatggaaatgtcttttctacccgcctttttatgtagcggggatggtgcttgaattcactttcacgccgaatagcggaaaatagtcttttacttagttattcgcgaaaaaaggaagcattcgaatatatcttagatatgtcagctataaagtgttaattgtttctcgcgtttgaatgagattgcataagtggattagcacagagttatgacagagccaagttactctgttactgtgtagacgtgtcattgacttctggtaaattgagcaataaaaaacgttaagtgtgttgctagattccaaatatagccagcaagacgtactatagtaaagttcgagacagttcatcctggaattttgcagtcttccaacttttgagcctctttaaaaagtagttaccgaaacaggtcctgcacttttaaagagtccaaagaaaagccataacaataaaagtgttatgatcctaacaacattctttgagatcacacgagaagaatatcttgtaataatacttataatcacttcttactgatcattatgctcagaagtgtggcttaaatatgttcccattcagaacacatttcgctgtaatttattatgtgctaagcatgtaaggggtcatatttcattggtaataatattaattatcacgcccgactgaaagcacttatatagttggggtatctggaacagtgcacagctatacgtactaggtgaaatctaggcccctggggtttcaggggtcgggaatctcctcggtctcccaggttttcccccagcatggtgccacctacgccaggtcgcatccagacactctccatccgtactggtaggtactcctcccaaatatttcccaggcggcggcgcttttcacacataaaacttcgccccactgagggcctcagcaatgtttttgttctgattgtcggtggtgcaactgttattgtatatgcacaatagaaagacccgagattgctgttagcgcagctgtagctttaattaaacgctgcgaacacacagcgaacaagtcaagcaattaaagctcgaacacagaaagaccaggggaatgcctcggaatgccacaacatagcatcgaagacacaaagttccgttccgttttcattcctgggcgagcaaagcccccgtggaggaaccctagattttgctaagactaacgccaaactaataaagtgcacaccaggaattacatacattgcgcgtaatgtgaaattagttgcctaattaacatttagccatctccctgggggcacagctttggagcccctagactaccatggccccatgctcacaccgtgtaccatttcaattgcagacaaaatgtttctacgccgctgcactctactgctgctgatctgcctaattgcgagtgacgccgccagcgccgcacgcaaaacaaagcgtcccgtcaagccggtcaagcagaccaatccgcgcaccaatgtaacgccttcgccgccggctgtcgcctcatcgggtagttccacacccgccagcaccagcagcaccaccaccacggaaggaagcggcgaccaggaggtggccacagtcggatctgcagctctagccggcggcggggaactgcccaagcctctggtcacgcccatcgaggcgcagccggaggctaagacggacaaggcaccagctctggaggaggagtgcgatccagatatgattggctttgagattattaccgggtgagttcagttttcaaatcaaatgcgtttttgcacatttgctactcagttgaacaaaaaagtttgccagtcaagaattgaaatggatttgcaaaatccaaataagatctgtcaaaacaaacattcttatggcgtattacataaggaatggaaaatatcaccaccatcttttcaaaagtgtcacaaaacaatgaggagtttcactcaacccaaagcttgcgcaaccgccggcattatagaaacttgattacattttatggccacttgttattttcacttttgcttttcttctaaaaatttgaattttgagcgacaacacaatgggcctgccacaggtttattcatgtttaatgaaatgcaccccgacatctgggccaattaacatttccataggaagagaagacgagataacggtgaacccagtaaggtaaccggcaatcccaccaccacaacactgctaactggcatatgcaaatttgtggctctttggttaaaacgtgactaatccatgactgttttttcgaactcatcggctgcggcaagttcgttgcctcagtcttttgtttgagccgtctataatgaatacccgcaagatcgcaagaatgtccgaccactttcgttttcaatcgtattgggaatctattagcgggaccgggaacataaatcatccggcaatcttggaatcgatctaatttataaatcattttcatcggctttcagctacgtgctttcggctccctcgaaaatgctggacactctgcccggcacgctgatgctaaccgactgcttggaggcctgccaaagtaacgagtcctgcagcgctgtcaactacgaaaccggattgtgtgtgctgttcaagacgaccgccgataaattgccaggtgagttagaaagtgtgagaattccaagcggctgtgctgttttatatttcttttttttttgtgccaaagaaagctcaataattcaggcgactcagcgagtcagcgacacagccagtcggccgttcattcattcatttactcaattactgagttctagttcatgcaggtcggctgcggttgtcgtggccccgaggcataaatcacccgcgtgttcgcaaaaaaaaaaaaacaaaaaaaacagaaataaataaaagcgaacctgtacacgcctcttgcttttacgcacgacgcggtttttggcctggcctgcaaactagatttttgcctattctgcaggcaaactggcttttggcatagtaacgcataatttctgcagcctcagccttcccagtcgaatctcgaatgtcgatgcagttgtcgtggctcgcctcattcagctgactctgctccaagactgctccgagattggggcttttgcccgtttctcaacgcctgttacttcgcagtgaaggggcgtgtgcgtaaaacgcataaaatacgcacagcgccgttgcctttcccccttttctcgcctctcaaccacttttcatttctcaatttctgcgttttcaggttcactttcgcgctcgcagtttccggttttcaccatctacgcacagaaatcgtgtttgggcgtgcgtccttgctcgaaggcctggtgcatcgatcgcgttcaaggttaccgcctcccggagcacgtcaaatctagtcagacggttctgtcgcggcgagactgcttggaactctgcttgggggagaccgagttcacatgccggtgagtgttggctaaagcaagttgattctgtgcattgcttttataaatataatataagcatagtaaatagttcttaaattcatcaaattataacctcaagctaacattaatctgataacaaccctgaacgaaaggttttatcaaattgtaatgcagttcaagattttaactaatattactaacacttaaacacacactcgttgtcattgctctcgttcgaacttgcaaatctttcctaatgccttctcgtaccgcttactttcttccaccacctccgacactcgctatcttcacttccctcttccgccctataccgctcaatccactcagatcggcgaactattaccgccattcgggactttgtgaactctccgacatggaccgcataaccttgtctgctggaggaagcgtggaaccctacgatggagctgactacctggagaacaactgcgcagaggagcccagcaaactgtgcgagttcaagcggatttcgggaaagatcctgaagacagtggattcggtttaccaggacatcaacaccatcgacgagtgccgagatctctgccttaactcgccctacaggtacggtattcttaaggcgaaaatgtgagccctatctgatagccaccttaatgtaatcctgttcagatgccactcttacgactacaatgatactggagacatggtctgccgattgtcgcatcacagccgcgccaccttgaccgatgtgatggatccctacttggatgtccccgaggcagctacctatgaactgtcagcctgctacaatgtatccatagagtgccgctccggtgagatgatcaccaagattagaacgtccaaacttttcgatggcaaggtctacgccaaaggagcgcccaaatcctgcgctgtgaacgtgaacaactcgctggagtttgacttccgcatgggctacaatgatctggagtgcaatgtgcgccagagcgcttatggcagatatatgaacgacatagttatccaacatcacgacatgattgtcacctcctccgatctcggcctcgcagtatcctgtcagtatgatttgaccaacaaaacagtgctgaatgatgtagaccttggagtaactggagagattgagtcctccctgagcgaagagatcaccattgattcgcccaatgtgatcatgaagatcacctctagggatggcagcgacatgaagaggatggccgaggttggggatccgcttgccctgcgatttgagatcgtggagcccaacagtccgtacgagatcttcgtgagggaactggtggccatggatggctcggacagcgccgagataacgctgatcgatgctaatggctgccccaccgaccaatacatcatgggcaccatccagaagctggcgcaaaatcgcaaggtgctgctctcccagttcgacgccttcaagtttccttcgagcgaagtggtccagtttcgtgccttggtaacgccctgcattccgcgctgcgaacccgtcatttgcgacagcgaggatggcgccagtggagagctcaaatctttggtttcctatggccgcaagaagaggtcggtgctgaatggaactgatgggggtaagtagtttttacgctttgtaacacctattgttcagactgataatatatgatatatgaaatattcatttacatgatgcgtagcttcttatgaatattttcgtttcgatatcgatccttactataaaaagtcatttcctctttcttacagccgagttcttgatcagcacacgccaccgtcgtgatgtgggcccagtggatgataacatactgctcatgcagtccatacaaatcacagacaagttcgggttccagccagaggatggcactactacccacggaaatgacagcggtccccacgagaaggcctatgcgggcgtggcccaggacaagctcacttgccttaatggctatggtaagttggatgttcctttccgggggctctgtgaaaaagcccaatcaagcgcaaatcaaagctagcttgatttgcatagacaagcaggaggatcaggagctggagctgcagctgaagctggaaccgaatctgcagttggacgacatcgtgtcctccgcgggtcgtgaggcgctcagcttgttctttggctcgctaattttgataatgaatcaatttttcatcattgccgacttgagcaaggggccttaaattaggttcttcgttgtccagaacgtgttctgtgttatgatgctggactggctcgttcttggtgtctctgctggctcacgaccaggtcactagttcatccaatgctgaatgctgtgcagcaggattctgcacgcctcgttttcgtgcggcgcgaaaatctttctgcacagttggttgtccatccagatggctgctgggttttcagcttccgagctcccaagctcccgagctccagcatctcccaagtgtcgctacttttgtggagcaattttcaggccgcgttgaagcgttaaattgacagctcgttagacggatgaaactccactggaccaccaaacatcaggcgcacatttcagttgtaattacgcgctgcatttccaggcatttcaagccagatcagaggcgcgcaaaccgaagcaattagagcaacggttctacctgtgcttaagctcatttgccgcacacattgcccactggaatcaccaggccaacttggatgtgcgtgcgcgcccaggaaaaaatgaatctcggccttcgtctctggcatgcagagcggcaatttaacgccgcatccaagacactctgtaatttgtcaaagcttatgagctctttgcattctgcgccggtatttacttaaaaatggatctttctcatgacttcaaccattttaatgctaactttataggtagttcaggaatttaatttctggcattacttcgagagtaatcaccaggaagattttcaataatttcgctttcatcaaattccctacaattcaaagtgtttttcgcctaagtgccacgttggttattaccaatctttcctctatcaatacattcttgctattatgaggaataacatatatttcggctcagcaacacaccatttgcttattagaatgctgcacaacacatcgatttctttaactttaaatcccaacctccatcgtaatctctttgtttatgaacctcgggaaaaccattgctaaatgcagatgtatatttctaatctaatcgttaatctagtttagttccactaactattcctgctggcgattcgcggttattcggtcagtcataaaaaatacatcatgtaaatgagtgactcagctttgttccgcttttatttatgctgatgagcagcttatgttctaaatcaattttagcttaatatcttttttttttagttaatttcttgttccttttacggcgcagttcccaatcgacttcaatggcaatgtgtacgtttaatgaagcataaattcgcttttaatgcttgagctgtgagtaaatccttccgatttatgcagcttattttttatgagccttctttcagcagatcagaagacatctgactacactttcattatcataagagttttctcagcgcttttctcagctctttgttctggctgcagtttcatcaaattatttaccattttgtgggcgccgcggtttacttattgcccccgaaactcccacaacttcgtggaccgtttatagtaattgttataattttgtatattttcgttgatccctcttttgttactgttattgtggtcttcttgttgcgatggaaaagcggagtccaacacataaataaaagtctcaagtgcgtgcactttgttattgaaactcattcaagtcatggaaatcatgatgatgatgatgatgacgacgttgtggctctcggtttgtttgttgatttgttttcggcttactttttatggtcatttgagcagcgaacaaccacaacaatgttaccaagtaatctctgatagtcatctggcatgtcgtcgacgctgttgctcttaaattctgatttcgtgaactggacacaaacagaagaggcagcaacgcatgcaagttgagcactgcagctcgactttgagtttgactttgacttcggcggcactttcacccgatttctaccggctttggttcggtatttcgtatttccttcgctgcagcccgggcttatttatgtggcatgttgcactgttaagaacccaggcgaacggggaaacatgcgatgtctagggtatagaaagtgaagccacagcgtccaagtccaagtcccagtccgagttcgagtccgagtccgtgccgaaatatgcaactcatgcattaaattgtcgttgttttatttctcattgtttttgtttatcttctacttgttgctgtcaaacttggtcacttggtcactctgcgtcttgggaccttggagctatgttcttcttttcgctcccctacttcggtttcagtccacaacgaagtgggtcaagtggcgcccacttttgttttctgtgataaccgaaccgatctgaggtcacttttgcctcgtattcctctcgatctggttttccgcccatcgaagcgatcttatcggcattttgccggccatccgcaaccagtttccgtcgaaacttttcgaactagatcggtaactcgagataatcctcttgatttatggcgataagaggctgacttccctttttaaattgctcgagtagcaacctggagcaaattctcgttttctgattctcaaaaggcttaggttaaaagattaatgatttaatgaaatcaaaatttcgtgattgcttgacctcttttgggatgtgtgaaaaatgctttttcatgttactcctgttacctactgatttgtaagaaaccgaaaatcatagcagtttttttcgcattcacttttttcaggacttatcatggccggagctctattcctgttggcccaattgagcatcttcggcatctggaagaccgtgcagcgccgcaccagcaaggagcgctacctgtaccagcacgagcccacgcccaccatcacctacggagcgcccaccatgctgtacggaccaccacccaactcctccgctggatcttcggcctcgggaacgtcctacgggggcagtgccaaggacacgctgagcaaactttacgacagcggcatcaacgggcgctacggacagcagttctaggggagatctgggtggctctcgctgtttgccgggaacacttagctgggaacaaacgcaatatgcctcgaaagcttcaaaagattcgatgagacttgaatagaaaatattcgcctagcagcgacacgtgaaatcattgagaacccttgattaatccagcctagactaagtctacgataagtttacactgggagttttaactccttttttacgatacaatagaatgcgcgcttttaaatgcactggaagacgagattccagcattttaaatcggcgcattgccaacaaaagaacggaaattcaaaccgataactttgagttagtttatagagctacaatctctctagcgaaagttaggctaattataagtttagtgagaaatctgcttcatgtcctcgagcgtaatgcatttataactatactatttattattaactatattgctgctctcaaaccgcattaacccgcaaagtttgccaaataattttgtatcaaaatgttttgcgccaggcttctgtgcagggcggcatttccaaatttccgatgtcccatcagcccccttaacctaaatactaatttttgaatcatacttcttattatttattatccgagacgacaggcggtgctagttattaagaacttctgagagacttggtttaatctcaagaggaaaggagacgaaaagtaataaacgtaaatttaataaacgaattgtactgattaagtaatgcaataaactttacgcctaaataaaatatttattaataaatgtctaaacataaccatagctgtctcttttaattggcgaaagaaagaaggcacatgccagcgcaggcccactgaattaatacattaattacggtggctgggcaggcatgtcgaaatttattagcgctttgattaagtaaacatttttccgtaacccagaccatttcccattagcatttggtcgacaaaactcggagagccgcctaaccaaccaaattgatgtttgtcaaagcga

SEQ ID NO: 1346 - DNA, 2939 bp, DROSOPHILA
tagttattcggtcaactctcgacggtcaagctcgcagcgatctcgcgacttggcaaccaaaaaataattcacaaaagcaccgaatcgcgttacaaggaactttagtccgcggctttgacgaggagcaacctaccagcaaagtcaagtgcaacattcaatacccaccgatgtgcaatgtgtgtaatcagcaaacagtgatcatttacatacatgaataaaactcatctcgaaagtgaagcgtgactcagcatcgatagccgaaaaaggcaggagaacaagacaatccgaaaggaaaggatacttttcggtcacttccagaactcacgaccccaagttacagttgcagttgcaaaatattctggccaaatacaacgacgacaagacccgatctgaagttttagaggattgaagacacgagagcaaacagttaagacaaaatgtttctacgccgctgcactctactgctgctgatctgcctaattgcgagtgacgccgccagcgccgcacgcaaaacaaagcgtcccgtcaagccggtcaagcagaccaatccgcgcaccaatgtaacgccttcgccgccggctgtcgcctcatcgggtagttccacacccgccagcaccagcagcaccaccaccacggaaggaagcggcgaccaggaggtggccacagtcggatctgcagctctagccggcggcggggaactgcccaagcctctggtcacgcccatcgaggcgcagccggaggctaagacggacaaggcaccagctctggaggaggagtgcgatccagatatgattggctttgagattattaccggctacgtgctttcggctccctcgaaaatgctggacactctgcccggcacgctgatgctaaccgactgcttggaggcctgccaaagtaacgagtcctgcagcgctgtcaactacgaaaccggattgtgtgtgctgttcaagacgaccgccgataaattgccaggttcactttcgcgctcgcagtttccggttttcaccatctacgcacagaaatcgtgtttgggcgtgcgtccttgctcgaaggcctggtgcatcgatcgcgttcaaggttaccgcctcccggagcacgtcaaatctagtcagacggttctgtcgcggcgagactgcttggaactctgcttgggggagaccgagttcacatgccgatcggcgaactattaccgccattcgggactttgtgaactctccgacatggaccgcataaccttgtctgctggaggaagcgtggaaccctacgatggagctgactacctggagaacaactgcgcagaggagcccagcaaactgtgcgagttcaagcggatttcgggaaagatcctgaagacagtggattcggtttaccaggacatcaacaccatcgacgagtgccgagatctctgccttaactcgccctacagatgccactcttacgactacaatgatactggagacatggtctgccgattgtcgcatcacagccgcgccaccttgaccgatgtgatggatccctacttggatgtccccgaggcagctacctatgaactgtcagcctgctacaatgtatccatagagtgccgctccggtgagatgatcaccaagattagaacgtccaaacttttcgatggcaaggtctacgccaaaggagcgcccaaatcctgcgctgtgaacgtgaacaactcgctggagtttgacttccgcatgggctacaatgatctggagtgcaatgtgcgccagagcgcttatggcagatatatgaacgacatagttatccaacatcacgacatgattgtcacctcctccgatctcggcctcgcagtatcctgtcagtatgatttgaccaacaaaacagtgctgaatgatgtagaccttggagtaactggagagattgagtcctccctgagcgaagagatcaccattgattcgcccaatgtgatcatgaagatcacctctagggatggcagcgacatgaagaggatggccgaggttggggatccgcttgccctgcgatttgagatcgtggagcccaacagtccgtacgagatcttcgtgagggaactggtggccatggatggctcggacagcgccgagataacgctgatcgatgctaatggctgccccaccgaccaatacatcatgggcaccatccagaagctggcgcaaaatcgcaaggtgctgctctcccagttcgacgccttcaagtttccttcgagcgaagtggtccagtttcgtgccttggtaacgccctgcattccgcgctgcgaacccgtcatttgcgacagcgaggatggcgccagtggagagctcaaatctttggtttcctatggccgcaagaagaggtcggtgctgaatggaactgatggggccgagttcttgatcagcacacgccaccgtcgtgatgtgggcccagtggatgataacatactgctcatgcagtccatacaaatcacagacaagttcgggttccagccagaggatggcactactacccacggaaatgacagcggtccccacgagaaggcctatgcgggcgtggcccaggacaagctcacttgccttaatggctatgacaagcaggaggatcaggagctggagctgcagctgaagctggaaccgaatctgcagttggacgacatcgtgtcctccgcgggtcgacttatcatggccggagctctattcctgttggcccaattgagcatcttcggcatctggaagaccgtgcagcgccgcaccagcaaggagcgctacctgtaccagcacgagcccacgcccaccatcacctacggagcgcccaccatgctgtacggaccaccacccaactcctccgctggatcttcggcctcgggaacgtcctacgggggcagtgccaaggacacgctgagcaaactttacgacagcggcatcaacgggcgctacggacagcagttctag

SEQ ID NO: 1347 - protein, 833 aa, DROSOPHILA
MFLRRCTLLLLICLIASDAASAARKTKRPVKPVKQTNPRTNVTPSPPAVASSGSSTPASTSSTTTTEGSGDQEVATVGSAALAGGGELPKPLVTPIEAQPEAKTDKAPALEEECDPDMIGFEIITGYVLSAPSKMLDTLPGTLMLTDCLEACQSNESCSAVNYETGLCVLFKTTADKLPGSLSRSQFPVFTIYAQKSCLGVRPCSKAWCIDRVQGYRLPEHVKSSQTVLSRRDCLELCLGETEFTCRSANYYRHSGLCELSDMDRITLSAGGSVEPYDGADYLENNCAEEPSKLCEFKRISGKILKTVDSVYQDINTIDECRDLCLNSPYRCHSYDYNDTGDMVCRLSHHSRATLTDVMDPYLDVPEAATYELSACYNVSIECRSGEMITKIRTSKLFDGKVYAKGAPKSCAVNVNNSLEFDFRMGYNDLECNVRQSAYGRYMNDIVIQHHDMIVTSSDLGLAVSCQYDLTNKTVLNDVDLGVTGEIESSLSEEITIDSPNVIMKITSRDGSDMKRMAEVGDPLALRFEIVEPNSPYEIFVRELVAMDGSDSAEITLIDANGCPTDQYIMGTIQKLAQNRKVLLSQFDAFKFPSSEVVQFRALVTPCIPRCEPVICDSEDGASGELKSLVSYGRKKRSVLNGTDGAEFLISTRHRRDVGPVDDNILLMQSIQITDKFGFQPEDGTTTHGNDSGPHEKAYAGVAQDKLTCLNGYDKQEDQELELQLKLEPNLQLDDIVSSAGRLIMAGALFLLAQLSIFGIWKTVQRRTSKERYLYQHEPTPTITYGAPTMLYGPPPNSSAGSSASGTSYGGSAKDTLSKLYDSGINGRYGQQF

SEQ ID NO: 1348 - DNA, 31563 bp, DROSOPHILA
ttcagagaaaaatgcaggtcaaatgatattttcacttaccatatgagttcccttaaaatgaaagctcgagtttatgtattctgaaatttgtttaatagcagatgtaaatttatcgtcatcaaattgaaatgatcatcattatccttagtagtttttcttcatgtgtattttgtgcgcatgccttgcaccttccttccatatgggccatgtgttgtgtgtgtgtgtataactgaatctcgaaaaactgatccctccgcctaacggtaaatgactggattcgcttaccctgggggtgattctcactgtctcttttccccacgactgtctagtttttttgcctggatctggcgaaaagtaaaaaaaaaatgaaactggaaaacacaaagggaaatgaaaaagggagcctcttgtcacgtagacatttttgtatagccatctccctcgctctctgccgcggagaacagttagttttcagtattaggtatgtacttctccaaaagtggacctttgtatattatattatctttttggagtttctaaagatgtcgaataacatcttatgaacaagaaacaccacgaaatgaacgcaaaaaatcaaagtatgaacattttccagtcaattttcgctacctgtctgtgtttttgaaagtgtttgtgtgtgtatttcccgttatttcgctttggcacgattattaccgctgcagttctcctttttcctttgagctccttttccctctgccgctgtcggcgtctctgcttgcctgccctctcactcgctccttttgcctacttggcaatttcataacgtgcccccaaacgagagagagcgagagagttcgacgctcaactctcgctcgctcgctccatccctctcgctctggcagcaacttcgtttgctggtcggccgtgctgttagcgagagataaagagagcgcaaaatgagcgccagcagcgaggcgtcgttttcgagggtcgctcagtcaccgtcacatttgcgtcgtttcattcggtttcgtgcgctcggggattttgtttggttctctgctctgtgcggcagatcgcgaggcaacgcgtgcggtttgctggctaaattctacatatacacattcaacatccgacggccgaagcggagctagaataggaaaaccaacctttgcagtgctaattatttacaacacaacagtaagtgtgtggtgtgtggaaataaagcagcataatcgcgagcgggagaggttgtgaaatagcgcccatatctatatgatgggtgcctttgttggctggtgtgcgtgtgtgtttgtgagcttctaatgaaaaacgttctatttttaaatgcgcacaccataaaaaactgaaacgattgctccacacttcaactttaaaaattatcagtcaacgagtgccagtgtgttggtgtttatgatgacggggggaaaatgaaaatcatcataaatattcgtctgtgtctacttgtgaaattttccacaacgaagaaaaaggaaacgagaaaaaaaaaacccagacaccacaaatatatgtgtttgcgctgcagcgacgccgactgcgaaacttcccctctttatgtttcatgcttcgtttttttttcttccatttcattttttcggtcgtcacgaagtctcttcggcttttatcgtgtccatcgatctccaacactaaacacccgcagtcgggaagcagaagcagcagcaactgtaacacaaatccgttagctctctctttacgcgagagcgtgattagtgtagggaaagagcaaagttgaaaaattaacaagaagcagaaactcgctaggaaatttaaaaaaataactgcacttcgctgttgaaaatttgcatacaagtatgtcgctgtgggtgtttatttgaggatgtatgtgtgtatgtgcaaaggctaagcaacaataataatctagctgaaatttcaagcgcgcaaaagagatgaaagatattgttattgctgcgctgaaattaaacatgaacttgaccttgggccgcattgcgagttttttgcgttactaattttgttttctgtcttctttctctttgcagcataactgctgacacactaaacaaaactgaaaaaagaaccaagggcgaaagctgtttattttgtttaggcacctaagtttggccaaattataatcaaaaaacgagtggcgaaaaaaacagcaagtcagagagagcgctcgacgttcggccccaaggtcgtgggcccaaacccccaggatccatttccaacaaccccatccaaccacccgagaaaccagaatggatgacgatcagcagttttgtttgcggtggaacaaccaccagagcacactgatcagcgtgttcgacacgttgctggagaacgagactctagtcgattgcacgctagccgccgagggcaaatttctcaaggcccacaaggtggtgctgtcagcatgcagtccctactttgctgtaagtgttaccaaattcatagtttcggaaaactctgttaacactaaaaatacacttttttcagaccttactacaagaacagtacgacaaacatcccatctttatactcaaggatgtcaagtaccaagagctgcgcgccatgatggactacatgtaccgcggcgaggtcaatatctcgcaggatcagctggccgctctgctcaaggccgccgaatcgcttcagatcaagggcctttcggacaatcgcactggcggcggagtagctcccaagccagagtcctccggccatcatcgcggcggtaagctgagcggtgcctacacactggagcaaactaagcgggctcgactggccaccggcggagcgatggatacgtctggcgatgtgtccggttcgcgcgagggctcctcgagtccgtcgcgtcgtcgccgaaaagtccgacgtcgcagcatggagaatggtgagttgtcaagcgattaggattatcttacatatttgccgaatataaaaaaaagttccaatgcgggaatgttcttcaaacgaaattagcgttaatcaaaaatcttcaatttggcacaattaataaattgaaattgctttgctaataatatatttatgcaacacaacaaaatttcctcctaagtacaaacttatttattaaaattgttcttatttttttgcagatgcccacgacaactcaaactcgtccgtgttacaagccgccgcctcgaatcagtcaatcctccagcagacaggggccggtttggccgtctccgctttggtcaccacccagttgtccagcggaccggcagccggaaccagcagccaagcgtcgtcgacccaacaacagcagccattgaccagcaccaacgttaccaaaaagactgaaagcgctaaactaacatcctcgacagccgccccagcgagcggagcatctgcgtcagcggctgtacaacaggcccatctgcatcagcagcaggcgcagaccacaagcgatgccattaacaccgagaatgtacaagcccagagccaaggtggcgcccaaggcgtccaaggcgatgacgaggacattgatgagggtagtgccgttggcggaccaaactcggccaccggacccaatcccgcctccgcctctgcatccgccgtccatgccggagttgtggtaaagcagctggccagcgttgtggacaaatcgtcgtcgaatcacaaacataagatcaaagacaacagcgtgtcatcagtgggctccgaaatggttattgaacccaaagccgaatacgatgacgatgcgcacgatgagaatgttgaggatttgacactggacgaggaggacatgacaatggaggagctggaccagacggccggcaccagccagggtggcgaaggatctagtcaaagtgagtttgcattctaatcttcttgtttccttacaactaatggttggtttttttcaaatagcatatgcaacatggcagcacgacagatctcaggatgaacttggactaatggcacaggatgcacagcaacgggatccccaaggtgagtgtttgttgcctctgaaatcgataatatgagctatgaacaaatgaaaaagcaaaaagtatagcttagcctagaagtattagatgagatgttttttcgaatcagcgagcacgacaaacaacaagcttaaattcaaatgcagattaaagattgaaatccaacttttcaaggtcacaactccatttttttcacacaaacatttaaatatacaaatttatttttgcccattttaatgtacactacaacaaaagtcgtgctccgaaaaaaagctctaaaacgttgaagaagaaaaaagatgaaaaagtcgtagaatttgttcaaatatgattttcaacaagatagcagacgaaaaaagcaagcaacaagaaaaagtacaaatacaaacccaaaataacaagatttgtgagcgagagtttggcgcagagaaaaaaaaaacaatatgaaaaacagcaaaattaataacgaagagcaacaatttacgactcttatttgagtttttttttaatgagagcatttgaaatgctggttttgataattttttgtttttgcctgcgtcgctcatttcgccacagataaattaacccgaaacaagaataatttgtgcaagttgaaagtattacttaaaaactctttctttacttaatatgattttttacgaaactaatatttttttaattatgacacacataattcgtataactagtaatctttttttgtacatatctattataattaatttttaacacacacacacacttttgaaaagaaaatgagaaacatttaccactcacacaccacaaacatatataattgctatataccacaaaacccaaccaccaaccatcccctaacattctcattttatcattatctatatatatgtatgattccatgtatgatcatttgttgttgaattttcgtaatacgtttcattacaattggtgtttgattaactcttaattttgctttattttatcttaccgtatatataaatcgcataattctacattcccaacatttttagttgctcgccctatctatcttccttccccacctgtattcccctctttccgacattatgccgttagctgcagagtaatgaaacaggaaatataaattgaaagtatttttcataataattcataaaccatggtcacactgactcacccacaaacacacaaccacccacactgcagctttgacctaggcagaaatctcgaagaaatgcccttatcttttaagttagcgtttaaacttacgtatcaacagtgttctatttgtgtgcgttgtgatctctctcgctcgctattttcccctctgtaagctgtttgtgtgcgtgtgtcattgtgtgtatagtgcgtgtgtgtgagtgtgcagggctccgtccacatgtattttcccttcacaaagaaagctctctcacagtacagtcgcgtcaaaagattgcaaagtttggccacacttccagcatttctagcaaaactcgattatgtttgttcgccttaactttgtttgcattttcaaagcatatcacaccacacccgagaactttcgcaaacaaacacatttaatctttcatttgtcatactatactttgtgccattccattttgattttcctctactttagaactctcagcgcgtgctaatgttttttacacatattttttactttacatattattacgaaaatacgcatgcagttttaaattgtattttagtactatctctatatatacatatatattttgctttattttggttgacgggactttttttgattgtttatttttcttacggatttgtttttagttttaaagctagattgtaagcttttccgatgcaagtaacgcgcgcgaaactttcttacgcgtttttacattttgtaagtttgggaattctttttcccatgacttcagatgtacgtcgttgttaaaaactttaaaaaaccctttattaagttaagtgaaaagtgaaaaaataagctagaggaccgcacggatggaacctggtactgaaggatcgccgcttttggaggaggaccagctgccgaaggtctcaagtcgttgccaaaacaaagcacgtaaccatccaagatggtgaggtacacttgcagctttgggtaacttgacgagatccaactgtagtcaaccatccaactgcgtcacggaaatctcaggtgcgtgcccaggtgagtatgctccgcccaacggtatcggttgggcgaagtgaaatacaagaatgaagtaaatttattattttaagttcatttttgtttgactccgaaaatatcctatcctatcgacccttcctttaatcctccaagtattaccaattatccgccttcccagatcaacattcatacctcatagaaaccaaaatcattttacagcgattccaggtaatgtgttatataaaaaaatatctacaagcgctctttcttcaaaaaaagaaaaaaaaaaaaaacaaaaaaaagagtcgatggacttccagggtaagctatagtgtaacttccagtctctactcttccgaattatttctaagtgtacaccttaaatttacattgtatatatatttttcttaaaatttcattttgcgtttggcgtttgtttgttttacaaaatagcttgaagcgttgccaaacaaacaccaaacaccgaaaaatacattctcgcaagaaattccaccgatccttacatacatatccatatagacaacactgcaacgttgcatttctacatttatcctgtttgcgaaatcaatgaaaagaaaaatcagaggaaaagaaaatgatgagtcactaaataacttagtaaattcatggatcgtttgatgttttttgttgaaagatccatttgtgcaagatatatgtggtatgaaaaactaggttatatattattagttttaaaacactttctataactgttccgaaggtatataatccatccacctttgatctttctgaagcaaaaaatcatggggtttccctaatcgtttcttgatggtcaataaaagcaagtaattcttaaaaagctttaaaagcttttccccccttctatgtttcactcttttggttaatctcttctgtgacaatcttgtttgcccaattaatttataaactctttgcttcgctgtgaggtatttaaaaagaatatcttattttaatgtacacgaaactgtggttcagcttctatatcctattctaaccaccctcttttacctgccctctctttctacgttcgttcttttaattgttaatcagaaagaacaacaatgcccgaagcattcgttcaagttcaaggtcggctaaattataatgtgtttctatgtgtgtgaggttgtgaattttttctttaatcagcattgttcacatgaacgcgcggggtgggtgtgatgaagcggtaatattaatgtttccttcgcgcttgctatttttaaaattttgttctgcatccgtgtaaagtcaataacgatacgatgcgattctgcttgggcaattaaagctaatggttgcataaataatcaagtttgggatttttcgatgagaatttcttcacacgcagaaagtttttgactggtgtgtgagatagtggctcgcaaaccagctttattcgcgatactttagatagagtgcgtcattatgacgggaatttataatcttgcatgacttgaggttgtataaccaaagtatccgttggtagagagagtcgttattagggtcttgatttcacttgattcaatgctgcatcacaactgttgggttactggaaacttcttttgcttaaatgcttcgcactatttgcacattagtaatatgatagaagactagtgtagtagatagatagattagatagttgcctgatgacctgattttaccaaaataaattgaaaatttcgctttcaacgccaaccccctcatatccctccctatttctggttttggcccagttgaaagctgttcgcatggccttgacccaatttgcacaggcacattgcatacatacgcaaaacaggcaaagtcgccagataatatttttgttatttttttgtgtaacctgcaatgggcccaaagcttttatcacatcacgcaaacctcaagcgcaaaaacaaattatttacttgcagtccttgctttttgtttcgtttatgtgtgtgaatgttttgggggaaatttaaacgtttttatatatgtatccttggatccgcattttaatatagtttatgtgcaagaatttattctcaccttaagttggttgtagttggattatgtatcttatttgtacttcttaacctctcttgcgctcattccttttccatatttgttattatccttgaatttagattagatatatcgaatgataggacagaatagagctttttttcttcgtcaaaaacggcttaaagtagaattaaactggacttttgtatataaagcataaacaaatctagaaaacatttaacctaaataaaaacttaattaggaaaagggtttttaagtttgttggattgttaatgcttctgtgttgcgtgtcgcttaattaatgtgctgctttgtgaactttattcaaaaacgattttttttaaatcgatgaaaggatttgaaagtggaaaattttcttaaactacaatgcaaaagtataacaaaatttggatttaaatgtatttccttctagaagctaatgtttgtcagtgagaggttttgcatacacagtttgttctttcatttgtttttggtttcggagtcaatttctctgtgtctcaatctcaaaactctctgtcccctattcgcatttgaaatattggtccattggttgcagactcaatggttgtgcccaaaatcaccgcggtgcgcggtagctcgaagcgtctggccagaagaaaggctaccctagccatcgctacggcgatggccacttccgccagtgcaacgcacatgatgtccaggcgtaagcgcacctcttcatcgtgcaggtaaattttgataggcggattggcgcttggattctttcatgatgaatctgtaacccaaaaaagccgatgatgaaatttccgtttcctctagaaatgccagcagcggtggaaatgctccctccacatccacaagcgcatcatcggctaccaccgcatccatatcgaaatcgaaatgcaaatcgtcagatgcggcgagtgctcccttcgtgtgccagacgtgtggacgtcgctaccaagtccttggcactttgaggcgtcacatgcgcaaagagtgcaatcagccgaagaagtatgtgtgccgcatgtgcgaacgtcgtttccactataatttcaagctgcaagatcactactactatgtgcacaagggcgtccaaaagagggaatagttcagtttataaggataaaagtgtaaccgatgtaaaacacccgtactttaaactcatattagaacacaacacacactcaacataaaactggaataaacttgggttagattttcaatctgtggttcttctgtatctcagatcgtggctaagtgcaagttgagtggaccaggtggagtagttagaagtgcattcgattgtgtgattgaagggatttcagtgttgccagcaaactattttatgtacctaatagacaagacaaacaattcatgtagacgcgagatttaattatttaagaattacaattatcgataacctacctagagacaattttgtttagtgcatttcttaattgggcatgatgtgtcatgacatgactcgtagatgtagactgaatgttagatgttgtagtttagctaatagacttcaatgagtattacattacattctctgatcattggaaactacattgcttaaaactgggaatttgagagtaatctttagcgattgatctagaaattgataaaatttgtaaaacattttcaaactatggctaaacaaaaataattagggaaaatgtacgctattgctataagtatgtttattattccagacagtttcatttcgttaataagtcgcatagacagtcaggtttgatcttgatagtgaagttggcaacactgtgattttcgaagtttgtttgtttgaaatataaagctttgtctgtcgattgctcgctttttccattctgttctctgttttcctggcttttatgtgttttgtttctctatctcctgtttgctcaaacatttaattgcaggtctgctcgaattgagtttgaatcaaatgttttactatgacagcgaaatgccgccgccaccgataccgccacccgtggtcgttgaatcgccgccagcttcgccaccacttgcagtggttacacctgtggtgcaactgcgacgtggaaagctgcgatcgcggagaaggaaggcggcaaacagtagtaacagcaccacgaagaagagcattccaccgccaacggtgcggagcagctcggcggcgaatctggcgagaaacgcggatatgcgggacgatggcaagctccagtgtccacagtgtccgaacgcctacaccaggttatccgcattgaaacggcacctggagttcgagtgcggtatgctggagaacttccggtgtcaggtttgcgatgctggatttaagcgcaaggactcgcttaatcggcattgcaaggtcaagaagcacaataccaaatatttgttttagactgatcaaaaaagccattaaaaacgttaagataacgatgccaatttatgaattaccctgctgggaactcttttcttcaattttgactcgacttctttctcgcgtgtcccatgatcaaccaccatataaagccatatgatatctgtatatgttatatatttttgcttgctcaaaaacagatccacacacttacattttctctccatataagctcccttttttcataaatcacacacccaaacaaacaacacaccaacaaaggggcaatcctttttctcgtgatgaggtatctgtcttttctctcaatcccaacccacctttcaacgtcttgcgccacctgagattaatctaatctttaacctaacgcccgctctccttcccttttattttgccatgctgctgtgcaattgtttttttttatacctatatgcctgtttgaaatttgtttttgtttaatgccgagcagaaattaatttattaatttaccacgaaacaaaaataataatgctttcgaaactaatctggcattttgaaaaactaaaaaataacaaattgcttgttttgccttgaaaaataaacaaactaaacgaaaccaaatcttaaccttcgataatgaagtattgaacgcatgatttaccaaaaaaaaaaaaaataacgtttaattaacgttttaaaaacagaaaatcgaaaggaaaattatagaaaacagaattcgaaactgagaaaatatgaaaataccaaacgaaaaacaaaaacaaatttcaggcctgcagctgatagacgactcatcctcaagccaacagaatcatctaaatggcagcaagctggagctgatggatggcagcagcgatgactatcaccagggatcgggatccttgcatcacttccatgcaccgcaatttgatcattttcaaggattattagccggcggaaatagtgtagttggcggagcaggaaatgggggtcaggaggagagctttacgtgcccacagtgttatagaacttatcgaaggcacggaaccttgcggcggcacctgcgccaggagtgcggcaagggaaagagcatggtgtgctccgtctgcggtcatcgcacgaagcgggcagatcatctgcgccagcatgtacgaaaaaagcatccggagatagccatgcgatcgttgtttaagcgtcagcaaagagctgcagctgcggcagcctcagccgtcgaaggagaggatcagaagcccgagacggaaattgtagatctggtggacatgctggacgatggatctgtggccgctgcggatgaggatcatcagcacgcctatctagtcgaagatgacgatgaggatgaactcccgcagcatcagcaatcacaattgacaacggaggagtcgaccaccagtaactattaccggcagcaactgcggcagcaggcccttctacagcaggctcttcagcaagtggcagctgcagctgcagtggtggccagcggcaactccactacctccaccactgaactgcttaacggggagggattgtaggagggatagcaatttgaactgaggggcgggttctcctctctacctccatttcgagtaaaagacgcgtaaagaacgctatccatcctgtccaatgaaaatctctactactaactaaattaaccaaagagcagcggttgaactttgaccttttggcttgcaaaattttttatttttcctgcatttatatgatgtttaatacatttatttggctgtcgcacaaccaaaatatatgagtatttctttttccagcgctaaatcaaaaagttgagaactaatcaaataatattacaaaaaaaaagtatatatatatattttgtataaaataaaaaaaaaggagaaagctattaactaaaaataaatgcaacgttttttataaaccaaaccacaacaaatgcgtttttcaattgatgcatgaaacgaatacgaaaaagttgagacacagtttcaattgtaatttaatttcttgataattttttggtaaataacattttctcgaacatttcgttggtgccaaagttgattatttttgtgtttacctttaagtttaacttaagttttaactgcggcaaaatgtatatccatgtaatggcggcgtcggttaacctaatccacattatatattacataatacaaagcgtagttataagccaaacaaccaacaacacactgtaaaaaatgatacccaaccaaaccccaatcaaaacaaagaaaaaaaaaatgaaagaaaaaataatagaacagcgaggacacaacacgaacatatccacacaacaccacccgccatatctctatttctcaactcaactactccttactttgactctctctctctctctgtactctctgtaagaatcgttaaacagtctcagcaaatcttagacaaaaacccaatcacaattcttacagatttaaggacgctttactgtaattatgccacggcagttatagcagcggccagtgcggccagcaagaagccggcggagcatcagaccgcagccagcagcacagcaaaccaccagaaccagaacctcaaccatcagaacttgctgcagcagcatcacagcaacagcagtagcaatagcaactgtggtcctgctgctgagatatgcgagccagaagtaacgatacgcagaatgttcaaatgtggaaactctggccaggcggaggccattgtgaaccacttgcaaatgaccggtcaacagcaccagcagctccattgcaacgtcagcaactgcagtggttgtcacatgtctgcggcagcagcctcctttcagttggccaatctgctgaatagcggcatacgttcgtcgtctaccagcaaaccgcaacgtaatcacatttctgccagcggcaacacaagcagcagcagcaacgccaacaccaacaacaacagtagcggcaatagcagcttatccttggcggccaaaaagaccagtgttcaatttcattgcgagttctgcaactttagctgttcgtggcgatacgatttgaagttgcaccttaggcagaagcacggcattcatcagctgaagaaagtctaggatttaggcggaatgtgattccaagatcgagatcaaattggctgttatacatctacataaaacatgcttattctagttaagaaacgttgtttaatctcgctctattgttctgtgtctctgctaagtcaatatctgaagttaaatatatgtgtacgaatatttattgaaatgaaagttgattttttatcaccgatataaatttttaaataatgtattttttttagagcgaatgatgccagaattaccataacgtttggagaccaacaacaccagacctcaagtacaacccctttaggaaaaaatattgaaaaaaaaaaaaacaaaatgtttgataaaaattcaattgtataatttttaaaacaaagttttaaacttttaggtttttattaaatttataaggtttaacctttaaaagttttgtttacaatttctaacaattaaatctgataagtatttgaaattcgttatttaataggtatttttaatcttattttatgtatttttgttatagaaagtattttaaatgtatttattttaattattgttttccttgaaaattgtttagcgtagcctcttcagtagtttatgttgataatgaattagtatcattatgtaaacttgattttagacattgaattgtataatttgtattagttttccttcaacttctcaaaacaaatgcaacaaaattttacatttaagtttagttttaagttaagttctcataaacaaaattgaaagcgaacatttgagtcttgtttatgccaatcgattaccattaagcctaattcttggaccttgtttatgatttttcacacatgtttctttttattttcttttcattttcatttcatacaacccccacaaaacatcaaaaccaaaaaccgatcaaatcgaatcgaaacgactttaatcttcccaaatcacaaataatcaaacccgaaaccaccgacatcatcaccaaaaccacacaaatacacatcattcacatcacatcataacacaccacaccactaactaccgatcgccgggattcgatttggttcgaacccaccagacctgaagtacgactacaagcacagcatttttggcagcgatgatgcggatcaggatcaatacaaggagcgtttccactgcgccgtctgcaacaagagttatctccgcaagcgccatctgcagcgccatatgcgcgatgaatgcattggcattccgccacgattcaattgcgagttttgcagctctcgattccgtcgcaagtaccacatggtgcgccatttggtctccaagcacggtattccgccggcaattgcacagatgacaacgggcagtggttcgcgttcctctatcagcggctcgctagacctaaagtctggcggcggattagctggtcttcagcagatgggtggtggcggcgccggaggcggcggctctaccggtgattgtggggcaagtgtgggcagtgctggatcccataatggctgcgagagtcccataccagagaacctgtcgctgcgcaaggagaactacgaaaacgagaatctttcgggctcgcggtgcacttcgccactgccaccgcacattatgccgatacccacgtatgggttgacaggtgccatcactgcgatctctgccgcagcagccgtggtcgaggagcaagcagcggcagcagcagcagctgcggccatcgctgaggctcaagccaagaacaacaatgaatccggaggaggaagatccgaagtcgatgacgaagacgagacattggccgcacaagccgaggctgtcgcagctctcggcatcaagccggaaccggtgacgcccagcaaggtgcagcacctgatgaacgaggagtggaacatgaagctgggcctacagatcatatcgaattcattgctcaaggagcgattgatgaacactatgccatttgcttataacaacaactaaagctctttctagctatttatattatttattgaaacgtaaagaatctctcaatttttttaatttgtcaagagccaaggctctgcgtatttgcatactgtattcatacgttttcgccccccaagcccaccccttttttacactatgtatttgccctgtacgagaatctcaaacgtagacattccattttgaagataattttaattatgtatttttttgagtcgcccgtagacaaaatgtgtcttaaaatttgtcaatattacagtgttgaatcatccaacggatctttcctaagacgaacgataactaactcgaaacgtcacgaatttctaaacatataagacgctttcagcatgacagggatgggattactttacccaaaaagagtccagcatctaaactatttgttagtcatttaagatgaaaccaaaaaaaagtcaagagagaatatcaaatctttttactacaagttgagtaatttcaatttgatttaatccaaaaaaatgcaaaatactcaactggccacctaacttttctcttgcaaaatggaggaagccatgggaggttgatttattaaatgtaacgcacttattccaaatgatatgccaccaaaatgtacgacctagttaagttattactatactatacatttctagcatgtatacttaattttaaagcctaatttatccaaagtcaaaacgaaacagaaatgagaattatattttaattgaataaattacgaaaacaccaaatacacaaaaaatatactatatttatgtattcaattgcagcaatcgaaagttttatttttgtatagccttttctcattcccaatgtaccatcgtgtcaccacctcatcctttgttcataccccacatgatgatccatcgatgttttcgttttcgtgtatgttttttcttttggttttcatcccgccctcgttcagtgttgtcttttttttttcatccgaaaattgtgcgaatttttcactaacctatttttattactaaatttcttttagatgtctctacaaaccaaactgttgtactaccccactactccatctaccactactactccaatatctactacctactatcacatactactatctatgaagccgaccgaaccgtatccgtatcttgtcctggaaaactcaactgcctgccgcagcgcaacgatctgcaagaaacaaagtctgtcacagtattatataccatacattttttcttatatatacttatgatatatatctttgttctgtgtaaaatcttgcctcgaattgtttttgtctgggtttcaacttgatctacaatacatacacgtacatccggtgcgatatagtgcgtttcgggatggcattacagtaaagtatataactaatttgtatcgattttaatacctatatttgcttgaagtaatgttccgatgcgcactatatcgccctatataagcatgttctcagcatagttcgtgtctattttccactttcttgcttgggttctctctcatgtgtctgctttttgtgtctcaaatgcgtgtgcgttttgtggcgagtgtatgggcgtgtgcgtccttggagctttttgtgtggtttttccaattcctagtcttaatctttctctatttgataatatctttgtgtctccttcaatgaaatacttgcaaaaccaaaataaattacttaacacttgatgttttttcttacacagacttttttctagtatctaaggcggttcaacttgggtttattacgaataatatacttatatatattaattatgggctaaacttttctaattctaagaaatctcgatgtttacaatatttttttttattttcccgtcaaaatagtttaaaattttttgtttttggaatgcttgaaatgttttttaagtcgttaattattatgaatttttatttaatatttatatatatatatatatgattttctcctgattttttttgtagcttagcaaatttgacttgctcaaaaagtacagaaatcgaaatgtgtaaagcagagtgtccaatacagagatatcaaatatacagtcagtcatacacgatcaggaaacgtatcattctatatcaacaatccaaccaaattcaactcgatcactttcacccactcacttacccatccgtcttcgtgtgccccaatctccgccccgcacccgcatctacattgcagatttcgtactaacctggtatcagcacgcctgcgatcagtgcggcaagtcgtacaagactcgcaagagtctcagtcgccatcgacggttcgagtgccgcttcaccaccgaaagacccatcttccagtgccccagctgcaattatgcggccaagaggagcgacaacctaaccaagcacatcaagacccattttgccaaaatgaaaaaggacttcctgccgctggcctttcagatgcaggcctccacgggaatagccaccaaatgggaggccaccgcatagggaggtggccccaaaaacaaaacaaaaaaaaaacgccaatcacattatctccattattaatccagtccttcaagttcagttctatacaaattgagttcttaaaacaaaggccaaccaaccaggacagactgcaatgatctactgagctcgcgcaggagcacactttatgcttatcgaacgaacggcaaagagaaaaacaaattttagctttcacttcgtgttatatgtatggtaaacacgatttgcataaatttggttaatttatgtaaatggcatacaaaggcgggcagaaagcaaccaacctgccctgcttaaaattcaaatcattgcagtcgacttgtgtgttggttcttatttaacattcgtagtttagacctaagttaagcgcaaaaattttcgcaatcataacttatgcttcagctagtctggctttttcctaagttaatttaagtttaaaattggtagtctttagtttatagtccagtaagccaaaaagtccaaagagaaacgtgaacgaaactaagtcagggaggggatgggatgaactgctgagagcagttcggggtcagcgacccgcacactttgcattcctaagaaaagaaaccaaaaaaaccaaaaaccaaaagacaaaaagtgaaacatttttcgatatagtctagtttgtagttaagagaggccatgccaaatcagcgaaattccaaatgaaatgaaatgaaaaaataattaaatcaactaacactaaacttttgtggattaagttcataaaatctaagttcctttgctagctaggattatgactaactaactgatagacaaggatctcaaatgaatacaaatgaaacgcaaccaacagtacaagtacaacaaacaaacaattaactaaaactattaactaaacagccgcaaacacatagttcaaatgtataacacacatatatttacagagcagccaatgaagaaaggaataacttagagcccaagtcttaagcagttactatatattttgtgaaccgttgatgaatgtgaatcgaattttgtgaacacacacacaggagtaaaacaagcgaaaatgatatttagctagcgatctaagtaatttgaacttaaacctatatttatatttataagcaaaatgccactatttttatatgtcagagccgccattactaagtattttttatatgcatatatataaatatgaatatttttgtaattcgaataaatttgtattgatcaagaaaacgtttgtataactaatgggtcgctctctcctcgtctctctgccgtccagtttactaaacatgtttcattgcagaccacccatgtcaagcatcatcatcatatgcatcaacttcagtcaagatcagtcatcatcccacagcgttcattcaaaccaaatcaatacaaaaaaaaaaaaaagaaatcaataatgaaaaaagcaaacccagcaaaaaataaaatcaagccaatctgcaactactgctgctagctctgctcacgcttcaccatgccacgcccacacaaaatacaaaaaaaaaaaaattaaatcaagcaaaccaccccgcaacacacactaactgtaaatatcaccaatgtattactattactatttttttaatttataatactcagtgcaaaagttaacgttaccaaattcattctatttacgaaaataattgtttacgaactctaaaattgtttttcctactgaaatcttgttactttttcaaaacgaaatatgtgctctagttgtgtaagatttgtttatttttttttttttttttgcccaatccaatggaacatgccgacactgatgaaatatatatctctctttcttctccttctatacaaatgctaaacatctaatttgtagctccaagcagctatgtctccaactcgagccaaactccaccgccaattgggggctcatcatcggccagttcggcgcaagccctgatccgcgactattggtacgagctcaagttctccgacctattcaagttcataaatccggatggacgttaccagtgccccagattcaattgcctgaagagctacaaggacgccagctcgctgcaacgacatatcaggtgagtagtatccatgatgtggatatacattataatcgagattttctcctcgatctgtggtcggtcgtctgtctgatgatattgtgatgatatgtgatactgatacctgtctatctctgcctctctctctctctctctctctatatatatttatgcgatgactccgtataccccagatatgaatgtggtggacagaaaaaatttcgctgtctgatgtgcggcaaagcattttcacaaagctcccacctaaagcgacaccttgagagcggtgtctgtgtcaaatattacttatgagataatgttttctttaaaatcaaatagaataagcgttatcccaataggcagaagatcaactgatgatcgaaatgatgatcatgaaaatgaagatgtagaacatgaacaagattatatacacgacacgtatattacacacacacacacacacaaacaaacacacgcaatacagcaagaggataacaaacaatgagaacaaaaggatatatagaacaattagataaaaccaagaacaattacaaataacaaacaacaaaacgaatttattggatgccacatcatttataaaggaaatggataaaaaaaaaaaaccaaccaatctatatatatatagtatatatgatgagaattattgttgaaactgagcattaatgaaacaaacggaatacttagttaatgaacaagtgaaaacgaaatatttaacaagctagaacaacaatatatacacatatattaaatgcagtcagtgaacattttataggattttagtaaaatgtaaaaccacataaaaacctaagaaaaccaacaaaaaaaaaaaaagaaactaaactaagtaatagaacagagaggcaaacaaacaaaagttaaagaacaaaacataaaaaaattaaagaaaaccgaaaacagaaaacaaaacatacacgcaaggaagctaagagcaaacaattttagtcaaactaaccaaaactacgtaattttagttaaaatatataaataatatagaaactaaaccaagcaaaacttagtgaaattaacaaatgagagaaatgcatataatacaatataacaaccgacaaaaggaaagagaacagagcagaacagaaccgaaacagaacaaaattaacagaaatgcatataacaaaacgtactgtgtttatttgttgccaaatatatatctattatatatatttctaatatataatataattaatacgattcttgttatgccacacaaccacgaaattaactaaacctgaaatgcgagtggatgacatcaaaaacaataagagcagagcatgaagatcatcaaaagataactaaatgttattgtttaagttgttattatgccaggtacatagacacaccaacacacacgctgcttacgtacagtgaaacttctggatgaatgaaaccagtgtccagatatagaggccccactgtatgtagccagtaaataatacactttaagtctcatagagtcaactttgtttaggcatcacgagtgtttagcagaggcagatggtcgaaagggattgcaggaagatttgttacatggttccaagaacaaaaaatagtaaagagagtttatatacatatatacaaaacatatacatatgaggaaacaaccacatctacataaaaatatacacatatagaactatatataatgctatattagcaaaaatgttgtctgttgaacaaagagaggatattaaggaaacggaaattgttagtcagtgacgaggattagatgttggtaacatgtactcacatcgccaaaagtaattgtatttgtatgattaggtgcgtgcctgtgtgtgtgtgtgtgtgtgggtgtgggtgtgtgcgtagccttgtgcgagtgtgtgtgccaatcggtcaaaggattttttaccagagaaaaagaaaacaaaaaataaataaagaaatagaacattttgtgccattagaaattctccaccaaaactgaaagtaaaattcaatgctgctttagtgacgatgacgaagacgatgaagccatagaagagatcgaacaatatactcatacatgttatatgtatatgtgaaccaatatgatttgttgttgcattcgaagacgaaacacgattctgttgacaagtgtaatttatagtacatttttgttgtgagttcaaagattgagtctagtgaaatttttgacggcagaagtgacaactaaatgctacgagagtgccattatcaaacaaatttttaatatatatatatataaatgataaattattgaaattatacggaatacatatatatatatatatataccctaagcaggaggcaactaaacataatttctagttaggaacgcagtaaggaaagtgaaaggagcgcagaaaatatattgtttgttgcttgttgattgttaatttttgggttgcagaacataacacctaagcatatatgcaagatacatgtatatgccagtacaataaacaaataaaataaaaatacagaatatagagaacaaacaaagcagcaatagaaacctatatgaactcgaatgaactagacaaattatacacagtataaaggaagctaaaaacgaatgaaaatcaattatagtgaagtactaactgcagtttaagaccgatttgacactaatccaaaacacgcaactgaccgatctgcctaaagaaattgattaattgttagttgaattgaaaagtataataattcattttggcaactatccttgcagcattcggtcggtccgatttgtgaatttagtgtcaattatcggaattagcacatgttcacctcctcccctcccccgtaaataactaaaaccaaaggcaaatttttgattgatttatttcaatttgtttacaaaattttgccacaagtgcaatacttcgaaagtttgttaacaatttgtcttgtgcggctatttgccaaagtcaatttttgaaatgaatagtctaaagaaccattttgtaacccaaataaaaaaaaaaacccaacctccaagcgaacaaggcaaattgtgaaactcttcgaaggaatagaagaaatattgcttttaaattagtaaaaatttaattgagaattattcgctttacttgtatgaataatgttttttgttaaactaatttactaagaccttgttgcgagtagctaaattattattattatttttgctgttaaagtttagataaagggaaatgaaacatggaatgtttcgcaataacttttttgttaaatcgtttttctttaaattagttataacactgttttaatattattattacgtatacaaaaatatatcgtttcacattaatttaaccagagaactctttatgttttaacttttgttatattgttaattaatatttattgactaagagcagaaaaccgtttgcaaaaaaaccataaaaaaattagagttaactatgtaagttacaaaataatgaacaaaatatactccaaagaaaccaaccaaaaatatatatatatatatacacacatatatacaaggacatatacatataccaatatatatatattttagacaaaaactgaacaaagcaaaaacagcaaacagacaagaaaacgttttagtaaaagtgtatttggaacaaagaaattgccacaacagtctaaaaggattatatatatataatcaaaccaaaaacaataattaccagaacaagaacaaccgtaagaaaagtttaattgtaacgaaagttgtttattttttgtagcgtaatatttaacaacaatgaaaccgagtaaattgataaatgatatatacatatatttattgttaacgaaaccacggataaggcgaaattatgaaacaaatttatacaacatgaataataagaaaaacgtaaacagagaaaaagcaagaaaaactttcattgacgaagctgatattgttagtaccttaaaaccatggaataaaacaaaaaccaattaataattattaataattataataacaagcggtaggattaaacaatgagaaaaacacaaaaaataagatttgatgtaaccaaaaccaagctaaggccatttgagattatgttttaatttttcgagaaaccatttaaccccaaaaattgttatttttgcgaaaactgaacaaatggcattatatatggaatcgtttatatacacattgtttgaagaaagtggtaacagaaaaaccaacaacaagaataataaagattgatattgaaatgttgaaaccccaaaaaaaaaaacacagaatcaaggaccttaataattgttactgggcattgtgggggtcgccattccttgtttgccgcaactaatccatttccctacttacagatgaactatctcgaagggtcaagagtcaggtcaatggtttgttcctaatgaaaattgaaaccattgctaccgttacgccatagtagacggtactacctgcaactgtgggccaagtcattgcctcgaattaaaagcaacttctagattatattttcaattaaaacaaaaaaaaaaaaaaaaaaaattatttaaaaaaaaaaaagagaatgaatggtaagattggttatctcattttgttctagcttagattgtaactttcctctagctaccgatgtaactttctgctacagtaactatctatcgcttcgcaattgaactggaagttggttatacaagaacatgcatacatatatcatacacacagcattcttcatcatcagtccccatgtgatttttgtttaactatgaattcgcgcccattaaatgtgcatgtattgtatataagaaattcgctaacctatttcgtttctttctcgcaactcttttagaaaactcctggacgatatccgtgaaatcggtcacctcgctgaacaatgtctcgccatcgaacaactcgcacatttgtccacgctgcgagaaggcctacacgtacaaaaagaatctctccaggcatcttcgatacgagtgtggtcagctgcccacggagaagtgccgacattgttcctacgtggcgcgctacaagcatagtcttaatatgcacgtcaagacgcagcatccggagcaaatcagtgatacattcgcgggttcttcgggatctagcgatggggtcagggatagacggggccgatcactagttcgtggtctcttcgattcggctaagggggaaaagttccttgattaccttaataactagtatttagatccgatctcgggcgaaggtaagttctgctggaagggggggggggttactgaagagagtaagagaccagagaccacttctaatgataataaaaatgccttttgtaaccaaaattgaaacgtgtcattattgaattcttctgtagtccttaagttagttaagcctttttaggggcgcggtttttattcctttttttggctgtggtattttgtttgtccttggttatcatttaattgtgctgtacagcaaacacaacccaccaacacacacctatacataaagctttaaatttaagaaaatagcttaagaactaaaacgaaaacggaacccgaaatttgtttgcttgttttcatcaactttagttgtattcaaaaaaaaaaaaaaaaaaagttcaaaaggatactattagtgacaggagctgagcttaactacttccactaagcggtaaactcttgcaacccaacctcttactaaccactattcgttcaactctgcagcatccaagcaggacaagggcgagcagaccgaaggagcacaggatgaattcgaactggacgactgtttgctggagagcaacgacatagtcatcacccagaacaaggatggattcgtgttgcacgtaaagaagctgggtaacattacggctgccaagctggaggagaaccaggcggtggcacaacaacagggccaagcggcagtgactgtcaccgggccggctggacaacccacgcccacaatcacggaactcttgaatgccgccgccgcttcgcactcggaacccaaacccacactgaccactctgaccagtacgcccattaaattgccgtcatcggaatgcggtaagtccatatttgtaatagacaagcaaagctagaaaagtgacacaatatttatacaaatgaatgatagtttttataaattgaaaaactagagttttcttaaagttaaattgaaaatttggaaataaataaatgtaatatattctctctataaaatacgttaataaacgattgtattgtattgtattatgtattatgattttaactaataagaccttttgtacttttttccaattccagaacttatcaacattaaaaagattataccggcaaccacaacaattgccacacatcatccgcacacgagttcgacaatcatacatccccatcacatcattcagcatgtgtcccaggaaccgcaccaccaggagcaccatcagcagcatcagactattcacattgaggaggtgccgcagacttcgcaacagcaccaccagcagcagcatcaccaccagcttcagacggtccaaccgacccacacccaagtacaaagcataatcacagctcatccgggccagactataaacctggtgggtctgcgcaatgtgcagttggccgattcgaagcccatagcctcgaggatacgatattctcgtggaaagatcatcgggccgacggtacaaaacctgcagatcgtggaaacccatgagcccatccagcatcaacatcacgagctgtcggatggcaccaagtatgagattagcgagattgatctgaacaatcccaatgcatcggcggcaatcataagtgacttagtgaagtatgccgagatcgatgatatcgagctgcccgacggcactaagattggcatcggctttgcgccctcggagattactgagcatatgcagacctccggcggagagacgcacatcactacaattgagcacgagccgcaggaactgcaaacggtccatcagcacgaacagacgcagcagacgcatcacatacatgccggccaactgcagacgcatcatatccagaccgtggtgcagtccagcagtggccagcagcagcacgatcagcagcagcatcatcagcaccatagcattgagctgcaggacgacgatggtgtggagacaatcacacccgaagagcttggtatgcacgattcgagcaagagctacaccattctcaccactcgtcccatgaaggaggagtcggagcacgatccttcgggcatgacctacgaactgtcgctgagcgactcgtctctgggtccatgcgatgatccagagtcgcggtatgtgtgccgccattgcggaaagaaatatcgctggaagtcgacgctgcgtcgccacgagaacgtcgagtgtggtggcaaggagccgtgtcatccgtgcccgtactgcagctacaaggccaagcagcggggtaatctcggagtgcatgtgcgcaaacatcatccggagaagccgcagctagagagcaagcgaggccgcaaggtctaggcgaaagttgggaggattgtgagtacacaactgttgggtgtaaagaagtaaccatttttgaggttaagaccagtttcattattattacaactattttgtatcattttataaacgtgtacaccctattaagcttaaagttcttatttgttgattatttttattaagtttataagttttgacttccactcggttctcaaaggttcaatttttcaaacaaacaagcattgtgcgcactcaattacatttttatcaggctttaactttaatgtcttcatatttagtagaattggttatgtatgtcctttaattcatcgtaattttcaaaattacaaaaatcgaagccccaacaatgtcgacaaaatgaaaacaaaaactaatgtgcaagtattttcatggaaataacacaaaaaaaatataggatcaactatattaatggaaaatagattaacattaagaataattaaaaacttatttctgtatgtatgtgtgtgtgctctcaaaaaaatatgaaaatatatataaaaaatcttgattcaaatctaagttatgtagaaaaatcttaactgaagtcctgaaatttttttaattttttactgcaattcaacgttggtgcacataaatttcatgtaacctatttaaacaaaacctatcgacatacaaaaattgaagaaaattgtaaacttatctatattggaggcttgcaaaaataattttgtaagaatgcgttttcaaatctttatatatatatgatatatgaatagcattcaaaaaatatgagtgtaaggaagttatttttctgtaaattgcaaaaacttaacaatctactcgaacttagtaaaattgattgtacatcggaatagctgagtaaagtgtgaacattttgaaacatatttccgcagaaaaaataaaatataacaaaaatctaagcaaatgtattagaacaacaaatatacatacatattatgtctttttgcagttttttgtgtgtaaatcaattatttgattgaaattaaacatttattatgaatacttattctatagaaattatattttgaaaactagttgtaaaaacaaaaggtcaaaataaaatactataaaaaccacaaattcaaatttgaagccttgatctttgtgctaggtagaataatgttttgtaaaaagttcatactaacatatttctctttccaggtgaccgatgagacatcattcagccagagactgctccgagttagagttagctagctaacacttaagatcatcactttccctttccgagcatacctaatatatttctcttttcttttagattgaccctgggaccgggacgtggattggaactcgcgaatcctgtgccagacatccgcattgagctaaccttaagtaaaaacgtgccacatgccaaattgtaaagggaaacaattgccattccaatactttattattattaagagcccgaaatctaaacgttcgtttctgtatgccactaaaaagtaaccagacccgaattgaacccgaacctgaacctgaacctgaatccatattccccagccgtgtttatcgatgtgttcaagcaaaatcaaaacagcaactacaaaacccacccaagcagcactctccagctacagttcaattaatttagttacccactttttagttttttaaatttatttttaaaataaatatgtttacaccctgcactaattggccttaatttgctcaacgttttattgaaagagagagagagagagttttcttttatcttatcttattacctgtatatatgtttattaatttgtactctaattttgaatcatgccacgccatcctaacgcttacttccttactatgtttttatacacgtgtatattcatccattaaacgctttgactaatttatattatttgctttgcgcgtccacctcatccagctcatccccagccaactagccaactactccaatctcatttgtgtgtgtcactctatgttggttatctgcccagcttgatttaacagctatattcctaagtgttaagttggttttttttttcgattttaatgagttttttttgcagttgtccttgtgtccagtcaaaagtaattctatttatttttcgttcttcttttcttttgtttttcttttctcgtttttattttcatatgttgtgcgctgcccccaaacaaacaaataaactaaacaaactccacaaatacaacacaaatccacgcttgaaattgtgataaatgaaacgaaaccaaatgaaatgataacgtagatctgagtattacgcgtatagcgggactcacctggaacgaatggaatgcccgcctggccatgccactggtgaccctacgcgaaggtgtccagccgctggtctttcccaccgatctgtcggtggataagcagcagggagccgcaggtctgaccgccaaggatgtgaacgtcagtggccgaaagacgcccaccgatggggggggatgcaagagtgagccacgggctgcctcaacgcctgccaggacacacagcagtagcaatcacagcagcaatggaaatggcagtggaaagcccacaaagaccagtagcggtggaaaattgaatcatcttaccgaagaggaggccaccgccctgatgctgaaagccgtagccgagaaacaggcagccgcagcggccggcaccgagttgagtttcggtgaggatcaggccagctcggggaacgggaatagcagcgactatccggccactctgagtggagccgttacctttgcggatgttggcggcccagctggactatgccacatcaacatcctgaacagcatcagcgcaatgaacaatctgattagcggcagtacggcggctggcgttggcataaccaccggatcaggtcaatcgccctcaaatagtggccacaacaacagcgctggcggcggtagcagcgtgctgggcggtgcggacaacggtgctggacacccgtgtcccgtctgcgggagagtctacaagctgaagtcctcgctccgcaaccatcagaagtgggagtgcggcaaggagccgcagttccagtgcccattctgcgtctaccgggccaagcagaagatgcacattggccggcacatggaacgcatgcacaaggagaaattcaagctggaggatgtgaagaactttgccggatccagcggcttagatggcgacagcagtggagccacagcgacagcggcatccgtggtagcagctgcagctgcgctggtcagcggcgtggagttgcatccccacttctcgtagagaaaccaacactctattgaagaagacttgtataaaaagttaaagttgatcagttattagtgttgagaaaaggcgaccaactaaacgaacataatcagggataataaggacgaaagaaaattacaagaaaatatatatttaatcacacaccaagctctcgggaaaacggaatcagtgtgccaaattaagcttaaaacaaaacaaaagaaatcttaaaaaaaaaagcgaatgagtaaaaacaaaatgaaatagttttgtaagatgcctggatgtttcgaaaaagataatacttgttcgaatggaccgaaaacaatttgttgcaaagcacaaaaatttacgccatttcacataaaatatttttttgttattgttattaattgtttacacgagaccgatttgaaaatctataatttctatttttcatgcaaacagcaaagtgatcagtaaaatgattttacacaaaaacaattttagatattgcaacattccacaaatcgtaaaaatgaaagacaaatattgtacaatgaaacggttaagaattattcattaatagcataggcttagcatgaggaatataaatatatataaatatatatatatat

SEQ ID NO: 1349 - DNA, 2765 bp, DROSOPHILA
tttcattcggtttcgtgcgctcggggattttgtttggttctctgctctgtgcggcagatcgcgaggcaacgcgtgcggtttgctggctaaattctacatatacacattcaacatccgacggccgaagcggagctagaataggaaaaccaacctttgcagtgctaattatttacaacacaacacataactgctgacacactaaacaaaactgaaaaaagaaccaagggcgaaagctgtttattttgtttaggcacctaagtttggccaaattataatcaaaaaacgagtggcgaaaaaaacagcaagtcagagagagcgctcgacgttcggccccaaggtcgtgggcccaaacccccaggatccatttccaacaaccccatccaaccacccgagaaaccagaatggatgacgatcagcagttttgtttgcggtggaacaaccaccagagcacactgatcagcgtgttcgacacgttgctggagaacgagactctagtcgattgcacgctagccgccgagggcaaatttctcaaggcccacaaggtggtgctgtcagcatgcagtccctactttgctaccttactacaagaacagtacgacaaacatcccatctttatactcaaggatgtcaagtaccaagagctgcgcgccatgatggactacatgtaccgcggcgaggtcaatatctcgcaggatcagctggccgctctgctcaaggccgccgaatcgcttcagatcaagggcctttcggacaatcgcactggcggcggagtagctcccaagccagagtcctccggccatcatcgcggcggtaagctgagcggtgcctacacactggagcaaactaagcgggctcgactggccaccggcggagcgatggatacgtctggcgatgtgtccggttcgcgcgagggctcctcgagtccgtcgcgtcgtcgccgaaaagtccgacgtcgcagcatggagaatgatgcccacgacaactcaaactcgtccgtgttacaagccgccgcctcgaatcagtcaatcctccagcagacaggggccggtttggccgtctccgctttggtcaccacccagttgtccagcggaccggcagccggaaccagcagccaagcgtcgtcgacccaacaacagcagccattgaccagcaccaacgttaccaaaaagactgaaagcgctaaactaacatcctcgacagccgccccagcgagcggagcatctgcgtcagcggctgtacaacaggcccatctgcatcagcagcaggcgcagaccacaagcgatgccattaacaccgagaatgtacaagcccagagccaaggtggcgcccaaggcgtccaaggcgatgacgaggacattgatgagggtagtgccgttggcggaccaaactcggccaccggacccaatcccgcctccgcctctgcatccgccgtccatgccggagttgtggtaaagcagctggccagcgttgtggacaaatcgtcgtcgaatcacaaacataagatcaaagacaacagcgtgtcatcagtgggctccgaaatggttattgaacccaaagccgaatacgatgacgatgcgcacgatgagaatgttgaggatttgacactggacgaggaggacatgacaatggaggagctggaccagacggccggcaccagccagggtggcgaaggatctagtcaaacatatgcaacatggcagcacgacagatctcaggatgaacttggactaatggcacaggatgcacagcaacgggatccccaagatctgagtattacgcgtatagcgggactcacctggaacgaatggaatgcccgcctggccatgccactggtgaccctacgcgaaggtgtccagccgctggtctttcccaccgatctgtcggtggataagcagcagggagccgcaggtctgaccgccaaggatgtgaacgtcagtggccgaaagacgcccaccgatggggggggatgcaagagtgagccacgggctgcctcaacgcctgccaggacacacagcagtagcaatcacagcagcaatggaaatggcagtggaaagcccacaaagaccagtagcggtggaaaattgaatcatcttaccgaagaggaggccaccgccctgatgctgaaagccgtagccgagaaacaggcagccgcagcggccggcaccgagttgagtttcggtgaggatcaggccagctcggggaacgggaatagcagcgactatccggccactctgagtggagccgttacctttgcggatgttggcggcccagctggactatgccacatcaacatcctgaacagcatcagcgcaatgaacaatctgattagcggcagtacggcggctggcgttggcataaccaccggatcaggtcaatcgccctcaaatagtggccacaacaacagcgctggcggcggtagcagcgtgctgggcggtgcggacaacggtgctggacacccgtgtcccgtctgcgggagagtctacaagctgaagtcctcgctccgcaaccatcagaagtgggagtgcggcaaggagccgcagttccagtgcccattctgcgtctaccgggccaagcagaagatgcacattggccggcacatggaacgcatgcacaaggagaaattcaagctggaggatgtgaagaactttgccggatccagcggcttagatggcgacagcagtggagccacagcgacagcggcatccgtggtagcagctgcagctgcgctggtcagcggcgtggagttgcatccccacttctcgtag

SEQ ID NO: 1350 - protein, 787 aa, DROSOPHILA
MDDDQQFCLRWNNHQSTLISVFDTLLENETLVDCTLAAEGKFLKAHKVVLSACSPYFATLLQEQYDKHPIFILKDVKYQELRAMMDYMYRGEVNISQDQLAALLKAAESLQIKGLSDNRTGGGVAPKPESSGHHRGGKLSGAYTLEQTKRARLATGGAMDTSGDVSGSREGSSSPSRRRRKVRRRSMENDAHDNSNSSVLQAAASNQSILQQTGAGLAVSALVTTQLSSGPAAGTSSQASSTQQQQPLTSTNVTKKTESAKLTSSTAAPASGASASAAVQQAHLHQQQAQTTSDAINTENVQAQSQGGAQGVQGDDEDIDEGSAVGGPNSATGPNPASASASAVHAGVVVKQLASVVDKSSSNHKHKIKDNSVSSVGSEMVIEPKAEYDDDAHDENVEDLTLDEEDMTMEELDQTAGTSQGGEGSSQTYATWQHDRSQDELGLMAQDAQQRDPQDLSITRIAGLTWNEWNARLAMPLVTLREGVQPLVFPTDLSVDKQQGAAGLTAKDVNVSGRKTPTDGGGCKSEPRAASTPARTHSSSNHSSNGNGSGKPTKTSSGGKLNHLTEEEATALMLKAVAEKQAAAAAGTELSFGEDQASSGNGNSSDYPATLSGAVTFADVGGPAGLCHINILNSISAMNNLISGSTAAGVGITTGSGQSPSNSGHNNSAGGGSSVLGGADNGAGHPCPVCGRVYKLKSSLRNHQKWECGKEPQFQCPFCVYRAKQKMHIGRHMERMHKEKFKLEDVKNFAGSSGLDGDSSGATATAASVVAAAAALVSGVELHPHFS

SEQ ID NO: 1351 - DNA, 7317 bp, DROSOPHILA
aaatatatggatatttatcaagatattgtatataaactacacattgagaacaattcagatagaaaacaatttatgtacaaaagattgtgtttgtttttgcttcaccaatactgtccatgctggcgttgtccggcggaatctctacgatcccagcgaggaccactgccgcgtcaatgccacaaacaatcgtcgtccatctttccgcgtcttaaagtctatcaacaattcatatcatcagcgtgtaagcattagtcaaccaaatatagtaaaacttattgtttcaacacgattcacagtcagaaacaaataacaaacagatttgcattgcatggatcaacttgttcaacttgttttgtagttgggtatataatgtagttcgtttatataatgctgcgtgcgtacacatatacattgaatcatagtaacaacaacacacagagtttgtttaaaacctattcatatttagtttgcttttcactgctgcacctttcactgattgcaggttacctgggttatattggatggttataatataatttttagggtatgggatttgggttcgggaattgtggagtaccagctcctcaatgaaatagttgtggagtgttacccattacattctgcaatctgtgatcactcctgtcccttcccctcaattcgttgtagttcttttatttaaatgtaacaattcgtttgagtagtgcaacgatcaataagccatcggaatttgcagacactcaaaggcagatgagtgttcgtccagagggaaatgggaggagacacaccatgttatttttgtaaaacataaaaattgactagaaaagtgtgcaaaaattttgtgtacgtgcagtttttaggtggaggtgagcaaagaatttcgttggtattgaaaatggaatggaatcttaaaataattattgattgttctccgtttttgtttatgtctacctatgaagccttcaacttgtaatacatttctttgttttcctttttcgtttttcgttttgagatcaattgcacatggtggcacatggcagctctccactgcccaatcgttccttcaacttattttggactttgaaccgactacaaattccgctgcttaaggacgttggccttatattcattacttgggggctaaatagttatagtttatatgtgtagtatctgagcatatcattggcgtcagcagcagtactaatcgaaagaggtttggttttactttatctctatattttgcgaccaaatgggacaactttcagaaacattcagttgttttcaatgcaatttacaagttacactttctatacacgtagcaataataatattaataacattaataacgaattcagtcaagtcagtaaatttggtttacagaaagaaaaatacagtttcataaattaaatgaaataacgctaacaaacaaaaatgatgttgcagcccaaattttccggtgtggtattctgcttgaaatttttaaggaattttttctttgctccgggtacatggctatagaaatacgttttacatataaatatacacattataataattcattttatatatacttgtttgtatagatatcatgtatatacgtatgtaaaggggttataacaactagggtattgtaatttcaaagctttgcgttttgaaacatgaactcacagagtatttccattatataatatataatttgttttagctttgcattttttcattaacatttaacattaacacgacgacggcagcatttactgctgcttggccactttcgatacatttttataaataagctttcataaatgtttacacattttctcatcctggtaccatcagcatacgccaataatgggcggaaaggaaagcaatctgtaggtgtttgagttggttaaggaaacgcgggggaacgtcgagcagttttgctgagcacttgatcatcggcgggcaatatcggtcagactaagaaagaaggtttttagatgcccacgaatccgtagacttccagcacccgaatctcgaagtcgcccgacggacacagcggcggattgttaaaggtcttgcagctgtccgtctttccgaaacgaatgttctcgtccatccagatggcctgcccctcgctgtaaaatagagtggagaatgaaatataagggcagtggtagccacgcgagcagcttgaatcttacccgccaccaatagtgatcatcttggagtcggccgccataaatagttcggagctgtgtcccaggtccttgtcgccctcaatgcccacccatgggtacttggctctttctggatatagggagaacaaaaaggtttcgcccgtaccgaagtaggcctgtcgctggcccttgtcatcttttacatttctttcaaaccagcgcgaagagcagtaggcaccaaatacctaataaaaagaatcaaaatttgatttagaaactattcaaataccacattttcaccacgttttcacatcaaacaaccttagaacattgtaatttacctcattattgcacgtcttgatcatgagcagcgtgggttcatgctgctccacccgaacgtagaacgtggttagtgagcagccgtgctcctccgtggtgtagagcagcaccggttggtacattgttatccgcacgggcagccaggaccacagcgtgaacagctatgggagaacgaatggcatgtttgttagcaactcatccgaacacgattgaaagctagaacttgtctacaactacgagtaacgtattgaaaagggtagcaattagccaatgacagaacaaaatacgttggcgtgggtaaagtagagtgaaagaacatgaactaagaggccaaaagttcaacgaaaaaacaactaaaagccggggttacgtaacatataagaggcaacaactctcgatgaggtctaaaatctacagagaataaactatggcgcagttcacttccaactgtaagcagcggcggcggcacggcagcagcgcatctcaaactgtggctcggcggcactcaaactgtaagcttattgcggacttaatttaatactaatcatttgcgactctccaattctcagatgaaatgcagactactgacaattaacagttaacagcaggacaatgacactattacaaagacagggactgttttgaaatattatctaggacgggcacggaatgaaaactgtttctaaatttggatgggagtttcaaggaataattgcattcactttaatggaatcacggaatggattgtaatggcaatggggaggggaaaacaggttggagggttttcaatatgcaatgcaatgcttacaaattgtctatccgtccaggtttttatgaaattctttgtgcccggcaaaccaaaatgctatgaaaagatatagatggatatatagcaaaaaattatatgcaatgtggcggatgagatcttgggagaacgcatgaaatcgacttatagatgtgctagctgactctcctatacccttcattctaacgtattcgttatggcaagaattgggacccaaactggattgacgtaactaaaactcagagataatcaattatagtggaagaaatgccaactacactgaaaacttaaaaatgatggcaaacgaaactttacgaacggaataaatcaactacaatagtttccattcgattgaaaacaaattctggcactacatgcagtttttgtggcttgaatgaaatgcggataaaaagtgagccaaaagcatcaagatattttcgagttatacatattatagtacgaataaagtgtgttttgtggttatctcggtgggaattgttgattggctttatattggagtggagtggagtggagtggactttgactttgactttcacttacatcttcgttcttacaagcttgacttttcagattgtgtatgggataaacgcccatcgcgattgctctatgaccgggcgatttttcaccctacagtttatacataatcatgatggatgaaatatttaacagaatgcacccaaatgcggccaatgaacccgtggaaatgtatttcatcgaattcagaagtatgtatgtatacattgattaagcgtacgcaaatttatattgtatttcgcaattattatttttgtagtatcgttaatattcattcattcgttgccaaggcagcaaaaaaagtacaagaaaaatagaaataacgttttatatattgatttcatatatggagcaaattcacttgaggattattgttggtttatgtatttctgtatgtgagtatataggctttgcaatatattatttcattttatcacaacgaaaagcaacggaaacgaataaaaagctatacagtgtggttattttataaatgtggttattgtgtaggctgtgtttttgctttgcttgataagtaacgaaacagtaactgcaagaagttatttcattccgcgaaataatacatgacaaaaatcaaacacaacacaaaagtcaagtggaagcagaacggacacaaaaatcgagtcgaatcagttcggagagagagcttgagaattaactggacgccttaaaccatcaggacttgatccagttgattccgaaattaaacttttcatatgtacacatatttgatatttgatttcaattttaaattaaaactttcctattttcatgctttcgtaactcgactcgagcaaattaagaaaattgaaagtagattcaactcattcaaagacggtgtggaaagaaaaacaacagatcaagcagaatcaatcaaacattggcatcttttttgttttgtaataataattttgtatagcttttcacggcctcataccaaattgcgacagctctcggagtgcagcttctggttttgtttatttattgggtgcgttgtttcagagttgaagaagttgtgagagaaacataaacagaaaacgaataaaaataaatcagagtttaccattagacaaggtgttttgcttgtagtgctgtgctgtgtgaatagtttcatttgggtcattactaactgaaggaatgcctaactcggtttctgtttgtattcagtattctgtattctgggtactgtgttcgctgtgtatgctgtgtgatggtgggttggagggggcgcgtcgattgggttagggattagattcacatacctctcggatggtcagggtgtgggacatcatttggatgttgacctgcgactgactagtgggcagattatcacttgaacgcgatttgattaattgcttcgaaccgctggtgagcacggagcggctttttagtagcatttcagtcttgataaatattctagaaatatactgggtactgcaagagaagaaaccgggcattacaaactgatctcattgatcattagttaacattttaactacctcagtcccctaatactaaacgcggcatggagcaacttcgccggcgacactggtatcttcttgcagaacttgatcaaagcgttgccaatgtcgtttttaatgttgtccggactccattcgttgttcgactggcactccttgtgaaacaggttgagtatgacgagggccacgcggtacaggaccttgatgccctcgtggaagtagcagtccatgatccgcaccagatgctggaagggtagaccggctagaatccaccagcaccagtccatgaagatgcgttctagcttcaggcccgggcaaatacgttggaaatacgaagtagcacttttctaaacgatacacttttgattagcatttgatcgatgtgtactgctgtactgctgtactgggagtctactacttactgtgtgctttttggctatctgcatcaccgtcttccaagtgacttcgtgctgtagtttggtttgattgatgaataccttctccttgctaccgaccagaccggccagacatatgtacgcctcctcctctggaaaatatgaattatatcaaaatgcattattagtaccgaatgttaataaagaatctaatgacttcattttaaatgtactgaaatgtagttcttattattaattgaaatattgctaatataatttcatttcgaatataattgccttaatagttatccgctcattttctgcttacaataccaacgtgtcgtatacgtaatattcgatatttgatacgcccgttggcactcgtacgcaagatcgtattgcagtttttctagcaattatctatttaataacagccctaaccttagccacaatttatgcagttaccacccccgcaccccctcccttcctgatccgcgtccaatttaattgtggaactgcagcagctcgacttataacattcgtggtggtttggtttggtgtgcatatctacatatacgtacgtacatatatgtatgtatgtatacacactgaattaccgcaatgacgcagcgcaaattaaattgagaatgcgtcgagcatccgtcggtggagtgcactttgaccagcatcaccgccatttccccgccccaaccacgccctcttcaattttccataattagccggcaccattttttcagcaacctgtgtatgtgcgctctgattatttgatttctaaattagatcaaattatgcaatgtcacagtgttggagctataaataccctctgggagttttgctcgagctgtttttcaggcaatcgtgagagagtcattagcgttcgtgaaaatattaggcaggcatttaaaaagtaattgtgcgcgcaacgggagggagcgcagtttggggtgtggactttaaaggactttaaatttaatttagataatgaaccgacttgaaccttcgcagggcgataaggagtcatcggattgatttgctgcattacaaagtttaattagtttcaaacgccgcggggtaaacaaaggtcttatcagcggatttcgccggcttatcagtggattacactggccccaggcggttcgacttagtttccccggattgctctcatttgccagggcatcggatgcagggcagggtctggagtatagtacatatagtgtgctgaactttatctattgcggaaagacagctggagtccgggcaaacatttgataagttcattaaatattcaagagcctcgctatatatagactatgacgagcgttagacactgcaattgcaataattcgccaacatttgcattctggtcaaacttttaacgacccctcacatactcattatcagtcggcgcgaaagcaaaagtaaacaatttcaattgaaattaatcaagtaactgataataacgatttaaaactgtggtaaacgcgagcgtgccaaagaaacagaataccagaaaccaaaggcatcaccaaagctacttttgaata

SEQ ID NO: 1352 - DNA, 2178 bp, DROSOPHILA
atgcacaccaaaccaaaccaccacgaatgttataagtcgagctgctgcagttccacaattaaattggacgcggatcaggaagggagggggtgcgggggtgaggaggaggcgtacatatgtctggccggtctggtcggtagcaaggagaaggtattcatcaatcaaaccaaactacagcacgaagtcacttggaagacggtgatgcagatagccaaaaagcacacactagaacgcatcttcatggactggtgctggtggattctagccggtctacccttccagcatctggtgcggatcatggactgctacttccacgagggcatcaaggtcctgtaccgcgtggccctcgtcatactcaacctgtttcacaaggagtgccagtcgaacaacgaatggagtccggacaacattaaaaacgacattggcaacgctttgatcaagttctgcaagaagataccagtgtcgccggcgaagttgctccatgccgcgtttagtattaggggactgagtacccagtatatttctagaatatttatcaagactgaaatgctactaaaaagccgctccgtgctcaccagcggttcgaagcaattaatcaaatcgcgttcaagtgataatctgcccactagtcagtcgcaggtcaacatccaaatgatgtcccacaccctgaccatccgagagctgttcacgctgtggtcctggctgcccgtgcggataacaatgtaccaaccggtgctgctctacaccacggaggagcacggctgctcactaaccacgttctacgttcgggtggagcagcatgaacccacgctgctcatgatcaagacgtgcaataatgaggtatttggtgcctactgctcttcgcgctggtttgaaagaaatgtaaaagatgacaagggccagcgacaggcctacttcggtacgggcgaaacctttttgttctccctatatccagaaagagccaagtacccatgggtgggcattgagggcgacaaggacctgggacacagctccgaactatttatggcggccgactccaagatgatcactattggtggcggcgaggggcaggccatctggatggacgagaacattcgtttcggaaagacggacagctgcaagacctttaacaatccgccgctgtgtccgtcgggcgacttcgagattcgggtgctggaagtctacggattcgtgggcatctaaaaaccttctttcttagtctgaccgatattgcccgccgatgatcaagtgctcagcaaaactgctcgacgttcccccgcgtttccttaaccaactcaaacacctacagattgctttcctttccgcccattattggcgtatgctgatggtaccaggatgagaaaatgtgtaaacatttatgaaagcttatttataaaaatgtatcgaaagtggccaagcagcagtaaatgctgccgtcgtcgtgttaatgttaaatgttaatgaaaaaatgcaaagctaaaacaaattatatattatataatggaaatactctgtgagttcatgtttcaaaacgcaaagctttgaaattacaataccctagttgttataacccctttacatacgtatatacatgatatctatacaaacaagtatatataaaatgaattattataatgtgtatatttatatgtaaaacgtatttctatagccatgtacccggagcaaagaaaaaattccttaaaaatttcaagcagaataccacaccggaaaatttgggctgcaacatcatttttgtttgttagcgttatttcatttaatttatgaaactgtatttttctttctgtaaaccaaatttactgacttgactgaattcgttattaatgttattaatattattattgctacgtgtatagaaagtgtaacttgtaaattgcattgaaaacaactgaatgtttctgaaagttgtcccatttggtcgcaaaatatagagataaagtaaaaccaaacctctttcgattagtactgctgctgacgccaatgatatgctcagatactacacatataaactataactatttagcccccaagtaatgaatataaggccaacgtccttaagcagcggaatttgtagtcggttcaaagtccaaaataagttgaaggaacgattgggcagtggagagctgccatgtgccaccatgtgcaattgatctcaaaacg

SEQ ID NO: 1353 - protein, 400 aa, DROSOPHILA
MHTKPNHHECYKSSCCSSTIKLDADQEGRGCGGEEEAYICLAGLVGSKEKVFINQTKLQHEVTWKTVMQIAKKHTLERIFMDWCWWILAGLPFQHLVRIMDCYFHEGIKVLYRVALVILNLFHKECQSNNEWSPDNIKNDIGNALIKFCKKIPVSPAKLLHAAFSIRGLSTQYISRIFIKTEMLLKSRSVLTSGSKQLIKSRSSDNLPTSQSQVNIQMMSHTLTIRELFTLWSWLPVRITMYQPVLLYTTEEHGCSLTTFYVRVEQHEPTLLMIKTCNNEVFGAYCSSRWFERNVKDDKGQRQAYFGTGETFLFSLYPERAKYPWVGIEGDKDLGHSSELFMAADSKMITIGGGEGQAIWMDENIRFGKTDSCKTFNNPPLCPSGDFEIRVLEVYGFVGI

SEQ ID NO: 1354 - DNA, 6198 bp, DROSOPHILA
aatactgccgccgttataagtattagtgagcaattacttatgataaataagcttttgcttagaataccatttcatagaactcagttgtcatatatttcacttaatttttagagcacgcttcacataggcaacacagctgacgcctttaggaggaccaacccccgacgatcgagttgacctcctccccaatttcactcagttcccaggtggcagggcaggctccgtcgcacctgtcacatttcgctgttggtggtgagtgtcttgcgctcgtgctcgttttacctggaaagttcagttactcaaacgcggcgcatgtaagcggcggtcagaggttctatccgagcatacgcagaccaactctcgatcccatccgagcctcgagttccttcaggacggcatgaaggttcgccacgtgccggcgagcacgacaacgttatcgttcagggcgaagcagcgggatgtgggcggcatcggcatgccttgcgagcgggagcggaagcacgaggccgcaaagcgggagcgggaggagcagattaagcaggagcgggccacagcggcgtcggcgacacagcgggtgcgccagcataatcgaaggatcagcaccgacggcgatcccgccaggcggagaatgacgcagtccagggagcgactccaagcaaccggactgggcagaccaggaccgtgcggaccatcaaatataactagaggtgggcctattatttttataataatattaatatttttattattattattataagtattattattattataactattattattattattataataattatttttattattaatattattattataactatttttattattattattataactctaagaaaccagcaatctttatactccgacgtacacaaatttgttcgaaaaataatcttttcaaattaaaatattcagtacaataaacctttacgaacttaatagcgattcatattcactgataatcccattttgtgttcagtaacgcggggatcatcattgcccccggaggttggagcacacggataccgcacaggaaggcctaccagaaagcacgtacctattcctcaggatcagattgaggagcaggatgactccgatgccagggcggaacggctgaggcaacagctcgaggaactggccgcgatgtcggagcaggagttcgaggtgaagttccgccagtggctggaccaggaggggattgcccgggagatgcactctcacctgcgggtggagctcattcactgcttcaataatacggcactcggtgggtttgctaatcaaactaatgaaagatattttactatttggcatctcaaagtttattgaaaaccccctttttaatttattaatcgatctaaccataaatgtacccgttccaggccagctcttgagcaaggctgctggtgtgcagatggctcagtcccacgcactgctcgtctcgccactggcgatggtgctgcacactctggtggcggagtttctgcactcccagaactgccacttcacactgtcggtcttctgcagcgagacgccgcatcgcagcaacctgccggacttccggagtcggccggagttccgattccagacggaggaactgcagaaggtcgtggccgccatactgggagaaaaagaagctctagcggattcggaatttggaaagctggcggaggcccactacgaggaggatctggctggacaaacgcagtgcttgctgatggctcttatgcgaacgctggtggagatcaggaggtccgtgcctaagcaggaggtggaacaaccggtccctgtctctctgcaagacaccggctgtcaaacggagccctctgcctgcgtggaagctcgtcccgaggtggacaccactggtctgtatcagacggaggagcacgagctgattctgggcgcagatggccgaagtgtctttgtgggcggtcgtgtctcgcaatctctgcattccgtggagcagcagcttaatcagctgattaagaatctccgccatttggccaagtcgtgtgctccgcccgttgaggtgatatcatcgacaaaattcgaggatctcctaatgaaggagctgcgcgaaagggagcgacttttgaaagctggtcaagcatttaacccgggcgaaccggtgatcaaaattgccaccggggacaaggaagaggagcatgaggtaaccagtggcaggaaccagaaagatgtggttcactccaacctgggacccattcaagtgccagccctggatgtgaccattcctcagctgccccgtctccacagtgaacaactggccagcctggccgtgatccgccagtccctcgaaaaggtgcagaaaaagagccggcagccgcagggccggatgtacgtctccatggagcgaatggagaccctgatgggggatgtgtgcggctgtgtccaactacttagcaacgttctcaatctctccatggagcaggagcactctgtgggcatgcacaagggcttcaaatggggctaccgcgagggttttgcccacggccacttcatgggcctgcaggagggtcagaaactggagcagttggaacagaagaagtggcaaaaggaaaggccactgcccgagaagcgggaaagctccgtgcaaacggagagcacgatacccacggcgagtatagccacccaaacatcgagaaagtcagctcacaatgaaagtgtcatcacccaaacggagcaaaagcagctaaaggacgctgggaatcaggctagttgcgagccgccaaccttccaaaagtcctacgaacagtggatccacgagatgctgcacagctccagtggccaagtgttcctcgaacgggtggagctctccttgaacaaggcgctggagctgcaaaaggtgcggctaaatgaactcttccaggtgaagttgcgacaccaggccgagatgcttcgtctaagcaagcggcagaactcctggcgggtaagtctctcgagaattaaaacaacaataagctgcagccattatatttattctgcaatcgtattaactttaaacctttgattactaactttgtattcgaattccagaccctgtgcaagcgtgtggagcgggactcgcaatcgtcagcggaggcgcgcgacctcgtgcagcagatcttccggctgctggagcactacgaggcacaccatcagcagctggcggagaagatccaacagacggagcttgcagcggagcaggcggctcgcatcatgcccatgtgggcggatggagctgctgtgggctccgcttctgtcaactggaacacggcgatgtctaccacgctcatttccagtgggatctgcactccgcctccggctcagcctgccgctgatggtgcgctgaatgttggtaagacccatgtggaacagcacacgtatcctgacctgggatatccctatcaattgttggcattagctccgccaggtggagttccagttgcaggcaccttcgtgccagtgactcaccttcctgcccacttgcttggggcttctgaacaccctgttcctctggtcccagttgcaaggatctacagtgatcctatgaaaacgtcaagacgactgctttctccgagtagcgttcctgcagacaatgacagtgctcatcgcgcagccggcgaaaccaatgctttcacattccaaggaggccccgtatctggggatctgcatccaactgaaaatagaaaccagtgagtttttaaatttacaaatcgtttactccgtgttaagtcatatatgtgggttgtttctagagctcctgctactcaaggacaacagtttcctgttcctttacctgttcctgctcctcggggcccttcaccaagtgtacagagtgttttgccctccactgcatcaccggcacttccgccgcccgatgaaacggtacctcaaccaggaccttcccaatcttctattcctttgaaaccgtcaatgcactcggtggccaccaacacgataactccagtgcctccaaaggcgacgcctctcaaaccggtaaatagcaaagtttcagaaggtccgagctttgaggaggctctactaagtgccaagtaagtttgtgaatttcatgtacttacgtatagcattcctaaaataatgtaactttcattagaagccgaatgctgcagttggaacaggagagcgacctattggaacaaagtttcctcagctacctggagaaaaccaagtcgaagacatccccccacaagtcatcggaggatgccgcaagggcccggagaatccgctccagctgcctgcgggaacgagagcaggtgcatcgcactatggacggtttccgggattggcatcgacgcgttcgcaaggaggacgcagctagtgtggctcaactggaggagctgcgcaaccagcgacttatacccgatcccatcttggactcaaaggggtcgtcaccgctgtggctatcggaactggaggagggtcacgaacaggacagctatccctttacgaatgccatcaccgaagctaggaacaaggtgctggacaagataatgccagtcagaaaggaggagaagaaggagaagcaaaacgttaagaagaattggctagcagatttgccatttcagattcctgaggcatctccgaaacaggatcgccatctgaccaatgttaagcccgctgtaacgcgaagcagcagcaatggtgagatgaacgtgctcctccaacgggccaaagatgccctcggcctgagaacaccaaacccacttctggatagcagcagcagcagttccagtatggagctgccctccatgggtgccggcagatcgcccagtacaaagttccagcaatccatggccaggatgcagatgctctttggcggcgcagaggccgtaaaacctacaatgcccgccaaaacaggaagacctgtgagtgcacccaccgcagcatcggaaccggggttgtgtgcacatttggtgctcccgaaacgcccccacacggctcccactcttcacacaatcaacgaaaatgaaccagctgttcatcatttggatgtctccacttccagttcttcgcaaagcactttgcccgggagatcgtcgggcgaagctttcgaggatttggtcatgagcgccgtggcggatggagcccggcggcggaatgcggaatctagcacggaggtttcgtacagccaggcgttctggaaacgcataaacctgtaaaaaaaatctagaataggtgcttaatatgttcaaactgattaagtatatatctatttaggttccaaaactctctttatagagcaacaaaatagtaataatacaattaataaaactcattgttttttggccaaaattgtgcgcatttattaatttttaaagacctatttcgaattttactactcttttttcacttgtgtatgtatacttttgatagattttgtgggcctgattgtgcgcttagtttatcaattttttaagacctgctgggaccatctattatatatattgtatataatcattaaatagtttatttttgcaatagacatatacttattcttttgtcaccttacttccgaaaaaaaatgctagctcttcgtttctttggcattattgattacgagtatgtggttgcgggtatcttagacggcggtgccattgatgagatcgtagggatccctcacctgacccattccaaatagactggcatgggatcgccgtcgctcccgctcgatctcgtccaggtcgaatgcatcgctcacaaaactggacctacgctgttgatcgtcgaatgcgtagccgcgctggaatttcggtggtccggagaccgaagccgttgtcccaggtgctccacttccggatgttggagctgggtaaatgggctgcggatgctgttgatagccattcgagtagttcgacggcgaggagggaatcgccgtgggccactgcacttgactcttgggcgccaccacctggggcagtgtcaacgtggaggacacgaagcgattctgctgctgattcagcatcagctgggagaaacgctgctgactggagcccaatggatagccctgggaagccagcgaatcggacgactgtcgcagaaagcagcgcggcaaggtgcgactctggccgagatcagccggctgtggcagggacattcgcatgcccggatagccacccgttccggggaagctgagatccgtgtgcagggacagattcgagt

SEQ ID NO: 1355 - DNA, 3728 bp, DROSOPHILA
taacgcggggatcatcattgcccccggaggttggagcacacggataccgcacaggaaggcctaccagaaagcacgtacctattcctcaggatcagattgaggagcaggatgactccgatgccagggcggaacggctgaggcaacagctcgaggaactggccgcgatgtcggagcaggagttcgaggtgaagttccgccagtggctggaccaggaggggattgcccgggagatgcactctcacctgcgggtggagctcattcactgcttcaataatacggcactcggccagctcttgagcaaggctgctggtgtgcagatggctcagtcccacgcactgctcgtctcgccactggcgatggtgctgcacactctggtggcggagtttctgcactcccagaactgccacttcacactgtcggtcttctgcagcgagacgccgcatcgcagcaacctgccggacttccggagtcggccggagttccgattccagacggaggaactgcagaaggtcgtggccgccatactgggagaaaaagaagctctagcggattcggaatttggaaagctggcggaggcccactacgaggaggatctggctggacaaacgcagtgcttgctgatggctcttatgcgaacgctggtggagatcaggaggtccgtgcctaagcaggaggtggaacaaccggtccctgtctctctgcaagacaccggctgtcaaacggagccctctgcctgcgtggaagctcgtcccgaggtggacaccactggtctgtatcagacggaggagcacgagctgattctgggcgcagatggccgaagtgtctttgtgggcggtcgtgtctcgcaatctctgcattccgtggagcagcagcttaatcagctgattaagaatctccgccatttggccaagtcgtgtgctccgcccgttgaggtgatatcatcgacaaaattcgaggatctcctaatgaaggagctgcgcgaaagggagcgacttttgaaagctggtcaagcatttaacccgggcgaaccggtgatcaaaattgccaccggggacaaggaagaggagcatgaggtaaccagtggcaggaaccagaaagatgtggttcactccaacctgggacccattcaagtgccagccctggatgtgaccattcctcagctgccccgtctccacagtgaacaactggccagcctggccgtgatccgccagtccctcgaaaaggtgcagaaaaagagccggcagccgcagggccggatgtacgtctccatggagcgaatggagaccctgatgggggatgtgtgcggctgtgtccaactacttagcaacgttctcaatctctccatggagcaggagcactctgtgggcatgcacaagggcttcaaatggggctaccgcgagggttttgcccacggccacttcatgggcctgcaggagggtcagaaactggagcagttggaacagaagaagtggcaaaaggaaaggccactgcccgagaagcgggaaagctccgtgcaaacggagagcacgatacccacggcgagtatagccacccaaacatcgagaaagtcagctcacaatgaaagtgtcatcacccaaacggagcaaaagcagctaaaggacgctgggaatcaggctagttgcgagccgccaaccttccaaaagtcctacgaacagtggatccacgagatgctgcacagctccagtggccaagtgttcctcgaacgggtggagctctccttgaacaaggcgctggagctgcaaaaggtgcggctaaatgaactcttccagcagatcttccggctgctggagcactacgaggcacaccatcagcagctggcggagaagatccaacagacggagcttgcagcggagcaggcggctcgcatcatgcccatgtgggcggatggagctgctgtgggctccgcttctgtcaactggaacacggcgatgtctaccacgctcatttccagtgggatctgcactccgcctccggctcagcctgccgctgatggtgcgctgaatgttggtaagacccatgtggaacagcacacgtatcctgacctgggatatccctatcaattgttggcattagctccgccaggtggagttccagttgcaggcaccttcgtgccagtgactcaccttcctgcccacttgcttggggcttctgaacaccctgttcctctggtcccagttgcaaggatctacagtgatcctatgaaaacgtcaagacgactgctttctccgagtagcgttcctgcagacaatgacagtgctcatcgcgcagccggcgaaaccaatgctttcacattccaaggaggccccgtatctggggatctgcatccaactgaaaatagaaaccaagctcctgctactcaaggacaacagtttcctgttcctttacctgttcctgctcctcggggcccttcaccaagtgtacagagtgttttgccctccactgcatcaccggcacttccgccgcccgatgaaacggtacctcaaccaggaccttcccaatcttctattcctttgaaaccgtcaatgcactcggtggccaccaacacgataactccagtgcctccaaaggcgacgcctctcaaaccggtaaatagcaaagtttcagaaggtccgagctttgaggaggctctactaagtgccaaaagccgaatgctgcagttggaacaggagagcgacctattggaacaaagtttcctcagctacctggagaaaaccaagtcgaagacatccccccacaagtcatcggaggatgccgcaagggcccggagaatccgctccagctgcctgcgggaacgagagcaggtgcatcgcactatggacggtttccgggattggcatcgacgcgttcgcaaggaggacgcagctagtgtggctcaactggaggagctgcgcaaccagcgacttatacccgatcccatcttggactcaaaggggtcgtcaccgctgtggctatcggaactggaggagggtcacgaacaggacagctatccctttacgaatgccatcaccgaagctaggaacaaggtgctggacaagataatgccagtcagaaaggaggagaagaaggagaagcaaaacgttaagaagaattggctagcagatttgccatttcagattcctgaggcatctccgaaacaggatcgccatctgaccaatgttaagcccgctgtaacgcgaagcagcagcaatggtgagatgaacgtgctcctccaacgggccaaagatgccctcggcctgagaacaccaaacccacttctggatagcagcagcagcagttccagtatggagctgccctccatgggtgccggcagatcgcccagtacaaagttccagcaatccatggccaggatgcagatgctctttggcggcgcagaggccgtaaaacctacaatgcccgccaaaacaggaagacctgtgagtgcacccaccgcagcatcggaaccggggttgtgtgcacatttggtgctcccgaaacgcccccacacggctcccactcttcacacaatcaacgaaaatgaaccagctgttcatcatttggatgtctccacttccagttcttcgcaaagcactttgcccgggagatcgtcgggcgaagctttcgaggatttggtcatgagcgccgtggcggatggagcccggcggcggaatgcggaatctagcacggaggtttcgtacagccaggcgttctggaaacgcataaacctgtaa

SEQ ID NO: 1356 - protein, 1187 aa, DROSOPHILA
MSEQEFEVKFRQWLDQEGIAREMHSHLRVELIHCFNNTALGQLLSKAAGVQMAQSHALLVSPLAMVLHTLVAEFLHSQNCHFTLSVFCSETPHRSNLPDFRSRPEFRFQTEELQKVVAAILGEKEALADSEFGKLAEAHYEEDLAGQTQCLLMALMRTLVEIRRSVPKQEVEQPVPVSLQDTGCQTEPSACVEARPEVDTTGLYQTEEHELILGADGRSVFVGGRVSQSLHSVEQQLNQLIKNLRHLAKSCAPPVEVISSTKFEDLLMKELRERERLLKAGQAFNPGEPVIKIATGDKEEEHEVTSGRNQKDVVHSNLGPIQVPALDVTIPQLPRLHSEQLASLAVIRQSLEKVQKKSRQPQGRMYVSMERMETLMGDVCGCVQLLSNVLNLSMEQEHSVGMHKGFKWGYREGFAHGHFMGLQEGQKLEQLEQKKWQKERPLPEKRESSVQTESTIPTASIATQTSRKSAHNESVITQTEQKQLKDAGNQASCEPPTFQKSYEQWIHEMLHSSSGQVFLERVELSLNKALELQKVRLNELFQQIFRLLEHYEAHHQQLAEKIQQTELAAEQAARIMPMWADGAAVGSASVNWNTAMSTTLISSGICTPPPAQPAADGALNVGKTHVEQHTYPDLGYPYQLLALAPPGGVPVAGTFVPVTHLPAHLLGASEHPVPLVPVARIYSDPMKTSRRLLSPSSVPADNDSAHRAAGETNAFTFQGGPVSGDLHPTENRNQAPATQGQQFPVPLPVPAPRGPSPSVQSVLPSTASPALPPPDETVPQPGPSQSSIPLKPSMHSVATNTITPVPPKATPLKPVNSKVSEGPSFEEALLSAKSRMLQLEQESDLLEQSFLSYLEKTKSKTSPHKSSEDAARARRIRSSCLREREQVHRTMDGFRDWHRRVRKEDAASVAQLEELRNQRLIPDPILDSKGSSPLWLSELEEGHEQDSYPFTNAITEARNKVLDKIMPVRKEEKKEKQNVKKNWLADLPFQIPEASPKQDRHLTNVKPAVTRSSSNGEMNVLLQRAKDALGLRTPNPLLDSSSSSSSMELPSMGAGRSPSTKFQQSMARMQMLFGGAEAVKPTMPAKTGRPVSAPTAASEPGLCAHLVLPKRPHTAPTLHTINENEPAVHHLDVSTSSSSQSTLPGRSSGEAFEDLVMSAVADGARRRNAESSTEVSYSQAFWKRINL

SEQ ID NO: 1357 - DNA, 2751 bp, DROSOPHILA
cctaatgtgctccaactggatttgggtcatgaagatgctgtgctctgtggtgcgggcaaacaagtcatggattaaatcgtttgctacccaagttccgtggatacgcaccgccggatccgaagcagatcacatgattgttggctgacatgaggagcagtttgggcgggaagtgatgtttgggaaagcggatcttatacagcaccggtgcattgtgggtaaacttgccgcgtgtgagtagctcgatttcgcccagatagttctgtgtgtactaaggggattaggtaacatctggatgacaatataccacttaccgtggtgggcttgccacgcatcgagagcgtaactcgtatgtggagcggctggtggccatccggactgcgcacggccatcaggccgaaccattcgctgccgtcgaagcggtactgaaacaccttggggcacggactgatcggcattccctgggcgactgccttggttacgtgctcgatgcagaggatcaggatcgccgccaggtgcagcctcatcgctagtgtctgggaatgcccgggatgaaaatgcttttcactcaaaacaaacgtaaacaatgccgcaatttcgatcgaagctttaacagtccgggaacactgtgtgcattttatccaccaacagagttgccagaccaagaaagtaacccctgttaattaaaatgagagaggggaaattgatcctttaaattctcaattccgtgcaagttcaaatttcaaaaaactttacaaattaattatatcccacaaatatggattctacgaaacatttactggatccactgttagaactaaaaggaatatttttataatttccaagtttattgttgtcttttttttataaaaacttaaattagcaaatgccttgctatttttacatgggtattttacatgggtatttacaaagagatcgtttgctatgatgaggtccaagctccaatttgaagaaccacatttatttgaaattatctgtgctattaggaaaattcatcctcctcgccatagccccactcgtcctcgatctcctcgttgccaaagaatcgctccagatcctgttcagcctccgccggaacggtatcggcggtaagcagttggtcctgatcctccggacaaccgcggcagcgactctcgttgattccataattgaggcaattctcgccgacgcactcgcagcatccgtcgtggaaccatcgatagctactggctcccatgctctcgcactgctgccggcacttgtttgcccgaatgcacgagttcacatagatcacggtgcatagggtgacacctgcagacccggcatttccatttccatttccgtttccggcatcaccactcgcgccgccctgaacgcgctgcttgaagccggctcgcatggagaaccttatggtggaccatccctcgtcatcctcggcggttagggtgtcgaacagctcgggcactccttcaatgtctccaatctccgagcgcggcgtcagcgagggcaggacatccttgtgcttgggacacatgtcgaggcagccacagcactcgatgtacagttcgccaaggcaatttagacagtccttgcagcagtggcagtcatttaacttgcactggcagctctgggtgatgaggcacttggataccaccgatccgcagaccacttcgttgcatccatcatcgttggccaaggatgaccacggtgcgattccaacgaaaaggatgacgaagtagcacagtaactgcattctcgacgagatctcgcggccttatgatacattatccacgattgcggcatgcctttatatgtttttttaatattagtatccagatggtcaggtagatggctcatccttaccacaatccgctaatcctcgtgtcgcgaaaatcaggtagtgaccctcagcaggcaggctggtcatttaaaaccatttagaggtaacttctcctataaaatgtgccaaaataagggatgatcatctcaaaatagccttacttttaaggcagcttctaggattaaacacgcaaacattacctgtattattgactaatacgaaccgttataaaataagccaattaggtaacataaataaagtccattggttggctaaaacaaaatgcagattcttaatcctaaatcttaaccgcaaacaggtattattggctctaaggacttaacaggtataattacaatttgttaagtgttttggccaaaaatcgatatattatgttaagggaagtcagaaaaacgacatttggcaaaaatgccataatttataacttggccaaaaatcatcacatggctaaaagaaaaacagtttcgctcagataattaccaatgctaaagatccatatcatttttaagcggatactaagaaattaattttaagatcaatttttgcattttcgtaaggtatcaaaatgcgaaaaaaattaaaaaaaaaaaattttcctcaaattataacccaaatcgattggaatttaaataacaagctcgttgaggtataacattcaatttatagaccattatttcgaattttctgaccaaaatacggatttttttatttacaacaaaaatcgggtgaacgatttttggtataacttggtcaaaaatggtcacaaaacaaaaataattaccgatttatgctcctaattaccaatactaaccaaccctatcactttttgacgaattttgtaaaattattttttggccaattttttgcattttttgtaaggggtaacatcataa

SEQ ID NO: 1358 - DNA, 751 bp, DROSOPHILA
aatgcagttactgtgctacttcgtcatccttttcgttggaatcgcaccgtggtcatccttggccaacgatgatggatgcaacgaagtggtctgcggatcggtggtatccaagtgcctcatcacccagagctgccagtgcaagttaaatgactgccactgctgcaaggactgtctaaattgccttggcgaactgtacatcgagtgctgtggctgcctcgacatgtgtcccaagcacaaggatgtcctgccctcgctgacgccgcgctcggagattggagacattgaaggagtgcccgagctgttcgacaccctaaccgccgaggatgacgagggatggtccaccataaggttctccatgcgagccggcttcaagcagcgcgttcagggcggcgcgagtggtgatgccggaaacggaaatggaaatggaaatgccgggtctgcaggtgtcaccctatgcaccgtgatctatgtgaactcgtgcattcgggcaaacaagtgccggcagcagtgcgagagcatgggagccagtagctatcgatggttccacgacggatgctgcgagtgcgtcggcgagaattgcctcaattatggaatcaacgagagtcgctgccgcggttgtccggaggatcaggaccaactgcttaccgccgataccgttccggcggaggctgaacaggatctggagcgattctttggcaacgaggagatcgaggacgagtggggctatggcgaggaggatgaattttcctaa

SEQ ID NO: 1359 - protein, 249 aa, DROSOPHILA
MQLLCYFVILFVGIAPWSSLANDDGCNEVVCGSVVSKCLITQSCQCKLNDCHCCKDCLNCLGELYIECCGCLDMCPKHKDVLPSLTPRSEIGDIEGVPELFDTLTAEDDEGWSTIRFSMRAGFKQRVQGGASGDAGNGNGNGNAGSAGVTLCTVIYVNSCIRANKCRQQCESMGASSYRWFHDGCCECVGENCLNYGINESRCRGCPEDQDQLLTADTVPAEAEQDLERFFGNEEIEDEWGYGEEDEFS

SEQ ID NO: 1360 - DNA, 3370 bp, DROSOPHILA
tattatgtgcatgtgcgtttgtagaccaactaacaacaataaatcaacttcagtttagcccagtcattaccggagcaagttggctttaggtatggggaaggcattcacctggttaaatgccaaatgccagttaagctcattaagggttagttgcataacgcgccagtaaagatggattcatcaagcgaacagccaataattgcagttgtagaccaaagaactgccggcataaataagctgagaaatcataaaccgaagaggctttattatgaaacgtaaaaatcgtatggaaaatgccaacaatagatattccaaaaacaaaccattggtaggtcttatgtagtaattgtcttagctctaacaagaaaccatttttaaaacacgttaagtcccaactgctcatactgacgaacggacagacggacatatctagctagatatacatatgtaattggcttcctggtcaggaaatggacggacactcacctccagttacatgtttactcttaaatgaatttggaataaccatttactctaaaagacacgggcatgcaaatagcacacagttcttaggcaactgatgatactttggtacttacagggtattgccgcggttgagtcgtgcggatccggctgataaccctcattggaaaagtagtcaatcttaacgcagttgtacgagtcagcatccaggcctgaaaacaaacaaagtaaagtatacaatatgagtataataccttctagaggtgtgtttttaaatgggctttcgcaacacaattattgataaaaataaagagtgcaagggtcgattgtttgcattcttgttaattgaaacaacttcataattgctcaacttcatatagttagtttttgaggaagtatgtacgtacatcccagatagttaatatctgttaatagttaaattaaatagttaaatagtttataacgaatgggtagcactaatagtccgtttatcgttggtaatcgattgtaataatcgacttattaagcagccaaatttttaactaaaatctttttgaattcgaactcgagctatgtatttactttatgtaacgcctagcacgcgctggtaaacaattccaaacccaaaagtagacaacagatacactagccacccaggaaaatacaacactgccgaggattattgaagtcaggatgctggcggccaaaaaggtgcttaaaacaaagaaccagatggagcccctccaggataagaagcccagagtgaagaccaagccaaatgcgaagggcaaggtcaaggaaaagggcaccgacaaggaaaagggtaagttcaaggccaagggcaacggcaagggcaagaacaaaaacaagatcagggactccaaaacaagcacctcgctggctctggagcgcggcagcggagatggaccgcatcagctggccgaggtgagcctggttgcgctccgcttcatggacatctcgctgcgccactcggatgtccagctgcttcagtccgctaacgagggcgtcaacgaacgcctggtggccttctactacgcctaccttcagcaccgccgttatcgctccgagttggatttgcacttcctgaatccgggcctggccgcacgactgcgccacatgaatatgcgccagttgtgggcgatggtgcgcgaccgccgtctcaacgagaaacagttcatcctggtgccgctttccacccatccaaggttggtaatttcattttgcatgctttctcaattttcgagctcttatagatctttaagatctttacgtacggacagatagacgaacgggcacaggtagtcggacttttcccgataggctcttcttcttcttcttcttctttctgcctattagatatatcttttagcgtttctaataacccatcttctctagcggaataaatattcattattaactgttcagcgattatatatttcataaaattgttattaactttaactgtaattccgcagaccccacggacactggtccctactggtgatttcgcggccggacagcaagttttaccactacgattcgttggacaactgtcattcgccgttggccgcctcggtgtcggaaactttgcgggcgcccctcgaagcctggaagttcgccctggtcaccggtcgctgcctacagcaggagcgccaagcggctggcaaggaaggctccggtcgcgaccctgcatccggaattcacctgatgtgcatgaccgaccacgttgcggactatgtagccagatgcggatacgccaccagttcgctgctcatcgccgtagaccaaatcgcagcaatgcgcacccacctggtcgagctgatccagtcgctcggcgggattctcccctcaaagaggggccactgaaagaggagcatcttcatgcccttgcgaccctacattcgtttgctttacatttgttgacgcataagaaaatcagtaaaaaattcaaataatgaacctaactgctttgttaactgctattattattattcagttcgtactccacaaatgagacatactcgtgcatatattgttcaatataaaatgtgccaaaagtattgtaaatatgtgctgaagagttcttaactatttgtaacaaatattatttgatggcttcgcagcaaggatatacatacatttataatataaattgatttggactgtgcatttcgaattatgattgttgcaagccttagtgtagtgattaattacatatagtttcaaccatcgatttaactcataaaggcaattattattttttttttccagttgcatagcattgcagccaaacatatcacagaagttactctgatcagattaatcttcacagaaaaatacaataaaaaggacagctgtcagtgtgagccttaattaagtgactgactgattgattggctgaccgccccatccggctgactgcagtttaatatggtcaaatccgaagccctcactctgccgctgccactgccactgcccgcagtttcaaagccgaataagcccaaaggtcattgttcctcgttcgggcggcagctggcaaaaaaaaaaaaaaacagaaaacagaaaacaaaaaacccaaaacacaaagaccccacccacaacccaagccggaaaactgcagcagcccaacaccatatatgtcatatctgtctccatttgctggtggtgcaaatggttccaaggaatgtggtgctgtgatgctggacggacagcaatttacctggcagagtggtgcacaatatccagagactggacttggtgtacttggtgatgtaggcgccatcgtccagggctttgaagttggccgtcccattgtagttggcattgggcagcttctcctccgtgaagagccactggggtccggcca

SEQ ID NO: 1361 - DNA, 1100 bp, DROSOPHILA
acttattaagcagccaaatttttaactaaaatctttttgaattcgaactcgagctatgtatttactttatgtaacgcctagcacgcgctggtaaacaattccaaacccaaaagtagacaacagatacactagccacccaggaaaatacaacactgccgaggattattgaagtcaggatgctggcggccaaaaaggtgcttaaaacaaagaaccagatggagcccctccaggataagaagcccagagtgaagaccaagccaaatgcgaagggcaaggtcaaggaaaagggcaccgacaaggaaaagggtaagttcaaggccaagggcaacggcaagggcaagaacaaaaacaagatcagggactccaaaacaagcacctcgctggctctggagcgcggcagcggagatggaccgcatcagctggccgaggtgagcctggttgcgctccgcttcatggacatctcgctgcgccactcggatgtccagctgcttcagtccgctaacgagggcgtcaacgaacgcctggtggccttctactacgcctaccttcagcaccgccgttatcgctccgagttggatttgcacttcctgaatccgggcctggccgcacgactgcgccacatgaatatgcgccagttgtgggcgatggtgcgcgaccgccgtctcaacgagaaacagttcatcctggtgccgctttccacccatccaagaccccacggacactggtccctactggtgatttcgcggccggacagcaagttttaccactacgattcgttggacaactgtcattcgccgttggccgcctcggtgtcggaaactttgcgggcgcccctcgaagcctggaagttcgccctggtcaccggtcgctgcctacagcaggagcgccaagcggctggcaaggaaggctccggtcgcgaccctgcatccggaattcacctgatgtgcatgaccgaccacgttgcggactatgtagccagatgcggatacgccaccagttcgctgctcatcgccgtagaccaaatcgcagcaatgcgcacccacctggtcgagctgatccagtcgctcggcgggattctcccctcaaagaggggccactga

SEQ ID NO: 1362 - protein, 307 aa, DROSOPHILA
MLAAKKVLKTKNQMEPLQDKKPRVKTKPNAKGKVKEKGTDKEKGKFKAKGNGKGKNKNKIRDSKTSTSLALERGSGDGPHQLAEVSLVALRFMDISLRHSDVQLLQSANEGVNERLVAFYYAYLQHRRYRSELDLHFLNPGLAARLRHMNMRQLWAMVRDRRLNEKQFILVPLSTHPRPHGHWSLLVISRPDSKFYHYDSLDNCHSPLAASVSETLRAPLEAWKFALVTGRCLQQERQAAGKEGSGRDPASGIHLMCMTDHVADYVARCGYATSSLLIAVDQIAAMRTHLVELIQSLGGILPSKRGH

SEQ ID NO: 1363 - DNA, 3035 bp, DROSOPHILA
aactgagtgtgtgtccatgtttgggcaagattaggaaacgaaatacactacacttaatatgcttataaaccaattaactgaagaactttcagcaaggcgttggctgcgtattgaaatttttaaatctatataaatgtataatgaatactaaattaaagttctgcttctaaagtacacataaaaataaaaaataatcaatactaccatatcaagccatttaaacgtttcactgacaaatgtgcagcgtttattttgtcaaaatactgatgccgactagtgtataaaaattaacttattaagttttataccttttggtataaaaataataactatagaagagctagttctattcagttcatttcaagatcgagcgctagcttcaccaataacaggtaacaataataacttataactttataactagaagttctttcgaatgggtatagccttaagcatcctgtccatttgtttagctcgggtatgaaatctactggaactattgcaatatttcatgtagatcaggtagatccttttgatttgccagaaaatattccaccgggggttggtttttaatggtcgaacaaacttgagctgaaagtctgcgtatttgaacgtacgtaaatgtcttcatgcgatcttcactttgcttcatttgataaaaggatgtgataagttcgtaccaatttattacattatcaatttatttatcttaattaattaggtaatccatattaggattgtaaatcgggcatagttagacctgattgcagagaatttgtaaaattcattcaatgcgttttattttattagtttttgaatttacatatcatagaaaattacgaattcaggatatcataatttaaacataataggcctaacataattatgcaaataaaaaattaagattaatattggttgtggaaattgctagcgcaagtgcgtatttttctaaatgtttatgtttattcattgatagcatcattttgaatgccgcattcttcttttcaatgtgctcccagcgtggatttgataatctatgtccgtttgccaggattcggcttataggacttgatgggcggcttgcgcataaatttcatgtcagtaagattcggatatggactccaaacacttacgtttgctgtactcatagctcctaggtatgtagatgactgggggcataaaatgttcctactcataggtcaccacttccacatcgccgactctaaaaagatcaaaatgttagttggttgaaatttaaggaaatcctaggacgcggggactctcaggtccattacacctgctttggttattaaatgatacaaaattatactttacaagtaacttactcgtcaggatttcccgcaactcgcttaatcgggttgatgtacttgagagacccattgctgttgcctccaaacatcttgtcgttgacagatctgcaaaataacaatagatttttactctttgcctaaatttaacccgttgtatatcatatgctcaacttgcttgtcaagtgagtcaagctacatcggtatgcagagggatccccattacctgtcggcctccagatagagtccgttaatgttcttggccgactcgggatccatttcattcagctggcgcatctgctcgtgcgaaacctcgtcgttcttgtctggaataagatacggatctcggccagggcgtaggctatgcgggcatagcactccgccggggtggccaccgtgccgacctccagaaagagattcttctgaaaatgggcatacctcgcctgtgctgcgcagctcctcctctttgttacgatcgcgcatcgaatagcgaaccttgatggcaatcttgcactgggtctcctcctgaaggcgacgtagcgagttccccttgggccccaggatcttgccagtgaagttgaactgcgcaagggtaaggattcattttgcggtcggaggggatagctaattgtataaaaccgcactttaaaagctcccttttgcgttatcatggaactggaacgtctacggcacactaatctggccataggaggaggagccatgaatcctttctcggatcctacagccttgacaatactggcctcctttgtggaatcttctgtctgatttagtcgagtttcatccacaacaagttgttaagttggaagtggaccaccccctagacctaagctaatctaacctaatgttattactggacagtaattcccattgcaattcatatattttgtttgatttataggacctttttacacttaaattatgaatatcattttggtaaattatgactaaatttattgaaaacgaaaaaccagtgcaaatttctattacttcgtgtaacagtgggtaaaacgacatatgtatgatcggaatctacaaagaatgctgcattgcaagttgcaatttgcaaccatctgaatggaattaatgcaccctctccaaggataacttgctaaaaatacattaacaaacttgcaatagaaaataactgaagctgtgaatatttgtcaatatgaatatagcaaaatcaaagggagcgagtaacacgataaataagtcaagtccaataggggacagctcagagtgttgttaattgctgaaattagcaaaacaatgaaaatgagtaacgtatccgaatgtatttcaaactgcgcattttgctaaaaagggcaacggatttacttgaagtcaataattccagagattcgaagaacctctttgacatgcagagcccataagaacttttttttggcaattccgggagcgccgaaactgagttcatcatagtgccaaaataaaacaaacataaataatttacaaaaacggctgacatcaccctaaacaagtccgaaaaaatgcttgatatttatgtatgcatgcgtctcgtttgtgtgtcaaatgatgggaaaaaaacattgcggcagcttttatacaaattcaacgagagagaacggtatcgtcgagttcctcgattatcagttacccagtactcagacaaataatacagttaaaacatttttaagagcgagt

SEQ ID NO: 1364 - DNA, 676 bp, DROSOPHILA
atggccagattagtgtgccgtagacgttccagttccatgataacgcaaaagggagcttttaaattcaacttcactggcaagatcctggggcccaaggggaactcgctacgtcgccttcaggaggagacccagtgcaagattgccatcaaggttcgctattcgatgcgcgatcgtaacaaagaggaggagctgcgcagcacaggcgaggtatgcccattttcagaagaatctctttctggaggtcggcacggtggccaccccggcggagtgctatgcccgcatagcctacgccctggccgagatccgtatcttattccagacaagaacgacgaggtttcgcacgagcagatgcgccagctgaatgaaatggatcccgagtcggccaagaacattaacggactctatctggaggccgacagatctgtcaacgacaagatgtttggaggcaacagcaatgggtctctcaagtacatcaacccgattaagcgagttgcgggaaatcctgacgaagtcggcgatgtggaagtggtgacctatgagtaggaacattttatgcccccagtcatctacatacctaggagctatgagtacagcaaaccgcccatcaagtcctataagccgaatcctggcaaacggacatagattatcaaatccacgctgggagcacattgaaaag

SEQ ID NO: 1365 - protein, 180 aa, DROSOPHILA
MARLVCRRRSSSMITQKGAFKFNFTGKILGPKGNSLRRLQEETQCKIAIKVRYSMRDRNKEEELRSTGEVCPFSEESLSGGRHGGHPGGVLCPHSLRPGRDPYLIPDKNDEVSHEQMRQLNEMDPESAKNINGLYLEADRSVNDKMFGGNSNGSLKYINPIKRVAGNPDEVGDVEVVTYE

SEQ ID NO: 1366 - DNA, 4214 bp, DROSOPHILA
accctcgtcaattacctttgcatactatctttaataataatgaatttttaccaattttcaatacttttctaaatatcaattgatcttttaaaataatgttaagtttaaataatttatatttaaattggtagtggtactcacattaggtcgcctagattcggtcgcgtctggacaagagcaaaactttccggagcccggcgccttttgttagacccttgcgagccgtagtgcgtgctccgccggatgacgccatcgccgatgatggcaatattgtcatccagaccgttgatgttgctaatggtcaatcgcgccataggagatgagccccttcggcgacgagctcccactccgcccagcattctgggaatcgatgaatcgaactttgcaatacgcgaaatgtactccaaatattgccatttctgtaatatattcactaccaactatcgggcacgttcacaatacaatgcgttgcacttgtttggggatcttcaacgattgcgaatgtccgtagacgacgggcccagagccccaggtgtgatgcaccagctgccacggtccggacggaactgatagtcgatggctacgactgctgtcgatgccccaacaacccagcaagatagataacggcccagatggcgatgacgacgattgcggctgatgacgtgcgatgacgtgcttgatagtagtcagcatttgcgcagtacagtgtctgccgctggtaattagggtgtccaggtgtccatgggtgaacgccgctcagacgggccaggccgcccactccggcatattagcagcttcctttgttcacgagcgccaacaacacactgataacaaaggcatggtaaacgttactgtattacaattaatttcgatatcaaacatacctgtgattctttcaacatacacgttttctatatgtggtcagaggaatttaaacattgcaaatttcgagatttttaatgttaatattatggtggagatctaaaagcgcagcgattctatgggaaaattcctttttggctttcccgtgccataatttattatttgaattgccctactgtcttagataaaaataaaactgaaatgccataatcagaagttttcgtaatgaaactagcaaaaaaaaaaaaagaaaaaaccgataaccgctaattactccgagtaacttttgcccatcgccatgcccaaggggctattatcacagcgctcacttagaaatgcgttcccatacacatttcggatgtgattcaaattacaaaggccgtgatccagtccagaaacttggccacgtcggcatatataatgtactgattcttacagcaaagcttatggctagattccgcatccggtgtctctacggcgggcagggccgctgatactgtgccacgcagcatccagcgattgttccggcggatgaaaagtccggcccccgatataccggtgtaaatgctcgccccgctctgatgcgtatctcgttcctccgcctggatgccggcgcaaaacgttcggtttgaggataggctgcgaaagtgggcattggctcgaaagcattcggcattgccgacaatgggagcctttactaccttgggtgcactggcatcggtggacttcttgcccggtagctccgacgacagcttctgatcccgcgtcctgttcgttctgtcaaagctccagccgatgacgatgccccgctcgcccacaatgtactccgttttgctggaaccagaccacaggcaagcgggtcgaataaaggtgttaaatctgcgttgaaaataatggtatactgtcaatataataaatgatcttcatattcgatttcacatcgcggtttagatatgaatctaaatcttgaatatgtaagctttaggcatattggcacccaccgaacttcgtccttgagtataatcactgcgatatccgcatcgtagctgctcagctgactgttaaagtcgggatgaatgtaaatgccatcgacgggggccgccagagatccctcctcgttccagttcttcagattgtggcggcccagaaagacgagcacctcgttggatgtgtagcgcttgttgaacaacttgaagcagtgcgccgagctgattacaacgcgtgccgagacaagcgaaccgccgcactgaaagtccagggaggtcaggttgttcacatagatggccgctagccaaggccacgatcccctggtgatcgatggcaggctatcggcgctatcgctttctatcgcttctgcttctgattcgtccacaaactgatgctccaggacatcgtcttcatcgtcatcgacaaaaactggcgatgtgatgccatcggagctctttggttcaccgattgcgacatgaagtgattccgttctttgggacaagtgaaagtccagatccctgtcgatgcgtccgcaaatctccttgggcgcctgggcaaagggttttctacaaaagcggacattaagtaacgaatgaatgtcacgatcgtgtgtgtgttttaaccgaccaaaatccggatgcatacttcttgaactggatgtgcggcgtactgggcggcttgtcgtcggtttttctcacctcctcctcctcgggatctagcagcagggagctcttcttatccggtataaaggacaacttcctaatgtgctccaactggatttgggtcatgaagatgctgtgctctgtggtgcgggcaaacaagtcatggattaaatcgtttgctacccaagttccgtggatacgcaccgccggatccgaagcagatcacatgattgttggctgacatgaggagcagtttgggcgggaagtgatgtttgggaaagcggatcttatacagcaccggtgcattgtgggtaaacttgccgcgtgtgagtagctcgatttcgcccagatagttctgtgtgtactaaggggattaggtaacatctggatgacaatataccacttaccgtggtgggcttgccacgcatcgagagcgtaactcgtatgtggagcggctggtggccatccggactgcgcacggccatcaggccgaaccattcgctgccgtcgaagcggtactgaaacaccttggggcacggactgatcggcattccctgggcgactgccttggttacgtgctcgatgcagaggatcaggatcgccgccaggtgcagcctcatcgctagtgtctgggaatgcccgggatgaaaatgcttttcactcaaaacaaacgtaaacaatgccgcaatttcgatcgaagctttaacagtccgggaacactgtgtgcattttatccaccaacagagttgccagaccaagaaagtaacccctgttaattaaaatgagagaggggaaattgatcctttaaattctcaattccgtgcaagttcaaatttcaaaaaactttacaaattaattatatcccacaaatatggattctacgaaacatttactggatccactgttagaactaaaaggaatatttttataatttccaagtttattgttgtcttttttttataaaaacttaaattagcaaatgccttgctatttttacatgggtattttacatgggtatttacaaagagatcgtttgctatgatgaggtccaagctccaatttgaagaaccacatttatttgaaattatctgtgctattaggaaaattcatcctcctcgccatagccccactcgtcctcgatctcctcgttgccaaagaatcgctccagatcctgttcagcctccgccggaacggtatcggcggtaagcagttggtcctgatcctccggacaaccgcggcagcgactctcgttgattccataattgaggcaattctcgccgacgcactcgcagcatccgtcgtggaaccatcgatagctactggctcccatgctctcgcactgctgccggcacttgtttgcccgaatgcacgagttcacatagatcacggtgcatagggtgacacctgcagacccggcatttccatttccatttccgtttccggcatcaccactcgcgccgccctgaacgcgctgcttgaagccggctcgcatggagaaccttatggtggaccatccctcgtcatcctcggcggttagggtgtcgaacagctcgggcactccttcaatgtctccaatctccgagcgcggcgtcagcgagggcaggacatccttgtgcttgggacacatgtcgaggcagccacagcactcgatgtacagttcgccaaggcaatttagacagtcct

SEQ ID NO: 1367 - DNA, 1897 bp, DROSOPHILA
gcattgtttacgtttgttttgagtgaaaagcattttcatcccgggcattcccagacactagcgatgaggctgcacctggcggcgatcctgatcctctgcatcgagcacgtaaccaaggcagtcgcccagggaatgccgatcagtccgtgccccaaggtgtttcagtaccgcttcgacggcagcgaatggttcggcctgatggccgtgcgcagtccggatggccaccagccgctccacatacgagttacgctctcgatgcgtggcaagcccaccacgaactatctgggcgaaatcgagctactcacacgcggcaagtttacccacaatgcaccggtgctgtataagatccgctttcccaaacatcacttcccgcccaaactgctcctcatgtcagccaacaatcatgtgatctgcttcggatccggcgagcacagcatcttcatgacccaaatccagttggagcacattaggaagttgtcctttataccggataagaagagctccctgctgctagatcccgaggaggaggaggtgagaaaaaccgacgacaagccgcccagtacgccgcacatccagttcaagaaaaaaccctttgcccaggcgcccaaggagatttgcggacgcatcgacagggatctggactttcacttgtcccaaagaacggaatcacttcatgtcgcaatcggtgaaccaaagagctccgatggcatcacatcgccagtttttgtcgatgacgatgaagacgatgtcctggagcatcagtttgtggacgaatcagaagcagaagcgatagaaagcgatagcgccgatagcctgccatcgatcaccaggggatcgtggccttggctagcggccatctatgtgaacaacctgacctccctggactttcagtgcggcggttcgcttgtctcggcacgcgttgtaatcagctcggcgcactgcttcaagttgttcaacaagcgctacacatccaacgaggtgctcgtctttctgggccgccacaatctgaagaactggaacgaggagggatctctggcggcccccgtcgatggcatttacattcatcccgactttaacagtcagctgagcagctacgatgcggatatcgcagtgattatactcaaggacgaagttcgatttaacacctttattcgacccgcttgcctgtggtctggttccagcaaaacggagtacattgtgggcgagcggggcatcgtcatcggctggagctttgacagaacgaacaggacgcgggatcagaagctgtcgtcggagctaccgggcaagaagtccaccgatgccagtgcacccaaggtagtaaaggctcccattgtcggcaatgccgaatgctttcgagccaatgcccactttcgcagcctatcctcaaaccgaacgttttgcgccggcatccaggcggaggaacgagatacgcatcagagcggggcgagcatttacaccggtatatcgggggccggacttttcatccgccggaacaatcgctggatgctgcgtggcacagtatcagcggccctgcccgccgtagagacaccggatgcggaatctagccataagctttgctgtaagaatcagtacattatatatgccgacgtggccaagtttctggactggatcacggcctttgtaatttgaatcacatccgaaatgtgtatgggaacgcatttctaagtgagcgctgtgataatagccccttgggcatggcgatgggcaaaagttactcggagtaattagcggttatcggttttttctttttttttttttgctagtttcattacgaaaacttctgattatggcatttcagttttatttttatctaagacagtagggcaattcaaataataaattatggcacgggaaagccaaaaaggaattttcccat

SEQ ID NO: 1368 - protein, 528 aa, DROSOPHILA
MRLHLAAILILCIEHVTKAVAQGMPISPCPKVFQYRFDGSEWFGLMAVRSPDGHQPLHIRVTLSMRGKPTTNYLGEIELLTRGKFTHNAPVLYKIRFPKHHFPPKLLLMSANNHVICFGSGEHSIFMTQIQLEHIRKLSFIPDKKSSLLLDPEEEEVRKTDDKPPSTPHIQFKKKPFAQAPKEICGRIDRDLDFHLSQRTESLHVAIGEPKSSDGITSPVFVDDDEDDVLEHQFVDESEAEAIESDSADSLPSITRGSWPWLAAIYVNNLTSLDFQCGGSLVSARVVISSAHCFKLFNKRYTSNEVLVFLGRHNLKNWNEEGSLAAPVDGIYIHPDFNSQLSSYDADIAVIILKDEVRFNTFIRPACLWSGSSKTEYIVGERGIVIGWSFDRTNRTRDQKLSSELPGKKSTDASAPKVVKAPIVGNAECFRANAHFRSLSSNRTFCAGIQAEERDTHQSGASIYTGISGAGLFIRRNNRWMLRGTVSAALPAVETPDAESSHKLCCKNQYIIYADVAKFLDWITAFVI

SEQ ID NO: 1369 - DNA, 3572 bp, DROSOPHILA
ttggtaataccaatattttccaataatttctttgttttggctgaacagttcagttgtccgggagatttcagtcaagcgtagccatttttgttaccatggagatcaggttgtgacattggctatgggttttgatatcgggtgaaatatttcccttgacgtgattacaatattcctattttcccttcttacgatcttatcgaatagcttacacattgactaaatataagacccaatatatataatacaatatatataattacaacttcgcggtttgttggtttataaaaaaaaagtatttttattgatcaaaaacttaagcgaatgtcggagacaaattcacgtcttacacaattgaagtatgaataaaatctaaatctaatttgcaaagcgaacgcttagcaaacccttggctgagcttatttacttcttcatattgagcgtacataggctctcatttatgtttacgttaattaggcgctctcttgagtggattgcgcatggatatagatcagccgagtttgagctacgtggaaagttttgacccttaaagctgtgttagcagttttgaccctctggtgggagtcgcgaatgcggctgcggatgtttatgtctgttggattgggtgccttcttgagtggatcactcatgggtactgatcagccgagaacttgagctgcgtaagcggttttgaccctttggtgggaataactgattcggcagcggatgttaatgtttacattagggtaggctggatttgttattgtcaccagaatttgggttcttattggatacacgattttatgacttatatcctaaggcattctatgattttgtgtatggctgttcctatgtggttatgtatgtgtgtgtgtgtgtaagtatatgtggtcttatactatggcacatatgctactatatgtataataccaaaatacccaaggtaataaggtactcaatactttctagaccttctccaaaaagaacaaaaaccgaaacaaccttcccccttgatatgtaataattcaatttacttctactaatcaatatggtaaaagtcttgttgatataaaaaagtacattttatagttccgggttcacgaagtggccctgaaagtaaatgttttccgcatcgcgaatgacataggcaaatggatgattgacattaaaatccattggcggtgaccgtatactcttatagcgaaaaactacagctgccaaaatataaaacatattataattgtagaaaaggcacatcgagtacatacctgttgcagccgctgcttcagaaccttcctcattaacctctaggaacgccttgtgaacgacgcctcccacatgagccccactgttcgcgaccagatcattgaagtcagcagacgtcttaaacgcatcttgtatgcccatctataatttaagtctgttgattttaagggtgtaccacgaatgatctgcaaatacccaccgctataagaacttgctcaagacgagcggagaattcgattttgaacttgggaagccttagatgcacatttatattgataagttttggagtgaatcctaccatctttttctccaactctggtagaccatcaaccttgtccggtagaaaaatgaccatggaaaggtttgaatttctgtagggcagctcgataacattggcacctagttctctgtcgtatgaaaccccaaatggcctaactagtgacatcatctggacaggaacactcttttgatccgaaatatggaaatcggacttcgtttgctcggtattaaattttttctgccactggcctttaaagtaaatggcatttaagatgaccaataccagattcgccacgtcactgggcataactaagtctctgattttaccactcgtctgagtatctacccacttattgacaatggaagcggttatcttgggattattagcgctgattgcttccgcttcagccttaaaggaatcctttaccatttgattgtactccggtactagcttgaacttattgttaacgtatatgcgatttgccagactcagaatggctacgctctcgcgcccttcgagtttactcagaagatccttgaatttggctgccacttccttcttgtcgtcgggcagtttcaaaacatccctcatttcttgggctgtctttcccctggcgcccatgtatgccaggctcagtgcgatttccaccgataggggagaggtaatgagattcttgtcggcattttccttggccaaaagttggtagagatcgtcggtgaagcgacaagacaccgacgtggccaaaagaagcaggcctgcggttatcacatattattattcctctatttgtttttaaattagtttacttacacaaatacttcattatacaacttcgtttaaaagtgagaacaaattacattgcacgaattatatatagtctgcatactaatcaaattagactcgccatcgcgatataaaatgttttgcgcatcggttggatttcgttaagtcatccttatagaatcatttagaaattacataaatatgttcggtttggcagaggttttaggctctgattcgatatataacagttttttagtagcaatgtagtaattttaatagtttgtaatttcatcaacttccaagcttatagcagtcatgctcggaaaaatatttaagaataattaaagcaataagaacaattcatattttcgtacattttataccccttacacgtagagtaaagagtatactagattcgttaaaaagtatgtgggtgacatgcacagagaagcgcttcagatgctattaactacataggaatagctgattcgatttaaatacgtccgtctgtatgaacgtctagatttccggaatcaatattatagcttacactcaagctaaaagggttttatttacttaagaacattatatcgcggctgggatctttaacattataaagttcttaattgctgaaattaaaattctaaagccaggcaattaccgatttccgcttttgtaaccgacgttgtaagcaaaatggtctcagatggtgagcaacgagacttgcgattttttatactcagttttttggcgttcaacctataattaaggtttattatttagccaagcgagcgaaactgttttcggcagtagtttgccatagtcattgtcagttactgagaagcagatgcgaatggtttaagcaaacaagattttgttgacggcaattctggaacgtgacaagatcagattatatataatttcgatagatagccaaagtttccgacaatgtataagtctaatattccatattccctaaattaactactacatattctgcttaattgctgctccttaatcgctttcagcataatgaccaacatatgttcttagtatacccgactacttgaatcgatttctcggagcaggcttcaattattttctaatttgtttgcagccaacaaacgaattcatcaataaatcggtaaaaatctgattaatcatcgaacatacgagcctcagagtgacccacacgtcattgtccaattttcttgggcttgagcatatgctaacgaagaacaatcaa

SEQ ID NO: 1370 - DNA, 1405 bp, DROSOPHILA
gttatatatcgaatcagagcctaaaacctctgccaaaccgaacatatttatgtaatttctaaatgattctataaggatgacttaacgaaatccaaccgatgcgcaaaacattttatatcgcgatggcgagtctaatttgattagtatgcagactatatataattcgtgcaatgtaatttgttctcacttttaaacgaagttgtataatgaagtatttgtgcctgcttcttttggccacgtcggtgtcttgtcgcttcaccgacgatctctaccaacttttggccaaggaaaatgccgacaagaatctcattacctctcccctatcggtggaaatcgcactgagcctggcatacatgggcgccaggggaaagacagcccaagaaatgagggatgttttgaaactgcccgacgacaagaaggaagtggcagccaaattcaaggatcttctgagtaaactcgaagggcgcgagagcgtagccattctgagtctggcaaatcgcatatacgttaacaataagttcaagctagtaccggagtacaatcaaatggtaaaggattcctttaaggctgaagcggaagcaatcagcgctaataatcccaagataaccgcttccattgtcaataagtgggtagatactcagacgagtggtaaaatcagagacttagttatgcccagtgacgtggcgaatctggtattggtcatcttaaatgccatttactttaaaggccagtggcagaaaaaatttaataccgagcaaacgaagtccgatttccatatttcggatcaaaagagtgttcctgtccagatgatgtcactagttaggccatttggggtttcatacgacagagaactaggtgccaatgttatcgagctgccctacagaaattcaaacctttccatggtcatttttctaccggacaaggttgatggtctaccagagttggagaaaaagatggtaggattcactccaaaacttatcaatataaatgtgcatctaaggcttcccaagttcaaaatcgaattctccgctcgtcttgagcaagttcttatagcggtgggcatacaagatgcgtttaagacgtctgctgacttcaatgatctggtcgcgaacagtggggctcatgtgggaggcgtcgttcacaaggcgttcctagaggttaatgaggaaggttctgaagcagcggctgcaacagctgtagtttttcgctataagagtatacggtcaccgccaatggattttaatgtcaatcatccatttgcctatgtcattcgcgatgcggaaaacatttactttcagggccacttcgtgaacccggaactataaaatgtacttttttatatcaacaagacttttaccatattgattagtagaagtaaattgaattattacatatcaagggggaa

SEQ ID NO: 1371 - protein, 372 aa, DROSOPHILA
MKYLCLLLLATSVSCRFTDDLYQLLAKENADKNLITSPLSVEIALSLAYMGARGKTAQEMRDVLKLPDDKKEVAAKFKDLLSKLEGRESVAILSLANRIYVNNKFKLVPEYNQMVKDSFKAEAEAISANNPKITASIVNKWVDTQTSGKIRDLVMPSDVANLVLVILNAIYFKGQWQKKFNTEQTKSDFHISDQKSVPVQMMSLVRPFGVSYDRELGANVIELPYRNSNLSMVIFLPDKVDGLPELEKKMVGFTPKLININVHLRLPKFKIEFSARLEQVLIAVGIQDAFKTSADFNDLVANSGAHVGGVVHKAFLEVNEEGSEAAAATAVVFRYKSIRSPPMDFNVNHPFAYVIRDAENIYFQGHFVNPEL

SEQ ID NO: 1372 - DNA, 17369 bp, DROSOPHILA
gatacctatattcttgaacagaacaaaattatattttcatcacaaaagatgatttcagagcagtaaaggtgtcatcgttactagtttttttacatcgttgaggcgggctttgatttgaaatcagtagatttttttaaggaaaaaaatcaacggatctatttactaaattcataatttgtggtatttaaaaaataacatttagaaaaatagacttggaaatgccttttttttattctgaataaaattctttggtccccaaattacttactaatgtataaaaagtataacgtaaatatctcttactcatgtttgtatactatgtttagtggacatcaataaatgcaacagaactctactatgaaaaattaaccaatttttttctgaagcgttatttacattctgtaaggcatttaatcagtgtggcttgcattatgagtaagtgagtggcaaaagcaaaaaaaatgttcaacccaaaattcgataaaaatataaattgccatacataagcatttttaaagccgcgaaaccggccacgtccacacttttgaacaatttttaaattttgtcgaattttttcctaataaatttctccgttctgaagttattaattttggccagaaaaagtggttaggtttcccatagtgcagtccaccccgacacactcacacaggcgctgtcaaatagcagctgcactcattttaaggtcagctgcattcatgacgttttcttcatcggtcagtggttgcctattggcgggagaccttaatgagatttaattaactttatgctcttccggtaatattctgaatacgctattgtgcaaagggactcttatcaggatagcccagctgtaccgttatcagtgcattgcttcgatcgcatgcgcaaaaacgagctttcagccgaaaaagcttgctctcgttcgacctctgagcgtttaaacatgaaataacggaggtccttgctggtgaggctgaaatcgacaatcagtcaagtttatcggggcggcttagtttagtcgaaggatattgctcggtgtcttgcgtgcaaacttgctagcagaaaaaatttaacacatcgaaaaagcaaataaccagcatagcaaacgtatgttaaggaagtaatcaaggcggacggttatcaataacttccaaatatcttggacttatatgctggagctgttagttactgggatacaaatttaaagcaaacgagggtttgttgcaataggcagagggtacacacgctcgcgagctgttatacaaatgaaatcaaatagagcatttaaacaagccttgagaaactgagcctaactcacacaaagaggagaaacacatgtacgcgcatacctagacaagaaagtgattttccacaagaaaagggacgagaggtgtgtgttacttagtttgtcagtcgaatatttctcaatggggaaatgaagaggtagtcatatgaagagaaagaggcagcggtggggtagagagcagcgagagagcggacgaaattttctgattacagttaccgtggtctactatggtgtcgaatgctgcaaaaaaggatcacgagttttaacagaacaatttcaatatgataaccaacttatctgtagtggttaggcaacatttgatatttataatgtttttgttttttatgttgtcattgaacagttccattacggcaataaatgtgcggtacagccatatgcaggtaagcacacactttcgtgctctaacagttgtacatatgagaatattcaccgctctctctctctcaaggacgcttccgcagtgcatttaatttgagtggacggaggatgcaccgataagtgtcaagattacttgcttatactttgtccctgtatttcgattttgccttgcagtgcttcgattcagacaagtgaactattttatgttcttgtcacattacaaacaaataaaccaaggacatggtgtcgctttattactaaaccacaaatacgaaataagctctccgaacaacgaataacatcctagaagttagacaaacgagatggaagcaaatttggagaacggtcagaaaacgatcgcctcgacaagcaaatcgcattcgcagcgtcaaacaacatctcgacggcggcaaaacgacagcgatgtggccggaggcgtgggaatcaccggtgggggagtcgtcattttgccgcagcacgtgcttaacgaactctaccacaactactccatcaaacaacgccgcagtggattgaagtggtttgtctttgcggccgcgttgtttaacatatggaccatcggaattccctgggatcagtcggcccctacgagaggtgagctatgaatagaaataaattgtttaaagaaattagtatcgcgttaaagaccttgtcggatggatgtgtacataacttatacctcatatctgacaatgtatatttataagaataactttttaaatgattacagtcgtgtaatttcctgttggaatcaatttatcaatttattttattcatttttatatatgtccaaaaataaattttcttcagcttcagttataagcttggatggacagagtacttatttaggtataaaatgaaaaatcgtcaatctgccaacattcacgtactctcttgattttaatttaaatattgtttacgcccagaatgatactgcgtacttttttgtttaatagagtcggttcgtctctctgtccgtatgaacatcgagatctcggtaactataagaaccaacaagttggaactaagcataagtgttttttttacaataattaaaataagttatatcaaataatttcatgttattccatattctagtgatcaactgttgtatgctgttagcttacttggcattgacagcgctccttcatattggacgccgttctgataaaccggcactgaggcgcttccaccaaatactcctgattattgtgccacgggcactgtggctattaagcattcttcattttaccgtttatgttattctgcagcctagtttttctccaaggtaagctattacaattaaaatgataaatactggaggactccacaaagtgtattttgcaattatacaaagggcaagaagcaattcatgtgtgctttcaatttcttcatcgctttcagggacctacttggctgggccatccttctaaatttcttggtctatgtgacgctgccattacagctgatttttcttggtctgtcgattggatgtatcacatatttcatttgcctcagtctccctgttggttattctcactgggactcgctgctctcgaaccaattagcggctaatgcagttttgatagccacggcagcgctgataggccttttgtactactttatgggtgaggccaagcagaaacgagcctttctcgaggccaaaaagagccttgaagttaaaatggtcatagaggaacagtcggccgaacaggtttgcattctgttttactgaccgtggatatgaaatataaaatttgcccctattaggagcgtctgctattgtctgtgctgccaaagcatgtggctattaagatgcgggaagatttgggatcatccagttccgaggcttttaaaaaaatttacatgagtcggcacgagaatgtaaggtaagcattaaatcgattgactcttcaagctgtaaaaataaaaaattcttagttattcgttttaatatttcaaatatacatacaaatgtacataaaacagaattttcttaacttgataaaaaacgcttagaacctgttcattgtcgctaatataaaacaatactatatgtccattaccaccaaattttattttaatcaaatatatcacaacgtttttatattctcgcaaagctcattcatcgaaagtatttcacgctcctcaatatgaactttacatttcctaagctcttaattctcattgtgtgtgttctcaaatgtgtcagtattttatttaatctctattttacttacactgcctctgcaaataaatttcaaaatatttttcctattttttttttgttcaaacaagcattctatatgcggatatcgttggctttaccgccatctcctccacatatagtgcgcaagatttggtaaaaatgcttaacgagctctttgcacgtttcgacagacttgctgaggtaaatttgcaaaatataaaattgttgtctgttaatgattttgattattttaaaacctcgttgtcatttaattttgtattatgttcattatatttaatgtttatttctaaaccacgtaaaaagtttttcttcttaaattatattacaaaccacataacgtgaactttttaacagtatgcagtcgcttacatttattaaaaagagacagattctttatattgacagaaagacatggtcagattgacttatgtagtagactttattaaaagtactctattttgttggaaaagcttcctcctacctgttaaatacttttcaaattatctattacatcctctacgagtgtgtactagtatatccacgattaacggatatacaaaaaaaggggatacacatttgtataatttattgtaatgagacacagaaggaactctgttcgttggccaaaacacctttttaatagtcgttgatccaaattaaacaaaaaccttggtatataccatttcagaattccgataaagggcgattcaaacgcatgttgaaagcattaattctttaaacagttaaatatacaattaaatgtgatgtttttgaacagttaaaatttatggtgttatcctagtacaagttgtagtcacaagactacacttttaagacagtaatagatttataaatcatttctgtatggttcaaatgtcaaaatggtcaaaaatccacaacgtcagaaattagtggaaattaggttgtttttctttgtttctccttgaattgcaaatttttttaaatcttataaataactataataaaatcaattcagttaaaacaagagagaatgctatagtcgtgatcctctactatcagatacccgttaaagaaattaaaaaattttaaataagaaagaaaggtcgtggccacagtgtttttgcaaagacactagaatattattattataatataatattattctagtgtatttggtttttggtttacctataaaaactgccaatacaaatcataaaacgagaaaaatctaaacatttttccaaagtgcgtacagttttgcgccgtttttgagcgttagagtgggtgagcgtgacgaaaagttgttggcaaattgaaagaaattttgtaccttaataaaattatgaaacaatatgtgggcgttagagtggacgtcgcaacatgggtttctggagtctgcatacttaatctcaacttgcaagccaaacaataatttttttatatgtagttcctgagatctcgaagttcatacgaacggacagggatagatcgactcggcttttgattctgatcaagaatatatattcatactttatatggtcagaaacacttccttctgcctgttacatacttttcaacgaatctagtatacccttttattttacgagtaacgggtataaaaataaagacagccagaactgctctttggttgaattatattaagatgaaagcttcagtaatcagtccagaaactgtacaaaactgttcaagaaataaaattttaaaattgtattaattagtgttaaaaaacagcaacattgaaaaaatacatcacatgaaagactatattcattcgatcctatcctcttaatttagggcaaaagaaatagtcgttgaccccactgcattaattacccgcgctacaagtagagctggtgtgcactttctgaaagttgctttgtcgcctgcatatctttatctcgttggcagaaagtgcgagtagcgggaatatgattcgactatagcattattttgtttttctggatgacttaaactgtttaaatttaattaagaattttaatttcactgaattacaaactagattttatatgaaaataagcctattgatttattgattgttaatttgtgatcgtacctaaactaaaccacaattgccttactctagaaatatcaacaattgcgcattaagattcttggcgattgctactactgtattagcggtgcccctgatgagcgtccagatcacgccgtcctgtgtgtgcacatgggactctccatggtgaaggccattaagtaagtagcggttgtagattttccctagggaaagtgggaaacagcttgacaggcgaaaggtgacgatgaatccgcgcttgttcaattattaataattaaccacgctcgctccttttgctagttggggcttctaagaatcagccacttattactctctccgtgtgcttgaaggtatgtgcagcagaaggccaactcacctgttgacatgcgagtaggcattcacactggagccgtgctcgctggaattcttgggcagcgacagtggcagtttgatgtttactctaaggacgtagagctggctaataaaatggaatcgagcggaaaggctgggtaagtcaggcatactttcaaaatgcatatttataatagccatcgttattgctcatttgtttacacctgtatattaacgtattcttacaaacttaaattgattaccttttcagacgcgttcacatttcggacaaaacgcttgcctttctgaacggcgaattcgaagtggaggccgcctttggagagaaacgagaggagttgttgcgtattgctgggctaaagacgtattttatcaccaaagtagttaaagcggtgagtttgaaaaaaggatccttgaatgaagcataggatttttaatatattttcatgggagctaccaacccaatagcttccttcctcattttcttatcatgctcagcttaaaaaagttctatttaatatgtacatgtaaaaatgacttaaaaagtacgctctgaaaatgtatttcctcgacgcgcttaacacaaaatttttacttgttacggaacctttcttttaaaagtgaaatattacgcctttgggaatttatgggctatacagctttaatttaggctcgtttaagcaagatataccaaagatttttccagtccttaatctattttatttggaataaatagttcgaatatccaaaaatcattaggaatttgattttctagcaacatacagcacaaatctctattcccatgtattcagcaatagctatttggaagcagctagaagctaagctagaaatacaagttacacttgcgtcgatatattttcaacatttaaatggttttattacccgaaatggcgtttggtactctgatacaaaccataaccacaaatacgttcaacgacctatagcacagccacaaagttcggaatgatgagatttaataatgtagatatttttaggtgtttttatgctaaattacctttgttttttaactgttaggtattgttaaaattctttatattgcaaggatttagggaaaagagaatgttcaaagaatgttttgatttccgtttgcctactattgacgttcacaaaaatcaaaaaaatatgaataatttgtgaaatttgcatgtaatgtaatttatatataacacagttttataagtcaatgaaagccgattaagaataataataataataattccagtttgcatcgccatgtgccaaaaaaataaatgaaacccaggctgaaattgcacaccccaatcctaatggatcgacgaccgatattgtatcagatgaagatgacaacgatgccacattagacgacgaagagctcctggcgcagaattctgtatccaatggacaccaaatagggattgcagtgactgcagatgaagaggagcaggtgaaattggagaactttaaacaacgactgaaagatgagctggtaacgcgcgacggacatgagtaagcaaatatttgctatatatatcgtatatcgtatatatagtacatgttactatagcgtaacatactttagcacattacgaataaagtaatttgacgaaatatattggagaaactaaaaatcaactttttttctagaaacctaaccaaggacactaacatattcttgcgcttcaaaaacccccagctggagcaactgtatgccgtatatagagagccgtacagttcacttccacttcttgccgctcttctagtgcagtgcattgatgtgctgtactcatacttagttctcccgagatctacactccacttcattaatatagctgctccgttggtgccgatcgcaatgctggtagtgatcagccttgccgagagctttagcggcatgctgcccaagttttttgtagatgtcagcaagcgcttcaatgacataacctttgttcgcgagctggcagccataattattgcactcaccattggcttcagtaacgtaatcgacatggttagtttgtgcttttatcaaaaagggctatgcactcagatattgcaatgcaaatactttaaatgtgtcgattaaattttacaatgcgtgaaacgcaataaacaagatgttttaaccccacaatgatacgtacatatatgtatacaaatattcttggtcactatcgtcagcggagtagggcgttttagttttcttgtttttatcaacgtcatttaaatttcgggggcagcattttctatttaattttattcaaattggatattggatcgtttaggaactattggaaaaatacattatacactcataactttatccgttaatttctttcgcacatacgttcgtattggaaaaataaatataaattcacagacaccactttttattttaagtttacaagtgacattgtttttcagcttgtgggcgaaatataaatataaataaaatatacaataagaaatattgtcgttgaaatttgggtacttaaatttctgaaataatgtcgttgtacttgactaacaatcgtgatcaagaatattacccctcgcatagcacgtatttttatttgatttacatatttgccccaaaaatattttaatttatttaaaaaaaacctaatgtcaattgaaaatgactgcattcatttttttttttgcaaatgtttaatttcaaagagtttttgccatgacgtgcagtccatacattaatttccatttcctcatcagttctttttcgtcaccttcgtgcgtaccgagcatattgtgagtgaaagcgagttcaatgtaacggctagcctagaaagcgatataaacttggtggtggaggggatggtcaccgcagagcacctacttcccgcatcgtttgtggaacaaatgcgagatgctgtgcctacggaacgagttctgtatccgtcctacttaagtaacttcggagtactcatattaattgcgattgccgtgattgcccaacttactcatctcacaaagattttgctactattgtccattgcaggtaactgtaattaaggcgcaacaattttacatcgtaataaattacttttttctttaaagctctgcattgctatttcaatatattcatcatgcaggatctttatgctctagaggatgatttcgaacatcaaccgtaagttaagttagtttagacttgagaaagatgctttcctaaaaaaattatacaaaattacttgtttttcttggttttttgattattcattaaacataattagtattatatctacgcgatatgccgcttcaggacttttgcttgtggctgctctggcgttaagcaccttggcaagacacgtaagtgtaatataaagtaaggcgcctgatatatcaaattattgaaacttttagatggaccacgaggatagggtaatattcaagtggaaaaccgaggtggctgagcaaaaggagaccgcaaacgacatgaggcagcgaaatgaggctttggtctacaatgtcttacctgttcatgtggcagagcacttcatgaagaacactaaacgctctcatgatgatctttattcccagagctatgctgaagtgggcgtattatttgccagcatgccgaacttttctggtgagattaagctaataaaaaactaaaaagtccacatataaacaattgcacttcagcgattatctatcaacttcgagagttagaaacacacaataccttacttataacttatgcacctcatttgaactgaggcatatttttttttggcgcgcgagtcttactgccacacctcccgcccaaccgaccgagcgctgccgtgtatcgtacggttcgattcgcgagaagatagacgcgttacagaaaagagcacagaaacgaggaattaaatataaaatatttattaatattagtaagatctaattatgtgttcaaaaagatagaattgatagctttaagagcggcagagagtcaagaatacagattacagtgttttatattaaatctacaatgatttacgattagggctttctagtgaatttacttggaacagagaagtagagccgactaccaagtccggactatcaacttcaccacaaataagcatacaaataaagactcttcaaagcatcgttttacggttagctagggaaggtaaattaattaaaagtagtctactggaataaggatgtaaaataaggtttgcatcccaatttaggtaagaagtttttttttttgaccgattcaatgcggtccgagtgaactacgtactgtggactccaaacagatgatccatactcaagaatcggacggactagcgaaatgaatgaggttttggtcgtgtaaggatgatcaaattcctttgaccacctttttataaaaccaagcacactcatagccttattgataatagtcgatatattgtctggaaattttagtttagggtccagaaaaagaccaagatcatcaacccgtataattctgtcccccttgcacccccttggagtgtcagtcgtgtgttgagtgagttgatacgacaaaggtcataactttacaattggatccatttaagcttaacgtatatcacggcaccatatttgaaagctatctagatcggattgtaagcccaaatagcaagaaatatccttttgtggagacataatttaatatcgtctgcgtacataagtacacgcagcttaattttattactaagggaaggtcgttaatttaaattgttaataagcggactgacaccgggagtgactcggagaatacaagaacccgttgtgtccgtagcgtcatattgacaaaagtgaacatcttaactttgtgaatataaagtgcagacaaagaaattagaattcaatcttaattgtttgaacttattgtgatgtctttgatataataaactaaagatcctcggacaagaataatttattttgccactggacagaattccattcctgtaaaacaataaatctaaagccatagacgggataacacaagttatattttccaatgtttattctaccaattccaggtcctttttgttttttgtttttttaattggataactgctaaaacttacggcatacatagatataaacgcattgtctgaatctggcagctgtgtgcacaaccggcagttaatgacgagggaaataactatctgcgctcttttttttcagatttctattccgaagaaacagtaaacaaccagggcttggaatgtttacgttttctcaatgaggtcatctcagattttgatgcagtaagtaaatgctttcatattatttcttatacccctgcagagaaatattagtcagaagtcgatatagctatgttcgtctgtccgttcatgtatttctacgcaacccagcctcttagtcgtacagctttggaatgaaactttttcaaaaggaagtgtgtatatgtaagtcggactagtcggatcggatcactttataatattcttcgtttttttatcatttcggttttaatttgaatagcatcgagcgattatatcatagcttccgaaggaacagtttgaaaactaatttaaaataaaaatagaaaatgaatcagagtttcgtgcttctaactcggtatatgacactattttgatcttatattttttcgatttcaatttgatgggcgactatatcatatagttgcagtaggaacagtcgaaaaattaattgctgcaagggtatatgagcatgccgaagcatatttcttgttaaatatgatatcaagaaattaatagaattctcatgtattagttgttggagctgccacaattccaagacatcatcaaaataaaaactattggttcgacatatatggctgccagtgggataaatgtgcaaaggactgtccgaaatgacgccccaattacagaacggtggtctcacttagcgattttggtggagttcgcactggaactgaagcacgcattgcaaagcatcaacgagcagtcgtttaaccacttcgtccttaagatggggatcaatcatggaccgatcacggctggcgttattggcgcacgtaaaccgcattacgacatctggggtaatacggtgaatgtggcatcgcgaatggaaagcacaggaaaggcgggcgccattcaggtcacggaagagacgtgcaatattttacggctctttggttacaccttccttcagcgtggcctggtagcggtcaagggaaaaggacagctgatgacattttatctgcaggtaagggttatgaattttcataaagccagatatcttaagcttaaagaagctaggtttggaaatatcgaatatacgatcgccgcttcagttgtggagcgatagcttacgcaatggagcggagtgatgaggatattatccgaggcaatacccgttactcgtaaactaaaagggtatactagattcgttgagaagtatgtaacaggcagagggaagtgtttccgaacatataaagtatatacattcttgataaggatcaacagccgtatcgatctggccatgtccgcccgtcttaggaactgtacaagctagagagttgacattgagcattctgtttccagagacatagttgcagcgaaagtttgttgattcatgttgccataccactcttacgcccacaaaccgctcgaaacatttacgaatataccttggcaaaattctttaatattttttttatatttttgccaggcccactcttgcgcctaaatccgcccaaaactgccacgctcagactttggcaaaatcttggaatattttttcacatttttattagtcgtgtaaaattttatcgatctgccaaaaaaacttattgctagtccactcttacgctcacaaagcggacaaaaaatgcacgtccacacttttgaacaatttttaaattttttctcatttactaattctatcgatatcccagaaaattttgaaatttcgggttcgcatttatactagctgagtaatctgatagtcggggctatagcattctctcttgttaaaatttgaaagctggagtcgtttgcccaccaattagttttgctttgtccacgtttatttctgaaaatattacatttcacttgacttctgtaacgaactgattttctatgtcttccgtgtcctgcgggcctcttgctgcccgacgcttccactgtttattccttatccgcgtgttctcactccccaactccttccttcaacggaccgtctcactatcttcttccacgcgcggtctggctgactgatcactactcctccgccttcagactccgtttcgaccggtactctcctcggctatcctcgcgtacgtacggctcctcgcgtgttgacactgactgcctcgggatgtccataagtccgaggtccataagtcaccgtttacactgaccgccctttaacttcccgccttccgttctgcagtccaccatctctatttgcttagtttacatccacagcagctgtatggtgtcatccttgctcccgatgctgggaaccaccactttgcatccctgccttttccacgctgtcagtggaaaacgacccactcgtcgtcggcttccgtcttctggggctctcgctcctattgcctcccgtgcatcgcctctttggatccggcgattgtacccgtattgcggttgcaacctgcttctcctggctcgagctccttctcctgcgcgtgtgtagctgcttcttctggcttctgatcgtaccgatctccgtcttctgttcgcgagttgaagcaaatggttcttattatagtcgatttattctactgttttatgactgactcctccggtgatctcgctgctcctgcggcgtttctcctgcaacgccttgccttcgtcgtcctgtgtactccttgccaacggacgacgtgtcgacccggccgagattaggatgttatggggcagggtgtatcgtccacgggcgaagcaacgcttggcccggaccacctttgccgaccactgactccactgttatttaaaagagaattttttaagtttgaaaaaatgacatattagaggtcatttctgtcttctcagagaagactactatcttttaatagtagaattataaaaaaacgcttggccaacttattgttgtgctatttgtctcaattgttttttttaattatttcaaaattaattaaatctacgtatgtttaataaaaaaaaggtaggcctttttacataattgctattccactattgtagttaacataacattttgagtttttaaaaaattcgactctttccacgtattttattttgctgtggacaacacgtaacacgtagaagagtatgcgaaggcgactactatatgtacatcatgcatatgtacatgcaagcccaaacatatgaaggcatcctgcggttgtccaacggtagcgctattactaaagagatggaatttctagactttaaaaccaggcccgtttgtttctatacagtctgcagcttaatcttacctatttttgtttccgccctctcctttttaaaatttcttttttctgatagtcgagaaattcgacttaagccttctcccttgttttaaattgcacgtaatataagagaatagtaatacaaaatattcttctcttcttcaagggtaagtcccagtcgagtgctgaaccggtagcatccggcgtagtcgtgctcaatgggcaggattcatctgctgtagaatccacaagcgaactggaggcctcagacattaaaatgcccttgctgaagatgaatggcccagagcaatcgttggaaatcgaccaagatcgaagcttaagaaatgacagtgctggccaagagagtgtggcagaatgtcagtctttgctagaatagtaagcttgtcatatttatgattttcattctttgtgaacatttaggatgagtggatgtgtatgcgtgtgagtggccgtgttaaaaaaacaagagttaactattttgaagaaattatttttgcaataagttaggttttgcctcagtgttcgtgtgatattccatgcaagatgattaataaaataaataagcaaaattcgaaattagttaacataatagatttgcttttgtaaactgtgtacctaaaacaagaaatatatctatcttctaagtatatttttgtatgtttagtattttcagttattctaaaccatagttcgtttaaaaaaatttgacattttcgaagctctgtaatatttaagtgattcgctttgcagctaattgatgtgcagattagcatctcaatgtgtaaaatatatatatccgcattatagttaaaaccaaaattacgatataaataacattgcagttatagaaatatagaatttatattagttgagagtccaaatcccaccatatacaactaaaacccacgtgtcagtccaaattgagaacaaaagatactacaattaattagtaaaaaagtattaaatataaaaatggaaatgaaatcaaagaacaaaaatataatccttagaatgcgttcttggacgtcgtcaaccaacattataccttcatatatatagaaatatttaaattaaaacaaacttattagcattgcatgctttttaaaacattgcaacgaattttagcaaacaaacgaaattaattatcaaaagttgcaaaataaacaaggaacttgacctaaaatcttttgaatgcgtttgtccatcagtttttttttactgcattatgtaagttttgctttgatggtttaaggcatgacaatcaagatgaataaacactatacaaatgattgggttagctcgaaattccacagtttaaaaacactatgaactatttttaaaacatacattttattgaatgattttagaagattgggtcgttgtgttggtttcttcatggaaccttaatgtgaaataaggttttatttcattaaatataaattaactaagatataaattatttaaaacctaccaaatatagcaaattttagagaaataaataaaattatttaagacaaagacttatggggtttttacccccttgttcacatttaatacacatttccggtgcataaaaaacgaggtaatgaggtaaatttgagataaatcatagtatatttatatatatattatatattattatatatatattattatattatatcattaaatcataattctctgtaaggagtcatgcaactcatattttgattacagagatttaaaattagaattgagattggcaacaataaggaggtcccaattcatgcttcttaagatacatagtaaatgttttttgaatatatttaattccagtaacctcattttgcggacttgaagtaggcaactagcgaaacgattaaggctttagttgtgtaaggatcatcaaatttctttgaccacatcttataaaaccaagtatccctgtggctttgttcactatgggctaaatatcattaaaaagttaaggtttgggtacagaagataagcacccgctaagagtgtgtcgcgtgtattgggttggagcgacacttggagccatttaagttatcacatcagcttttttaaaagctgtcttgatcggattgtcagtccgaagggccaaaaatgtccttacaccatcggcatacataagaaaaaggaaaggatattaataaacatggtaagaagaagtggaccgaggtggctcccttgtgcgactgaccttttgcttccttaaaaataacttgcagcagcgccaatcaaagcacatagccaggagttccgtcgcgacctctcgaatagatatgcttaatgtttaagatcgtaaaggagggatttcatttaaaattgaatgttaattacttcgagaacgaggttttattttattttggggcaacagcttggttattttaaacaaaagtccatccagccacacgctgttaaatgcatgcaatacgtctagaaaaatgactgtgcaatgttttcgatgctgaaaagtttaacgtgtaacgaaataaatttatggaaggcaagggaa

SEQ ID NO: 1373 - DNA, 5046 bp, DROSOPHILA
cggggcggcttagtttagtcgaaggatattgctcggtgtcttgcgtgcaaacttgctagcagaaaaaatttaacacatcgaaaaagcaaataaccagcatagcaaacttccattacggcaataaatgtgcggtacagccatatgcaggacgcttccgcagtgcatttaatttgagtggacggaggatgcaccgataagtgtcaagattacttgcttatactttgtccctgtatttcgattttgccttgcagtgcttcgattcagacaagtgaactattttatgttcttgtcacattacaaacaaataaaccaaggacatggtgtcgctttattactaaaccacaaatacgaaataagctctccgaacaacgaataacatcctagaagttagacaaacgagatggaagcaaatttggagaacggtcagaaaacgatcgcctcgacaagcaaatcgcattcgcagcgtcaaacaacatctcgacggcggcaaaacgacagcgatgtggccggaggcgtgggaatcaccggtgggggagtcgtcattttgccgcagcacgtgcttaacgaactctaccacaactactccatcaaacaacgccgcagtggattgaagtggtttgtctttgcggccgcgttgtttaacatatggaccatcggaattccctgggatcagtcggcccctacgagagtgatcaactgttgtatgctgttagcttacttggcattgacagcgctccttcatattggacgccgttctgataaaccggcactgaggcgcttccaccaaatactcctgattattgtgccacgggcactgtggctattaagcattcttcattttaccgtttatgttattctgcagcctagtttttctccaagggacctacttggctgggccatccttctaaatttcttggtctatgtgacgctgccattacagctgatttttcttggtctgtcgattggatgtatcacatatttcatttgcctcagtctccctgttggttattctcactgggactcgctgctctcgaaccaattagcggctaatgcagttttgatagccacggcagcgctgataggccttttgtactactttatgggtgaggccaagcagaaacgagcctttctcgaggccaaaaagagccttgaagttaaaatggtcatagaggaacagtcggccgaacaggagcgtctgctattgtctgtgctgccaaagcatgtggctattaagatgcgggaagatttgggatcatccagttccgaggcttttaaaaaaatttacatgagtcggcacgagaatgtaagcattctatatgcggatatcgttggctttaccgccatctcctccacatatagtgcgcaagatttggtaaaaatgcttaacgagctctttgcacgtttcgacagacttgctgagaaatatcaacaattgcgcattaagattcttggcgattgctactactgtattagcggtgcccctgatgagcgtccagatcacgccgtcctgtgtgtgcacatgggactctccatggtgaaggccattaagtatgtgcagcagaaggccaactcacctgttgacatgcgagtaggcattcacactggagccgtgctcgctggaattcttgggcagcgacagtggcagtttgatgtttactctaaggacgtagagctggctaataaaatggaatcgagcggaaaggctggacgcgttcacatttcggacaaaacgcttgcctttctgaacggcgaattcgaagtggaggccgcctttggagagaaacgagaggagttgttgcgtattgctgggctaaagacgtattttatcaccaaagtagttaaagcgtttgcatcgccatgtgccaaaaaaataaatgaaacccaggctgaaattgcacaccccaatcctaatggatcgacgaccgatattgtatcagatgaagatgacaacgatgccacattagacgacgaagagctcctggcgcagaattctgtatccaatggacaccaaatagggattgcagtgactgcagatgaagaggagcaggtgaaattggagaactttaaacaacgactgaaagatgagctggtaacgcgcgacggacatgaaaacctaaccaaggacactaacatattcttgcgcttcaaaaacccccagctggagcaactgtatgccgtatatagagagccgtacagttcacttccacttcttgccgctcttctagtgcagtgcattgatgtgctgtactcatacttagttctcccgagatctacactccacttcattaatatagctgctccgttggtgccgatcgcaatgctggtagtgatcagccttgccgagagctttagcggcatgctgcccaagttttttgtagatgtcagcaagcgcttcaatgacataacctttgttcgcgagctggcagccataattattgcactcaccattggcttcagtaacgtaatcgacatgttctttttcgtcaccttcgtgcgtaccgagcatattgtgagtgaaagcgagttcaatgtaacggctagcctagaaagcgatataaacttggtggtggaggggatggtcaccgcagagcacctacttcccgcatcgtttgtggaacaaatgcgagatgctgtgcctacggaacgagttctgtatccgtcctacttaagtaacttcggagtactcatattaattgcgattgccgtgattgcccaacttactcatctcacaaagattttgctactattgtccattgcagctctgcattgctatttcaatatattcatcatgcaggatctttatgctctagaggatgatttcgaacatcaacctattatatctacgcgatatgccgcttcaggacttttgcttgtggctgctctggcgttaagcaccttggcaagacacatggaccacgaggatagggtaatattcaagtggaaaaccgaggtggctgagcaaaaggagaccgcaaacgacatgaggcagcgaaatgaggctttggtctacaatgtcttacctgttcatgtggcagagcacttcatgaagaacactaaacgctctcatgatgatctttattcccagagctatgctgaagtgggcgtattatttgccagcatgccgaacttttctgatttctattccgaagaaacagtaaacaaccagggcttggaatgtttacgttttctcaatgaggtcatctcagattttgatgcattgttggagctgccacaattccaagacatcatcaaaataaaaactattggttcgacatatatggctgccagtgggataaatgtgcaaaggactgtccgaaatgacgccccaattacagaacggtggtctcacttagcgattttggtggagttcgcactggaactgaagcacgcattgcaaagcatcaacgagcagtcgtttaaccacttcgtccttaagatggggatcaatcatggaccgatcacggctggcgttattggcgcacgtaaaccgcattacgacatctggggtaatacggtgaatgtggcatcgcgaatggaaagcacaggaaaggcgggcgccattcaggtcacggaagagacgtgcaatattttacggctctttggttacaccttccttcagcgtggcctggtagcggtcaagggaaaaggacagctgatgacattttatctgcagggtaagtcccagtcgagtgctgaaccggtagcatccggcgtagtcgtgctcaatgggcaggattcatctgctgtagaatccacaagcgaactggaggcctcagacattaaaatgcccttgctgaagatgaatggcccagagcaatcgttggaaatcgaccaagatcgaagcttaagaaatgacagtgctggccaagagagtgtggcagaatgtcagtctttgctagaatagtaagcttgtcatatttatgattttcattctttgtgaacatttaggatgagtggatgtgtatgcgtgtgagtggccgtgttaaaaaaacaagagttaactattttgaagaaattatttttgcaataagttaggttttgcctcagtgttcgtgtgatattccatgcaagatgattaataaaataaataagcaaaattcgaaattagttaacataatagatttgcttttgtaaactgtgtacctaaaacaagaaatatatctatcttctaagtatatttttgtatgtttagtattttcagttattctaaaccatagttcgtttaaaaaaatttgacattttcgaagctctgtaatatttaagtgattcgctttgcagctaattgatgtgcagattagcatctcaatgtgtaaaatatatatatccgcattatagttaaaaccaaaattacgatataaataacattgcagttatagaaatatagaatttatattagttgagagtccaaatcccaccatatacaactaaaacccacgtgtcagtccaaattgagaacaaaagatactacaattaattagtaaaaaagtattaaatataaaaatggaaatgaaatcaaagaacaaaaatataatccttagaatgcgttcttggacgtcgtcaaccaacattataccttcatatatatagaaatatttaaattaaaacaaacttattagcattgcatgctttttaaaacattgcaacgaattttagcaaacaaacgaaattaattatcaaaagttgcaaaataaacaaggaacttgacctaaaatcttttgaatgcgtttgtccatcagtttttttttactgcattatgtaagttttgctttgatggtttaaggcatgacaatcaagatgaataaacactatacaaatgattgggttagctcgaaattccacagtttaaaaacactatgaactatttttaaaacatacattttattgaatgattttagaagattgggtcgttgtgttggtttcttcatggaaccttaatgtgaaataaggttttatttcattaaatataaattaactaagatataaattatttaaaacctaccaaatatagcaaattttagagaaataaataaaattatttaagacaaa

SEQ ID NO: 1374 - protein, 1167 aa, DROSOPHILA
MEANLENGQKTIASTSKSHSQRQTTSRRRQNDSDVAGGVGITGGGVVILPQHVLNELYHNYSIKQRRSGLKWFVFAAALFNIWTIGIPWDQSAPTRVINCCMLLAYLALTALLHIGRRSDKPALRRFHQILLIIVPRALWLLSILHFTVYVILQPSFSPRDLLGWAILLNFLVYVTLPLQLIFLGLSIGCITYFICLSLPVGYSHWDSLLSNQLAANAVLIATAALIGLLYYFMGEAKQKRAFLEAKKSLEVKMVIEEQSAEQERLLLSVLPKHVAIKMREDLGSSSSEAFKKIYMSRHENVSILYADIVGFTAISSTYSAQDLVKMLNELFARFDRLAEKYQQLRIKILGDCYYCISGAPDERPDHAVLCVHMGLSMVKAIKYVQQKANSPVDMRVGIHTGAVLAGILGQRQWQFDVYSKDVELANKMESSGKAGRVHISDKTLAFLNGEFEVEAAFGEKREELLRIAGLKTYFITKVVKAFASPCAKKINETQAEIAHPNPNGSTTDIVSDEDDNDATLDDEELLAQNSVSNGHQIGIAVTADEEEQVKLENFKQRLKDELVTRDGHENLTKDTNIFLRFKNPQLEQLYAVYREPYSSLPLLAALLVQCIDVLYSYLVLPRSTLHFINIAAPLVPIAMLVVISLAESFSGMLPKFFVDVSKRFNDITFVRELAAIIIALTIGFSNVIDMFFFVTFVRTEHIVSESEFNVTASLESDINLVVEGMVTAEHLLPASFVEQMRDAVPTERVLYPSYLSNFGVLILIAIAVIAQLTHLTKILLLLSIAALHCYFNIFIMQDLYALEDDFEHQPIISTRYAASGLLLVAALALSTLARHMDHEDRVIFKWKTEVAEQKETANDMRQRNEALVYNVLPVHVAEHFMKNTKRSHDDLYSQSYAEVGVLFASMPNFSDFYSEETVNNQGLECLRFLNEVISDFDALLELPQFQDIIKIKTIGSTYMAASGINVQRTVRNDAPITERWSHLAILVEFALELKHALQSINEQSFNHFVLKMGINHGPITAGVIGARKPHYDIWGNTVNVASRMESTGKAGAIQVTEETCNILRLFGYTFLQRGLVAVKGKGQLMTFYLQGKSQSSAEPVASGVVVLNGQDSSAVESTSELEASDIKMPLLKMNGPEQSLEIDQDRSLRNDSAGQESVAECQSLLE

SEQ ID NO: 1375 - DNA, 4750 bp, DROSOPHILA
gggtcgaaggaagatagacaggtaaagcaaaacaacctgtcattttttattaattactctgatatcgcaaagtttcgtatccttgattacagtgataaatgggataaggaccatcttaactggatgctgggtcaggatatccgtgattccaccgtgggcttctatggctttggaggcattggccaggcagtggctaagcgtttgatgggattcgatattaagcgcatgttatataccacccggaatcgcgttagccaggatatcgaggagcggttcaatgccaagaaggtggatttcgaaacgcttctggcggaaagtgatttcctcatcattgcatccccattgaccaaggagacattgggattgtttaatgccaccgtctttaataaaatgaaagaaacggcagtactggtcaacgttggcaggggcagtgagtatatccgaaaaaagcaaactaaaatgcctaatgcctttcattctagaaattgtcaaccaagatgatctttacgaggcgcttaaatcaaaccgaatttttgctgctggactagatgttatggatccggagccccttccttccaacgataaattacttactctagacaatgttggtaagttattatgtatcatctacatagggtcagaaactatttatatttttatctcattagcgttttttggtatttttctcaagaatgataagaactgccattcaaagaattcttttgaaaacctgacactttacgttataatctatagttcccttaccattaggcacttcatttatctcgtttgtttcttttcatgaagtggttactcctcatgtgggctatgccacccggagaacccgtgttgatgcagccaatttggcttcgcgtaatgtgctcaaaggattggcaggagagccgatgttgtcacccgcctactaaaatctatctaatcggaaacagaaatcaatgattgaaagtatgtgatttaattacaaaactaacttgtcgaaacgttattcacttgtattgtcagcctcttctttagccaccaggggcagatacagtggatcccactcctcccgctgcagggcctttagatacttcctcctctcctggaggactcgcggcactaactccggctgctcccccttgtgtttctgtgatatttccagggcccgccgccagttgtgcatccgcagggctagtccgactgcctgttcgattttcttgccgtgcagcaggatggtctctgcctcaagcatcctgcccagcattagtgagttttcggccatctgctcggcactcgagggcgtcagggccttcaggtgctgcaggtagctcaccttgtcgatttgcagtgctgccgagtaggcctcctcgctgatctgcaactggtgcttcctggtcgccaccgccgcaagagtggcccacaagctggaatgctggcccattcggcagatcttcaacgcctgttgccactgcccttccaaaagcgcacgatgcaggatctcgcagtacatgttaacattgacggggagtagggcgccggcggaacggaatgtgagcacggattcctcaaagctttcgatggtaatgtgtttgccaaattccctaggtgaaagagatttttaagcaatttaaaaaatagtacaattaatctggattaacagatagcattaaaagtacaatgaagccttgaagtgatttcaatttaaaataaaacccgacattctaaaacaagttgagttagtaagtacatctatgttccttacgtcgtatccaatgtaatagtggtcagggcaatgatcgtaggatcggaggctccttccccgggacaataccagatgctgtagcacgagtcgtgtactcccaccagaatatttgtttcgctggcccacataatggcggtgagttgggtgccgatcttgtagatctcatctatgcgttcgctattcagattgcgggactcactgacaaacagttccctattcgagtcgataaaggctacaaactgatcttccggacttcctgctcgacaagctgcaatctggaccagctgctgcttggccctcagagaatggggatcgtactgccgcgaggcacccggaatcagatcgaataggtggagtactgtcgggtcagagttatcccttatagccaggacatccagacccaatgatagcgagcgccaggtgagcaggggaatctgcgcctgggagccgggataccgcggattcaagtgtaaacggcccgtgtaggtgtacacccaaatcgacagggcatccaagatcataaagtatctaaacaacagaagattaaattaatgaaaaataagcatttccataaataatttggcttactttttgcccacttcaataaccctcgtgtcgttcctgccatcgataatgatcggcgtattgatatacttctcattatagatgtgtacttggttagtggtggccaccaccagatggccatagcccaggccaaaactaacgactcgctgcgggaaatccaggatatcctgagtgccagtcgcaatatccttcaatgtaatcgacttacgactcttgctggtggctttcaagtttccggagaccagctgctgttcgatggcataggccactatcaattgacccgttgaggtgccacaagttgcttgggtgccatcggctgaccaggagaggttgaatatggagcccacacgtggactcgaaaagcgagcggtgttataggaccactgcaacgaagtatcagtggaagttttaatggtctggatttttttttttttatatatatacaactttttaccccattgctgtggcacaatttgagcagattaaatgtgcccaccagaaggtaatctttctctggattaaaagccacgctcgtgatggcgtattcctcggcggcactagtaaaaagattcgctccttgggcatcccaaatcttgaaccgaaagtcctcgcctccggacgctataatattggattgcgtggaccagctgagggaaagcaccaggccatcatgggcacgccactaaaatgtaaaaacatttagttaagaaataagttttaatttagtaaaaaattttgaaggttaccctaattattttactgttggcggcaagtggcttgatggatatgtgcccaccctggcaaaatactatggagttggagttgggcgcccatcgtgcgcatcggatagactcttcattctgcaccacggtggatcgcaacatccctgatctggaccagatcttaatcacaccatcctcgccggcggtcagaagtccggcgccgtcgggactccagcgaccggagcttatagctgctgcatgagctgaaatgctcctctccacgcgggcactcttgttcaggattacgaatcttccatcattactgcagattaacagggtgtcgctaccctttccaccaccactgctcctgccgcccagcaaaagccagtgcatatccgtgggcacaaagtcatccggaagcttggcaacctcaactgagtcccgactaacgtcgctccacttgaagatctggtggtcatcgctgaatatgttattatattagttagtccacatctggataatcctatgtaaaatgtagtcaactcacctcacaaaatagatctcttcattgctgctccaatccacgcaactcagcggacaattcgtggtgcttttgctgctttcctctaccttttccgagtttcttatcgagtttttcttgcagattcgcgtttttaacttcattttggtaataccaatattttccaataatttctttgttttggctgaacagttcagttgtccgggagatttcagtcaagcgtagccatttttgttaccatggagatcaggttgtgacattggctatgggttttgatatcgggtgaaatatttcccttgacgtgattacaatattcctattttcccttcttacgatcttatcgaatagcttacacattgactaaatataagacccaatatatataatacaatatatataattacaacttcgcggtttgttggtttataaaaaaaaagtatttttattgatcaaaaacttaagcgaatgtcggagacaaattcacgtcttacacaattgaagtatgaataaaatctaaatctaatttgcaaagcgaacgcttagcaaacccttggctgagcttatttacttcttcatattgagcgtacataggctctcatttatgtttacgttaattaggcgctctcttgagtggattgcgcatggatatagatcagccgagtttgagctacgtggaaagttttgacccttaaagctgtgttagcagttttgaccctctggtgggagtcgcgaatgcggctgcggatgtttatgtctgttggattgggtgccttcttgagtggatcactcatgggtactgatcagccgagaacttgagctgcgtaagcggttttgaccctttggtgggaataactgattcggcagcggatgttaatgtttacattagggtaggctggatttgttattgtcaccagaatttgggttcttattggatacacgattttatgacttatatcctaaggcattctatgattttgtgtatggctgttcctatgtggttatgtatgtgtgtgtgtgtgtaagtatatgtggtcttatactatggcacatatgctactatatgtataataccaaaatacccaaggtaataaggtactcaatactttctagaccttctccaaaaagaacaaaaaccgaaacaac

SEQ ID NO: 1376 - DNA, 2286 bp, DROSOPHILA
atgaagttaaaaacgcgaatctgcaagaaaaactcgataagaaactcggaaaaggtagaggaaagcagcaaaagcaccacgaattgtccgctgagttgcgtggattggagcagcaatgaagagatctattttgtgagcgatgaccaccagatcttcaagtggagcgacgttagtcgggactcagttgaggttgccaagcttccggatgactttgtgcccacggatatgcactggcttttgctgggcggcaggagcagtggtggtggaaagggtagcgacaccctgttaatctgcagtaatgatggaagattcgtaatcctgaacaagagtgcccgcgtggagaggagcatttcagctcatgcagcagctataagctccggtcgctggagtcccgacggcgccggacttctgaccgccggcgaggatggtgtgattaagatctggtccagatcagggatgttgcgatccaccgtggtgcagaatgaagagtctatccgatgcgcacgatgggcgcccaactccaactccatagtattttgccagggtgggcacatatccatcaagccacttgccgccaacagtaaaataattaggtggcgtgcccatgatggcctggtgctttccctcagctggtccacgcaatccaatattatagcgtccggaggcgaggactttcggttcaagatttgggatgcccaaggagcgaatctttttactagtgccgccgaggaatacgccatcacgagcgtggcttttaatccagagaaagattaccttctgtggtcctataacaccgctcgcttttcgagtccacgtgtgggctccatattcaacctctcctggtcagccgatggcacccaagcaacttgtggcacctcaacgggtcaattgatagtggcctatgccatcgaacagcagctggtctccggaaacttgaaagccaccagcaagagtcgtaagtcgattacattgaaggatattgcgactggcactcaggatatcctggatttcccgcagcgagtcgttagttttggcctgggctatggccatctggtggtggccaccactaaccaagtacacatctataatgagaagtatatcaatacgccgatcattatcgatggcaggaacgacacgagggttattgaagtgggcaaaaaatactttatgatcttggatgccctgtcgatttgggtgtacacctacacgggccgtttacacttgaatccgcggtatcccggctcccaggcgcagattcccctgctcacctggcgctcgctatcattgggtctggatgtcctggctataagggataactctgacccgacagtactccacctattcgatctgattccgggtgcctcgcggcagtacgatccccattctctgagggccaagcagcagctggtccagattgcagcttgtcgagcaggaagtccggaagatcagtttgtagcctttatcgactcgaatagggaactgtttgtcagtgagtcccgcaatctgaatagcgaacgcatagatgagatctacaagatcggcacccaactcaccgccattatgtgggccagcgaaacaaatattctggtgggagtacacgactcgtgctacagcatctggtattgtcccggggaaggagcctccgatcctacgatcattgccctgaccactattacattggatacgacggaatttggcaaacacattaccatcgaaagctttgaggaatccgtgctcacattccgttccgccggcgccctactccccgtcaatgttaacatgtactgcgagatcctgcatcgtgcgcttttggaagggcagtggcaacaggcgttgaagatctgccgaatgggccagcattccagcttgtgggccactcttgcggcggtggcgaccaggaagcaccagttgcagatcagcgaggaggcctactcggcagcactgcaaatcgacaaggtgagctacctgcagcacctgaaggccctgacgccctcgagtgccgagcagatggccgaaaactcactaatgctgggcaggatgcttgaggcagagaccatcctgctgcacggcaagaaaatcgaacaggcagtcggactagccctgcggatgcacaactggcggcgggccctggaaatatcacagaaacacaagggggagcagccggagttagtgccgcgagtcctccaggagaggaggaagtatctaaaggccctgcagcgggaggagtgggatccactgtatctgcccctggtggctaaagaagaggctgacaatacaagtgaataa

SEQ ID NO: 1377 - protein, 761 aa, DROSOPHILA
MKLKTRICKKNSIRNSEKVEESSKSTTNCPLSCVDWSSNEEIYFVSDDHQIFKWSDVSRDSVEVAKLPDDFVPTDMHWLLLGGRSSGGGKGSDTLLICSNDGRFVILNKSARVERSISAHAAAISSGRWSPDGAGLLTAGEDGVIKIWSRSGMLRSTVVQNEESIRCARWAPNSNSIVFCQGGHISIKPLAANSKIIRWRAHDGLVLSLSWSTQSNIIASGGEDFRFKIWDAQGANLFTSAAEEYAITSVAFNPEKDYLLWSYNTARFSSPRVGSIFNLSWSADGTQATCGTSTGQLIVAYAIEQQLVSGNLKATSKSRKSITLKDIATGTQDILDFPQRVVSFGLGYGHLVVATTNQVHIYNEKYINTPIIIDGRNDTRVIEVGKKYFMILDALSIWVYTYTGRLHLNPRYPGSQAQIPLLTWRSLSLGLDVLAIRDNSDPTVLHLFDLIPGASRQYDPHSLRAKQQLVQIAACRAGSPEDQFVAFIDSNRELFVSESRNLNSERIDEIYKIGTQLTAIMWASETNILVGVHDSCYSIWYCPGEGASDPTIIALTTITLDTTEFGKHITIESFEESVLTFRSAGALLPVNVNMYCEILHRALLEGQWQQALKICRMGQHSSLWATLAAVATRKHQLQISEEAYSAALQIDKVSYLQHLKALTPSSAEQMAENSLMLGRMLEAETILLHGKKIEQAVGLALRMHNWRRALEISQKHKGEQPELVPRVLQERRKYLKALQREEWDPLYLPLVAKEEADNTSE

SEQ ID NO: 1378 - DNA, 2338 bp, DROSOPHILA
tttattccagaattttcttgagcttggagagtgttgataaacatacatacatttttttgcatatatattatattgcaatataaaatattttccatgaaatgaaacaatgattaagaaaaattgatgttacaattcatgaatgattaacactatggatatattgaaaatgtatgtaaatatgtaaataactgttcttttgtaagtaactgtgcttttgacgccacatcttacaattattacatacatatgtacaaatttatttttaataggtgaaaaatcgaaaaaaccatttttaagaggtgggcaaacgaaaaaaacaaattttaaagggtgggcaaacgaaataatttatttttaaagagtgggcaagcgttaaaaatgaattttaaaggatgggcaaacgaaattatttagttttaaaaggtgggcaatcgaaattatttatttttaaatggtgggcaaacgttttttattggaaatttttattttaaagaggtgggctaacgaaattggttgtattttaagtgtgggcaatcgaaaaaaaatgtttggtaaaggttttttaaagggtgggcaaacgataaaaactaataataatggctgggcaaacgttttttggtgattatatttggttttaagagatgggcaaacgatttactctctgattagaccgaggtaaactttaaagccttatattttctaaagtatacattttttcaaaattctaaagggtgggcaaacgatgttgttgcaattaaaaaaaaaaattgaaaaaagcgaaatgtttgattttcgaacattttcgaactttttcgaaaattcttatctcaaaaactggacgtgggcaaaaaaaactaattgggcaaaaaatgggcaaacgattccagctttcaaatttcaaaaattatattttttccgaacccagcttctttgagctgtaaagttttcgtatttaaaataatattgataaaaataaacattttacaatgggactgtatatacctagagaagcgtagtaatcgctaaatgaggataaatggtcacgaaattcggctgcagttgaaagagccaagtaaatttgacttcgtctaccatcagcgccaatgtgaaaaataacttccggacttcgataactattccagagaaatgttggattcgctttcgagatatttttaatgattattgcgagaaaatgaaaaaatcgtccgactcaattactgccgaaattaacttacctacatcttcaaatagtcttaaataaacaacataccgtgatttactaagttatataagaaggcgcgaaaataaaatttttaatggcgattgaccaaccaatatatgtaaagcttgtaatgtctgacatggctaaattctaaatcatgcgactaattaagcttaatgacaaacaaatatatttattttgtagcatttagcccaatatgttttagtattctataaattctatatataaattagttagagttacattagagaaaattaactcttaaaatccattttgaactctaaatgtccttttttggctggctgtttagcttctacttagtgcaagaaaatttaatttattcattgacttgttggatttgtcttacaagtggaaatagaaagcctgttttatttgtttttggaactcaccaaatattcatatcaatcgatcaatctgtttggcacaaagttttaatttagtttgattttaatcaacctgaaatgaacaacaaaattaattttcttttaaagaattattaatctctttgattcattatgttatttattttttttatcatttacgtggaggaatagggaatagcggaaatctactgataatgagcagttaacgataacaatcgatgtttcgcacgcttttaaacccagtaaaaaaagaagttcatatataaggcaaaacaattacacacactcccaataatgactttcggtggaaattaataattagtgccatttctgttgtaaatttaaatatatatagaacttactttcgatttaaaattgataatttgtgtcacctagggtcatacttctcattaaatgtattcataaagttgatgggttatgccacaattaactaatgttaatgtaatttgaaatatctttgacaaattaagaaaaattgttaaagattctaggaataatatgttatatatataataatacaaattaaagtaactcctaaactcgtttttaaaacaaaagtttcatgtgatcacgtagaataaaaacttactaagtacgatgaacatgcatagcaaaataacaacatagatcgaaagcgcaacacaagcacataccggataaatttccataa

SEQ ID NO: 1379 - DNA, 1186 bp, DROSOPHILA
aaactaggccattttactcaatctacacataaacattgactgtacaacatgctcaagctttcgctgtgactcaaaaacactccaaaactcggatttgcatcagtcttcctacaaaggcgttaaggggaatgttgtacaccggacaaaaagaatggttatactattaactatatgctgtcgtgttgaggcacaagagtagtgtaacattaaaagtgtgtcgctgaaaaggaaggaagcgtaactatctaccaagcttcgagattttataaataggtggtctcgtaatgtccgatttgggaagtggagatgatggcatctcaggatcaaaatataatgttgcaaatatggagggttcctcaagtaggaacgacttcgattcttctgctaaaggaagcggcgtcgaacaggaattggctacgaaaatgttgcaaatacaatctaaacgattttatttggatgtaaaacaaaatagaagaggccgttttataaaggttgctgagattggcgctgatggtagacgaagtcaaatttacttggctctttcaactgcagccgaatttcgtgaccatttatcctcatttagcgattactacgcttctctaggtccaccaaacaccgacaatttgccggaagatggtaaacttaaatctgaaatgatgataaaagattacagaaggtattacttggacttaaaagaaaatgcgcgtggccgatttttacgggtatcgcaaacaataacaagaggggggcctagatctcaaatcgctttaccggctcaaggcatgatcgagtttcgtgacgctcttacagatttgttagaagagtttggagctaatgatggaggcaggtttaaaggagatttaccggaagagcgacacatgaaggtggataataaaaatttttattttgatatcggacaaaataatcgaggagtgtacatgcggataagcgaagtgaaaaataacttccggacttcgataactattccagagaaatgttggattcgctttcgagatatttttaatgattattgcgagaaaatgaaaaaatcgtccgactcaattactgccgaaattaacttacctacatcttcaaatagtcttaaataaacaacataccgtgatttactaagttatataagaaggcgcgaaaataaaatttttaatggcgattgaccaaccaatat

SEQ ID NO: 1380 - protein, 274 aa, DROSOPHILA
MSDLGSGDDGISGSKYNVANMEGSSSRNDFDSSAKGSGVEQELATKMLQIQSKRFYLDVKQNRRGRFIKVAEIGADGRRSQIYLALSTAAEFRDHLSSFSDYYASLGPPNTDNLPEDGKLKSEMMIKDYRRYYLDLKENARGRFLRVSQTITRGGPRSQIALPAQGMIEFRDALTDLLEEFGANDGGRFKGDLPEERHMKVDNKNFYFDIGQNNRGVYMRISEVKNNFRTSITIPEKCWIRFRDIFNDYCEKMKKSSDSITAEINLPTSSNSLK

SEQ ID NO: 1381 - DNA, 6119 bp, DROSOPHILA
tggtttttacttattccaggggaaagagcgtgctgaaccagaaatcagaattgcaacgtgcctacgacaagcagaaggagcggcatgccgcggccgagcaacattcgccggatgcggacattgtcggcggcattccaggactgaaaggagaactcgggcgcgtgatcatggagcgggcgcagaagcatgaggcggcggctcagaagcaggatcaggaggacgccgaggagcggcagtacgtaaatcccgagtatctgaacgtgcgggccaagctgcgcacggcgcacgccaacaattaaggagcagcccactcggatacccctcatcctgtaatcctcagcctatttaatgtttagttttagtaagagacctaaccaaattatgtgtaaggaaaccatgtgttttatatgttaactttgtgagcggttttcattttgatattatgcaaaactagagttgattattataattaaaaatgtacacctagactaagccatttacttgtttagtttgttagtccttatctctaatctaagttgaagctttcttgcgctaaattcgttgtgtataaaccaagtgtataaagttttagtttctaaaaggaccccatttcttccgaaaacaacaaaaaagaaaacaaaatggaacataatgtatctagtgtagagttattgtattgtatatgtatatctaaagattagtgagaccgaaaatgctgtaaacagggcaatgtgttagaaaataagacagagagacagacagaacttgggcggaagatatttgatctacatagaacaactattttatgtcaagcaaagaaatttaaacagattacaaaactatatacaacatatatctatatacaaatttagtttctggaattaataaattttattgtaggcgaaaagttataaaaccaatttcaatgtataaacattactgtatttttcaaaaagggacaatggatttttaatcgtgaatcctttgggcaggaataatactattcttgagattttttgttttgtctggccagctttttgtccagttttgcctgctgtgcggcagccttcttctcctccttctgtcttgccaatatccgggacattcgtttagaaactcgtgcctatcaatgggaaaatgtggtttcaattattttatctgtttaaagtggcactttcatatttataactcacagctgacaaacgggcacgctccttttccacttccttcgcaatcttttctcgcacctcttctattttcacatggaactcctcaactttttcctggcaggacctcaggtcttccttgcacttgcccaccctattaagagttgcctgcaacttattctcggccgtctccatatcgtcgtcgtaatcttgttgaatcttattgatgcgctgcttgtactgttcgatcagtgtgacgtactccaaatggcagctcctccacacactcgagtccgttctcatgagctcttcaatcttttctagctcgtcggaaaggacctaagcaaaaagttgaaaggccccaggttaggttatcagatcagatgtgtaagatcggagcagaaaccttgcagcgtaggaaatcaatgtattgaccctggtccacaacatcgtgggtccaattcactttatagcgcgattcgatcgggctcatgtctgtccacgatacataaaggggttgaaagtcttaggaacatgactttaaattgcacaactcacagtcgatctggaatcgttccttgttgagtgcgtgctgcttggccgttagtttcggattgtgaaactttcccacccgattctttttctccttctcctcaagtaaggaatcgtgttcggccattatggtctcgtagggcagagctatcagcttgtcgatatcaacttgtgtgtccctgggggatttgtactcttttaggaaaacactcagttaaagatcttacatgcttaaggaatggatcaggccttaaagtatgcaaatacattttgcgccaactcacttaagaagctccatgaagccgttgggcgcacagagatccctgtcgtggatcacatcgtctaggagggcctgcacgagaccgattagctctcccaaatccacataaaacttaaggtcgtcaagcgtcgcctccggcttgttcttctccagaatgtccacatagacggtgctcggttgctgttcaaaacgctttagattctccttgtaggaccaaccgaagatggtgtcgttgggattggtgccagctggcggatactcccgcatcacattgaggatttcttgcagctgcagcagctggtagatgatgcagacgttccgaaagtcggatattaggtttgcaaagcgcaccttgaacatttgggtcgtttgggctgccgaatctcgttgctcgggactaaggattgacttgacactggtcctggctaaaatggtggcccgtgccatgtatacggtggcccgtgccgtgtagttcgttttgtacatctttgcccggaacgcctcgtatgtatcctcactagagtcttccccggtggaatcacgggtcatctttacggctcggaccacctctttggtctctaggacatagggctccagaagtttcttcacgaacgcatcgtggcacatatttgccggtctcggcggaagcggaaacaggctaagaattttctccctgtactcctggggcgagtactttttgggttccaccttgataccgtgcatgtgggacccgctatgagatatcttattgtgttttctgttcatcttgtcgattgtgaattgtgttttctacgctgattgtgttgagtgttagtgttttaattacgacagcttcaatgtttttttcataattccaaagtcgactttataaaaaactgtagttacctatctaaaagtgcttatattgtgattaacggctttcatccgtgttagtctgtgccacttatgtgctaaaaataagcgaaactacaatacaatggataatagtgtagaacattaccatctttgcaactcaatagaaatatattaaaacaaaaatgtcgtgcttttctgccacataagtgtatgattattaaattgtaagattattagaaaaacatacaacaaaagtgtgtaaggttatacaaaattgtgtaactaggtaaccctctcaaggtcgcctcttatttcaacgcagagggatgatggtcgtcgcacattatgttcatcgaaagcctccagagtaatcaccgccttgtagcgcccctgtaagtttgaggtattgacattttctaggtgcaggaccatcaagaactcatcatacactagcacggtctgaaatgaaaagtaagtttgccaaattgaaacaaccacaacaatgtacacatactcacatctttcactttcaagcatttttctcgaatctcctctttgtttcgtatatatctgaaccaatacttgaaccagtattgatcttcgtcaaacatcacctcacaaaagttcggggagtgaaggttgaacattgtgggttgccaactaccacgttcatagtgcatcacgctgaacctagcctgaaacgggattgagtcctagtgagtccttctcctcctgttacggactgtttacgcttacggaaatgcgatcggagggtagaaagttgagtttaacggtcatattccccgatacgtaaatgccttctggttccatatgcatcaccatattgtcaatgttaaatacatcgcggggaccaagggtaccggctggggcttctgagcacttcacgtagatgccctcatcgtcaatcagagcgttgtagtccgttgcccaagtgttggccagggccaaaacaagaatcaccaggcctcgaatcattttgccctggctgaagagatcgttgatccgcccttatatagcgattatcgagctaattagagctaattacggattaacattacaccgtccataatcccagatgtcatcgcaaattcaatctaacttacataggaacaaacaagttttatttttaattcctgacgtactgcataccatacattaattttcaatgcgtaatcatctaatttgccacgaaaatttaaatcatgcgatatatttttgttgaatgttatccttaatcgtaagtaaatagttttgaaaaactataaatgcgttaatcattttaaaaaacaatttcataaatacgagtaatgatataaaaatgtatgtgttgtcattttagactcgtcaatttcgatgattttatgtttgccattcatttataaatatgacagaacgctattttggtgaatgcttatttttgatttcacttcctttacaaatataacagaaaaatgtttttttgaaagcatttatttaatttcatatggtaatgtaataatatattgtacaatgataaaattccattttattatttgatcttctcaacctgacccctgacttcaaagcaaacgtctgtcgctcctttaacgttgtttttgtcgaacgactcaaagttaaatatcgccttaacgcgaccgcgataaattggtccaattacgttttgaataagtggcttcacgatgaatggcttatatacaaggacagtctgaaatgaagagcgttttataatcgtatttcagggagacatttgaccacacttacacctttggttccaatgcacttctcactaatctcttcgcgattggcaaagtatttcaaccaatacttgtaccaggatagctccttgtcgaacatcacggcgcaaaagtctcgagcatacgtgttgaatacagttggttgccaagttccgcggtcaaaatgcataaccgtcatcctgagctgcaaagtgaaatgcccttaagtgcggtcttctaatatgattctgatagagtgagcgcaaccctactgaaatgcgatcggtggacggtacatcccagatggtggtgcaattgcccgataaatgaaggccatctatgtccagctcggtcactatattcctcatatcgaaagcttcacggaggccaatcgctcctggcagtttttcactgcactccgaatacaggtccgaatcctcgaactccaatgtatagtccgtggcccacacgctacttacgaccaaagcgagaattgtggaaatactaatcattttgcctgttcagagatctctaatccgtccttttatacccattgacgagcttatggagctaattacggattaacattattgtccgtaatcccaaatgtccatcgccaatcctcttcgcacgatccacagtcttgtgtaacacgaatatcggatttgtaactgagtttatggaacagtatttataccctgttccccttaatattaaattaattgttcttaataagttaagtattaaagtattttcaatatttaaaacaaatagattatctattatgacaatagtttaaatttatcttaaatttctagccttgaaaaggtgtattcattgggatatttatatacatatatttcaatttttacagcagcagatacaaagtacgaagattaaactttaaattaaaggaaaataatatatttacatatgttgtttatttacatttgaatacaaaatattattgaacaagaaaattaaaagtgcatagcttaactcagcttcatcacactttatacatatctaaaggttaagtatttgtagaacggtccttagtccttaattccgatgttggtccttaaagatttgaatcgctttgtagcgtccgcggaggacgctcacaattgatgttatttaatcctgagtgcatagtgaacttgttaagcgctaaattggtataaaatgcaaaaccattataagattagaccatcatatactgttatgttaaccacatcctttggcaatcccctatttttgtatatccctaccgttttggaacaagccctgctatcagaaaaaaaaacgttaaaaaagtctccagtgacctggttattgcagttggttcccaaacccgcaattgtcgtggatcaatctgaaactggccctcgaatgggagtcctattcagtaactcttattccgaaagcgttcgagtcctcggaaaggtctattcgcagaaataaattttcgttttcgacctaatcgaaaactatgtatgttgtccatgtcca

SEQ ID NO: 1382 - DNA, 2670 bp, DROSOPHILA
atgattagtatttccacaattctcgctttggtcgtaagtagcgtgtgggccacggactatacattggagttcgaggattcggacctgtattcggagtgcagtgaaaaactgccaggagcgattggcctccgtgaagctttcgatatgaggaatatagtgaccgagctggacatagatggccttcatttatcgggcaattgcaccaccatctgggatgtaccgtccaccgatcgcatttcactcaggatgacggttatgcattttgaccgcggaacttggcaaccaactgtattcaacacgtatgctcgagacttttgcgccgtgatgttcgacaaggagctatcctggtacaagtattggttgaaatactttgccaatcgcgaagagattagtgagaagtgcattggaaccaaaggtactgtccttgtatataagccattcatcgtgaagccacttattcaaaacgtaattggaccaatttatcgcggtcgcgttaaggcgatatttaactttgagtcgttcgacaaaaacaacgttaaaggagcgacagacgtttgctttgaagtcagggggcggatcaacgatctcttcagccagggcaaaatgattcgaggcctggtgattcttgttttggccctggccaacacttgggcaacggactacaacgctctgattgacgatgagggcatctacgtgaagtgctcagaagccccagccggtacccttggtccccgcgatgtatttaacattgacaatatggtgatgcatatggaaccagaaggcatttacgtatcggggaatatgaccgttaaactcaactttctaccctccgatcgcatttccgctaggttcagcgtgatgcactatgaacgtggtagttggcaacccacaatgttcaaccttcactccccgaacttttgtgaggtgatgtttgacgaagatcaatactggttcaagtattggttcagatatatacgaaacaaagaggagattcgagaaaaatgcttgaaagtgaaagataccgtgctagtgtatgatgagttcttgatggtcctgcacctagaaaatgtcaatacctcaaacttacaggggcgctacaaggcggtgattactctggaggctttcgatgaacataatgtgcgacgaccatcatccctctgcgttgaaataagaggcgaccttgagaggaaaacacaattcacaatcgacaagatgaacagaaaacacaataagatatctcatagcgggtcccacatgcacggtatcaaggtggaacccaaaaagtactcgccccaggagtacagggagaaaattcttagcctgtttccgcttccgccgagaccggcaaatatgtgccacgatgcgttcgtgaagaaacttctggagccctatgtcctagagaccaaagaggtggtccgagccgtaaagatgacccgtgattccaccggggaagactctagtgaggatacatacgaggcgttccgggcaaagatgtacaaaacgaactacacggcacgggccaccgtatacatggcacgggccaccattttagccaggaccagtgtcaagtcaatccttagtcccgagcaacgagattcggcagcccaaacgacccaaatgttcaaggtgcgctttgcaaacctaatatccgactttcggaacgtctgcatcatctaccagctgctgcagctgcaagaaatcctcaatgtgatgcgggagtatccgccagctggcaccaatcccaacgacaccatcttcggttggtcctacaaggagaatctaaagcgttttgaacagcaaccgagcaccgtctatgtggacattctggagaagaacaagccggaggcgacgcttgacgaccttaagttttatgtggatttgggagagctaatcggtctcgtgcaggccctcctagacgatgtgatccacgacagggatctctgtgcgcccaacggcttcatggagcttcttaaggacacacaagttgatatcgacaagctgatagctctgccctacgagaccataatggccgaacacgattccttacttgaggagaaggagaaaaagaatcgggtgggaaagtttcacaatccgaaactaacggccaagcagcacgcactcaacaaggaacgattccagatcgactacatgagcccgatcgaatcgcgctataaagtgaattggacccacgatgttgtggaccagggtcaatacattgatttcctacgctgcaaggtcctttccgacgagctagaaaagattgaagagctcatgagaacggactcgagtgtgtggaggagctgccatttggagtacgtcacactgatcgaacagtacaagcagcgcatcaataagattcaacaagattacgacgacgatatggagacggccgagaataagttgcaggcaactcttaatagggtgggcaagtgcaaggaagacctgaggtcctgccaggaaaaagttgaggagttccatgtgaaaatagaagaggtgcgagaaaagattgcgaaggaagtggaaaaggagcgtgcccgtttgtcagctgcacgagtttctaaacgaatgtcccggatattggcaagacagaaggaggagaagaaggctgccgcacagcaggcaaaactggacaaaaagctggccagacaaaacaaaaaatctcaagaatag

SEQ ID NO: 1383 - protein, 889 aa, DROSOPHILA
MISISTILALVVSSVWATDYTLEFEDSDLYSECSEKLPGAIGLREAFDMRNIVTELDIDGLHLSGNCTTIWDVPSTDRISLRMTVMHFDRGTWQPTVFNTYARDFCAVMFDKELSWYKYWLKYFANREEISEKCIGTKGTVLVYKPFIVKPLIQNVIGPIYRGRVKAIFNFESFDKNNVKGATDVCFEVRGRINDLFSQGKMIRGLVILVLALANTWATDYNALIDDEGIYVKCSEAPAGTLGPRDVFNIDNMVMHMEPEGIYVSGNMTVKLNFLPSDRISARFSVMHYERGSWQPTMFNLHSPNFCEVMFDEDQYWFKYWFRYIRNKEEIREKCLKVKDTVLVYDEFLMVLHLENVNTSNLQGRYKAVITLEAFDEHNVRRPSSLCVEIRGDLERKTQFTIDKMNRKHNKISHSGSHMHGIKVEPKKYSPQEYREKILSLFPLPPRPANMCHDAFVKKLLEPYVLETKEVVRAVKMTRDSTGEDSSEDTYEAFRAKMYKTNYTARATVYMARATILARTSVKSILSPEQRDSAAQTTQMFKVRFANLISDFRNVCIIYQLLQLQEILNVMREYPPAGTNPNDTIFGWSYKENLKRFEQQPSTVYVDILEKNKPEATLDDLKFYVDLGELIGLVQALLDDVIHDRDLCAPNGFMELLKDTQVDIDKLIALPYETIMAEHDSLLEEKEKKNRVGKFHNPKLTAKQHALNKERFQIDYMSPIESRYKVNWTHDVVDQGQYIDFLRCKVLSDELEKIEELMRTDSSVWRSCHLEYVTLIEQYKQRINKIQQDYDDDMETAENKLQATLNRVGKCKEDLRSCQEKVEEFHVKIEEVREKIAKEVEKERARLSAARVSKRMSRILARQKEEKKAAAQQAKLDKKLARQNKKSQE

SEQ ID NO: 1384 - DNA, 5223 bp, DROSOPHILA
aaatctaaacttcttgcctaataatggatacctatatacgtacatacatacatacgtgtataccaagtatacctgtgattcccatagtaccattattaccgaaaacccagcaatgactacttatcttctatattaattctttcctttatattgcagcaacttcatggacgatgtcctgactggccgctgtgattccattggcttcgaggacttcatgaacttgcccgagaacagcgagcatatgcgtcagccccacgctgtggtggagaaatctctgggaatttaccaataagtccctgcaaatgaagttgctaaatgcctggcattcagcctttaaactctaagacactcttaagatcagcaaataaaatatattttggtgcgaccagctagaggtaaacaaaattcaccatttctttgagccaaatttattcgtatttcgtttgtttaactccacatcaatacatttaactagttcgttaaacttacacattttattcaaacaaatctaaaaactacacgaaaatattggcagaaggttgttgtactgaggagattcgttaaaataataaactgaagagatatgcgttgacatcattcattatttgtaaaaataaaacaagagatggtaaaatggacgaattcgtttcgtaaaattaggcttatacttaaggaaaactgaattgtaaacggagggcgcatttcaacttatacaaacattgcatatatacatgatttatatttaaagaggaaaatgacagtaattgagataaacatagttaataaaacgcattacattcctcaagcaaaacacgtctaatcaacaataaatattgaaatcgctagcgttttaaatgctcttcgctaaatttgtattgtgttgcgagtttaagcttcaattactggaattatccctttaattgtgatgataggcattcgatttttatagtatatattcttcaatatgcataaaggcgcaattgcaaagggtcatgggattctagtagatccagttgacaggcacccactgctcctcgtggctcatctgatccagcgtttccaccacctggcggaacgtctcatcgaagtcctcgttcacgatgaccatgtcgaagtatttctcatacttgcgctggacgaagctgctctcctcgacggtggcgacaaggtcgtcgtcctgttcggaaaagtcatagaaagcgaatgtgttaagcaatgtttgggtattcaggcagagatctaacagggctactagggtggcctaggtgcgccaagcggatgattgagttgagcacaatttatacgacactgtaattaaggataggtcagggcacattacctcatacaacgacgctagggactcgagcgtacgggcgcgtctggagctgaatcttatggaactctggcgatcaaactgtggaatatgtgctcgcattagaggagtgcctagtctagggggctacgtgaaacatacagataaattccggttggagcccgtggccctgcgatccgcatagatggtcttgagctgctccatgccaggcgctgccacaaagatgacaaaaggcatcagttcctggctgttgtgcaggatcttcagggcattcggtgcacaatccaggatgcacatgcgcccactgttgatcacatccttgatggactgcaaatgcgtgccgtacagattgccattgtgctcgccgtactccaggaactcgttgttccgcacggcctcttccatttcctcgcggtccatgaaccagtagctactgccgttctcctccaaggcgcgcttggggcgactggtatctgaagtggttccgcgaatacaatgcatttatgaatattcatatccaaaatgatagcttaaattgtgcttacgtggaatgaccgctccgaacttgtccacatcgctgttgatcagccgattcttgagcgtacgtcttcccaccccggaaacaccgatgagaaccagggttttcctgcggaacggcggcatccgcgtgacctcctcatagagcagcagctccgccttgtcgaactcgcaattggccacagatcggtacatggtcttgcgctttcgcttcgagatctgttgcaacacacaatgtttactgggtgcccattgcgatactatgaaaactcactcttgttccgcaaatgccaatcttgtgaacgtagtccgcctcgggggccacgaaggctttgcgccgctcctccagctcttgggatggtatgagtccaattttgtcagattcggcagtaatgttcttggcctgccaccagttgggatcctttacgttgatgatctgcaatgccaggatgatgtacattgatcaggataactagatgggttgttttttttctgaccaactcacctgcaaaatgtcgcccgacttgaagggcaatccaatatccctgcatggcagcaaggaatcttcggatggattgtatgtgaaaagggcacgcatgtagcactgttggtatatgagaacacaaaccttgttactatttaagcatttatcacttttagtagctttactatgccaagatttacttacttagttgcaagcgatttgagaaatttcaagggaattcgttgtatgtttgtctaatagtaacttattgcgttgatgatatatatcattattttgagtaagttgggtttgataactaaactattactgcttacaaataaaaacggtcataagtgagtaattagcatacaactggatagctaaacatgtaagttggcaagcacaacaaactaaaaaccctttctgggcaagaacattgttcaagattcattatttgaattttaactggccaataaacttattaggataaacttccaactaatcggggctcatgcaagcaagcagcaatctgtgggaggaaccttcaagccaaacatcgaacttaccgtcagtttcttgcccgtctcgagactcgcgatgccattctgttttacctgacccccactcacagtatagcgaccgctcttgatctcctcgtccacgttcggcccgatcttgagggtgagattctccttggcccgcgacacctccacctgcagctcatcgggagtgcgaacgggcgtaccgttcacctctaggatgacatcgccaacgtgcagcatgctctgtttgtcgatcaccccgcccgccagaatcctggccacgaccagctgcttgaattcgtccagttcgacggtcaggcccagcggcttgctgggatctcggcgcagacccaccatcttgatggtctccactggcatcttggtgttgaggacgtcctcggtgaacaggtagcctcccgtttggcgttggctggcgatctctagttggctggtggatcccccggcagctttaagtcgttgctcgtagagtgctcctatctcatcatgggcgcgcaaaagagcctgaaggaagaatacataagttgttaaaacaatgtctatactagcatggttcatctcttaatggaaagggtgcatcatgttttgatgggcctatggcttaaaaaaaacaaacatatcaagagcacgttttctgccttcttggcagaccttactcagcaataaggaaacgacagcagtctcaataaaaacttttgatattgcctggctggtgtttgttttaaatgttggatagctcagcaactgatatacaattacgtagctaccggatgcagaaggagccaaagatacaatatcttaggtgcatctcagaaacatacatagatgcaagaaaatcgtttgtttcggatggtcagatccacgtgttccatactatatcctgcttgctgagtttttcatatctaactagccaaatagagaggctttcgccacgactttccctggctacttacacgaaaatgcggctgggcgagaagcttggcgagctctcgcgactccaggcgcctcgagggtgagaacttgcggatgatgtcgtcgcagatgggcttgttgttcagatgagcgggcaggaatagtggcactggctgcggctcggtcggattcagctggaatggcagagaagcggagagatgagttcgtcatgtgcggctaattaaattcagagctcttcgtctgggcgtgcctgccctaggtcaagttaagatgcctccgacttaattgagtgagtgcgttaattggtccagcttttgggcagacttctctggctctccatgtactcaatatatatgtatacatgtacatatgtcatgccatttaaccccgggtgaactcaggtccacgctgacaacacagtgtgtggagtcttaggtcaaaaattgggtcgcttgccatttgaatttgggtcgcatgaaaagtgagttttctgctttaattgcacataatttcatcttccggctccatttgtccctgtctacaactacagcgtttgttattccctgcttcttgcgtccattgtatttattctgggcccatcggcaatttccgcccacgatgggaaagtcatctgagtcagctcatgcaatatttatgcgaatttagcgtgggatggcttttcttctccgctctctggaatccgaagagcgtcactatcgccggagaattgataagcagaaagcgagaggaatgcattctctgcacaagaactctattctgggaaacttgtcagttgtttgtttctataaaactgaatggaatttccaactactatttatagcttaataagtgtgagttttgagctatgtaaaactcttttgaatgagtgattggaagttttcttactactcattatcataaaacaaaaatatacttttggatatatgtatatggtattccaagataagcttttgatcgcatttaaatatatttgtggatgagtaatcccgactgcttttgtttgtttatttatcgaaccagcgaagatcgtatttccgcagcgctctacggattttcgctagctaagcccttttccgtgtgaaaaactgtgaagaagccccacgcgacagacagtccccaccctttttcaccacacacccacatttgttattgatactttggcctgggctttcacctccactctgcaaaatgttttcgtcatgacaacgtcagtttaaaattgcctcaaaatattgtgtaccgcaacaggtgcttactaattaagcaagctgataattagacacacgtaaacaagtggcgaatttgtttcatattcgaaggctgtggctgtgaaatatttaacctaaaataaccaa

SEQ ID NO: 1385 - DNA, 1731 bp, DROSOPHILA
atgacatatgtacatctgaatccgaccgagccgcagccagtgccactattcctgcccgctcatctgaacaacaagcccatctgcgacgacatcatccgcaagttctcaccctcgaggcgcctggagtcgcgagagctcgccaagcttctcgcccagccgcattttcgtgctcttttgcgcgcccatgatgagataggagcactctacgagcaacgacttaaagctgccgggggatccaccagccaactagagatcgccagccaacgccaaacgggaggctacctgttcaccgaggacgtcctcaacaccaagatgccagtggagaccatcaagatggtgggtctgcgccgagatcccagcaagccgctgggcctgaccgtcgaactggacgaattcaagcagctggtcgtggccaggattctggcgggcggggtgatcgacaaacagagcatgctgcacgttggcgatgtcatcctagaggtgaacggtacgcccgttcgcactcccgatgagctgcaggtggaggtgtcgcgggccaaggagaatctcaccctcaagatcgggccgaacgtggacgaggagatcaagagcggtcgctatactgtgagtgggggtcaggtaaaacagaatggcatcgcgagtctcgagacgggcaagaaactgacgtgctacatgcgtgcccttttcacatacaatccatccgaagattccttgctgccatgcagggatattggattgcccttcaagtcgggcgacattttgcagatcatcaacgtaaaggatcccaactggtggcaggccaagaacattactgccgaatctgacaaaattggactcataccatcccaagagctggaggagcggcgcaaagccttcgtggcccccgaggcggactacgttcacaagattggcatttgcggaacaagaatctcgaagcgaaagcgcaagaccatgtaccgatctgtggccaattgcgagttcgacaaggcggagctgctgctctatgaggaggtcacgcggatgccgccgttccgcaggaaaaccctggttctcatcggtgtttccggggtgggaagacgtacgctcaagaatcggctgatcaacagcgatgtggacaagttcggagcggtcattccacataccagtcgccccaagcgcgccttggaggagaacggcagtagctactggttcatggaccgcgaggaaatggaagaggccgtgcggaacaacgagttcctggagtacggcgagcacaatggcaatctgtacggcacgcatttgcagtccatcaaggatgtgatcaacagtgggcgcatgtgcatcctggattgtgcaccgaatgccctgaagatcctgcacaacagccaggaactgatgccttttgtcatctttgtggcagcgcctggcatggagcagctcaagaccatctatgcggatcgcagggccacgggctccaaccggaatttatctgccaccctagtagccctgttagatctctgcctgaatacccaaacattgcttaacacattcgctttctatgacttttccgaacaggacgacgaccttgtcgccaccgtcgaggagagcagcttcgtccagcgcaagtatgagaaatacttcgacatggtcatcgtgaacgaggacttcgatgagacgttccgccaggtggtggaaacgctggatcagatgagccacgaggagcagtgggtgcctgtcaactggatctactag

SEQ ID NO: 1386 - protein, 576 aa, DROSOPHILA
MTYVHLNPTEPQPVPLFLPAHLNNKPICDDIIRKFSPSRRLESRELAKLLAQPHFRALLRAHDEIGALYEQRLKAAGGSTSQLEIASQRQTGGYLFTEDVLNTKMPVETIKMVGLRRDPSKPLGLTVELDEFKQLVVARILAGGVIDKQSMLHVGDVILEVNGTPVRTPDELQVEVSRAKENLTLKIGPNVDEEIKSGRYTVSGGQVKQNGIASLETGKKLTCYMRALFTYNPSEDSLLPCRDIGLPFKSGDILQIINVKDPNWWQAKNITAESDKIGLIPSQELEERRKAFVAPEADYVHKIGICGTRISKRKRKTMYRSVANCEFDKAELLLYEEVTRMPPFRRKTLVLIGVSGVGRRTLKNRLINSDVDKFGAVIPHTSRPKRALEENGSSYWFMDREEMEEAVRNNEFLEYGEHNGNLYGTHLQSIKDVINSGRMCILDCAPNALKILHNSQELMPFVIFVAAPGMEQLKTIYADRRATGSNRNLSATLVALLDLCLNTQTLLNTFAFYDFSEQDDDLVATVEESSFVQRKYEKYFDMVIVNEDFDETFRQVVETLDQMSHEEQWVPVNWIY

SEQ ID NO: 1387 - DNA, 4290 bp, DROSOPHILA
agccttcttgcggggcacgttgtcgacgctctggagcttttggaaggcggatcgaacggctggagttaaattgtactcgctgctgtcgaggatcgaccgaatgatgtccatccaactctcttgcttttgagcgttcttgttgcggggctccttggcggcaaagccttggctttggctggcgtacttctgggcctctgagatgcacttaatgtgtgccacatactcctcgccatagaagtcctttaggcagtccatgcaggacacgttcttgtctttgccgcgacagcgcgtctggtagtgcttttccaccgccggtttctttaccgactcgccgcagatgttgcacgtgaagaagaccatggtgtagcagtcgctgatctcttgtttaccggggaatccttggaatttcaggtaatttggttgaatttaccgccggcggaggccaaacaaaacgcacgtgggcattagagtgaccaatcacgttcgaggcttaaatacctgaaattcagtgttgcctaagaccgatttcaagtacgcaaataggaatttacttaatctaacatattaatttttaattcaacattcattgatatggttaataataatataaagttggaataatttactgcccttatttattaaaacatatctagaaattccaaaactgtaaaatacaacagaaaaatataatcaattttctagacaagaatcattttaacttaaatttaattccttttagcacttttcttctattttttactatcgtcccatttcgatgtatcgcaaccatcagcgtgccatcactaatagcaacagctgttcgcagacacacgttgccggtgctgacgaaatttgtgcgaatgatttcagcgaattccccgctttttcagtttattagaagcccgcgactacagactctgacgaaatacgaatgtatttagtaaaatcagccaggtcgccgatctacagaaccttgcgaacgctcacaaccagtaatttgatggcggccacaattgcctcggccaaggatcctttaacaggacctcgctatgagcgggaacccaatgtgcttagaaaaaagctggcctccgtggtgccgggaacagtaaatcttcaggttctgggctctggcgccaatggagcgcctgccgctgtttatttgtttacggaccaggcacgctatctcttcaactgcggcgagggaacccagagactagctcacgagcacaaaacccgcctatcacgcctggaacaaattttccttacacaaaatacgtgggcttcctgcggagggttaccaggtttgacgctcaccatccaagatgccggagtgcgcgacattggactccatggaccgcctcatctcggctctatgctgcagtcaatgcgacgtttcgtggtgctaaagaatctccaggtgcggccaaacgattgttctgagggcgcctgttttgaggattccatcttgaaggtggactctctgcccctgatcaattcggaagatccgacgaaaagtgtaattaactacatttgtcagctgaaaccgcgagctggcgccctaaacttggtgaagtgcgtggagcaaggtgtgccgccaggaccacttctgggacagctaaagaatggcaacgatatcacactgcctgatggaaaggtggtgcgttcagtcgacgtcaccgaagccagtgaaactgcactgtcctttgttttccttgatgtgcccagtgagaactatctaccagcactgcttacacacggcaaaaggcttaaaaagttaggcgaagagaagttaactgaagtggcgcttgtggtgcacttcacgccttatcatatatcttctcgtcaggtgtacaaggattttgtggtggagagtttttcatctgaggcacagcacatatacttaagttctcccctcaaccaattctcaggctatgcagccgcccatcgcattcaacaccaactccaccaactggcaccgcaagtatttccactcctgggcgaacaattgtcctgccagagtcagactctcagtctaaaccttaaaaaaacgaagttggacgaggccgattcggaggacaaagcaaatgcaaaggctaacgagacagaagaacagggtgtggtcgccatgacaaactatcacctgagaccaaggaaaggttggtactattttttacttaccattcaatgctataagtatatttttattacctgaaggtctggatcgcactcttgagtccaaactcacaccagaggagtatgttaaggagacccatgccgtaccaggatttctggaactattggccaaattcaaagaagagtatagtttccctgacaattctgccgatagctacccgaagataattttcttgggcacaggctcctgcattcccaataagacgcgaaacgtgagctccattctgatcaggactgcaattgatgcctacgtgttgttggattgtggagaaggaacttatggtcaaattgtacgactatatggacacgagaaagggcagttgattcttcgccagctacaggcgatttatgtatcccatttgcatgccgaccaccacattggattgattggtctgctccgggaaaggaggcaattaaaacctagggcagacccacttattctgctggctcctcgccaaattgaaccttggttggagttctacaatcgacaaatagaaaccgtagaagatgcgtatactctagtgggcaacggtgaactcctagctagtcccctgagcggtgaacaagttgaacgtctaggaattacgtccatatccacctgcctagttaggcactgccccaactctttcggaataagcctaactctggcggcaaagcacaatagcgaacccgtcaagatcacttacagcggcgacactatgccatgtcaggatctgatcgatctgggccgcgactccaccgttcttattcacgaggcgacaatggaggatgacttggaggaggaggcgcggttaaagacgcacagcaccgtgtcgcaggctattcagcaggggcggaatatgaacgcccgccatacgattctctcccacttttcgcagcgttacgctaagtgcccgcgattaccgagtgatgaggatatgcaacgagttgcaatagcctttgataatatggaagtgaccgttgaggatctgcagcactaccacaagctctaccccgcccttttcgcgatgtacgccgagtacacggaagaactggagcagcgggctgtcaagcgggagctgaaacaggagcgaaagcgaaaactggcagaaacgtgattgccggcaagttaatccggatagtcagtataagttactcaaggagctactgttaatcttatgtcagagttgagtggtatttgttaagtttaatgttatttcttgaaaccataaaatttgcccaaatactaattggagatatatagattttatatatgaaattaatagggcacctttgcttgtatctgtatatgcttgtgatatttgcatttgcatcatttacaagttatttgtatgatccaacccaaaaacccaataaaaatataaaataatccattttgttttttagtttcttctttatttactaattacgcttgcaacagtgtctgtgtaataaacgatttttgtatagattttttaaaatggtttctgttggttcggacacgacaatatcataaataatattcataattatcaatagtaattatccactctgccgactcaacaagggcacttgaatcttagcactttgaaacattttatatcgttttagtcatttaaatttcaactttaaggcactttagttcaacggtctcttctttttttcgcaattgatattctttttggaaattagctgtgactagttaaaattagtaggtaaacgacaaagtacatatgtatgtatgtatgatcttaattaaggtccttcgatatttggtgtgtgtgtgtgttggagtgggggaggtggaggggacaacttttggttaatatttggatgtcataaataaacgtaattccaacattgataaaattaatgctctgtttaaaaataaataaatagctttaaaatacggcaaaacgaaagcagcagaattagcgggataagaattattcaacaacaacataaaataatccagtaaaaccaaatcagagttaatcatagaactgcctttgccccggccacgctgattcctcctcgtattagactacaaattcattaagattaggcacgatcgccgctccgggggctggatcattggatcgatctcctctaggcccg

SEQ ID NO: 1388 - DNA, 2232 bp, DROSOPHILA
atggcggccacaattgcctcggccaaggatcctttaacaggacctcgctatgagcgggaacccaatgtgcttagaaaaaagctggcctccgtggtgccgggaacagtaaatcttcaggttctgggctctggcgccaatggagcgcctgccgctgtttatttgtttacggaccaggcacgctatctcttcaactgcggcgagggaacccagagactagctcacgagcacaaaacccgcctatcacgcctggaacaaattttccttacacaaaatacgtgggcttcctgcggagggttaccaggtttgacgctcaccatccaagatgccggagtgcgcgacattggactccatggaccgcctcatctcggctctatgctgcagtcaatgcgacgtttcgtggtgctaaagaatctccaggtgcggccaaacgattgttctgagggcgcctgttttgaggattccatcttgaaggtggactctctgcccctgatcaattcggaagatccgacgaaaagtgtaattaactacatttgtcagctgaaaccgcgagctggcgccctaaacttggtgaagtgcgtggagcaaggtgtgccgccaggaccacttctgggacagctaaagaatggcaacgatatcacactgcctgatggaaaggtggtgcgttcagtcgacgtcaccgaagccagtgaaactgcactgtcctttgttttccttgatgtgcccagtgagaactatctaccagcactgcttacacacggcaaaaggcttaaaaagttaggcgaagagaagttaactgaagtggcgcttgtggtgcacttcacgccttatcatatatcttctcgtcaggtgtacaaggattttgtggtggagagtttttcatctgaggcacagcacatatacttaagttctcccctcaaccaattctcaggctatgcagccgcccatcgcattcaacaccaactccaccaactggcaccgcaagtatttccactcctgggcgaacaattgtcctgccagagtcagactctcagtctaaaccttaaaaaaacgaagttggacgaggccgattcggaggacaaagcaaatgcaaaggctaacgagacagaagaacagggtgtggtcgccatgacaaactatcacctgagaccaaggaaaggtctggatcgcactcttgagtccaaactcacaccagaggagtatgttaaggagacccatgccgtaccaggatttctggaactattggccaaattcaaagaagagtatagtttccctgacaattctgccgatagctacccgaagataattttcttgggcacaggctcctgcattcccaataagacgcgaaacgtgagctccattctgatcaggactgcaattgatgcctacgtgttgttggattgtggagaaggaacttatggtcaaattgtacgactatatggacacgagaaagggcagttgattcttcgccagctacaggcgatttatgtatcccatttgcatgccgaccaccacattggattgattggtctgctccgggaaaggaggcaattaaaacctagggcagacccacttattctgctggctcctcgccaaattgaaccttggttggagttctacaatcgacaaatagaaaccgtagaagatgcgtatactctagtgggcaacggtgaactcctagctagtcccctgagcggtgaacaagttgaacgtctaggaattacgtccatatccacctgcctagttaggcactgccccaactctttcggaataagcctaactctggcggcaaagcacaatagcgaacccgtcaagatcacttacagcggcgacactatgccatgtcaggatctgatcgatctgggccgcgactccaccgttcttattcacgaggcgacaatggaggatgacttggaggaggaggcgcggttaaagacgcacagcaccgtgtcgcaggctattcagcaggggcggaatatgaacgcccgccatacgattctctcccacttttcgcagcgttacgctaagtgcccgcgattaccgagtgatgaggatatgcaacgagttgcaatagcctttgataatatggaagtgaccgttgaggatctgcagcactaccacaagctctaccccgcccttttcgcgatgtacgccgagtacacggaagaactggagcagcgggctgtcaagcgggagctgaaacaggagcgaaagcgaaaactggcagaaacgtga

SEQ ID NO: 1389 - protein, 743 aa, DROSOPHILA
MAATIASAKDPLTGPRYEREPNVLRKKLASVVPGTVNLQVLGSGANGAPAAVYLFTDQARYLFNCGEGTQRLAHEHKTRLSRLEQIFLTQNTWASCGGLPGLTLTIQDAGVRDIGLHGPPHLGSMLQSMRRFVVLKNLQVRPNDCSEGACFEDSILKVDSLPLINSEDPTKSVINYICQLKPRAGALNLVKCVEQGVPPGPLLGQLKNGNDITLPDGKVVRSVDVTEASETALSFVFLDVPSENYLPALLTHGKRLKKLGEEKLTEVALVVHFTPYHISSRQVYKDFVVESFSSEAQHIYLSSPLNQFSGYAAAHRIQHQLHQLAPQVFPLLGEQLSCQSQTLSLNLKKTKLDEADSEDKANAKANETEEQGVVAMTNYHLRPRKGLDRTLESKLTPEEYVKETHAVPGFLELLAKFKEEYSFPDNSADSYPKIIFLGTGSCIPNKTRNVSSILIRTAIDAYVLLDCGEGTYGQIVRLYGHEKGQLILRQLQAIYVSHLHADHHIGLIGLLRERRQLKPRADPLILLAPRQIEPWLEFYNRQIETVEDAYTLVGNGELLASPLSGEQVERLGITSISTCLVRHCPNSFGISLTLAAKHNSEPVKITYSGDTMPCQDLIDLGRDSTVLIHEATMEDDLEEEARLKTHSTVSQAIQQGRNMNARHTILSHFSQRYAKCPRLPSDEDMQRVAIAFDNMEVTVEDLQHYHKLYPALFAMYAEYTEELEQRAVKRELKQERKRKLAET

SEQ ID NO: 1390 - DNA, 2303 bp, DROSOPHILA
ccaaccaacattcgcgtggcctccgcatctctctccttcatcacttgccttttccgctcatccacaaaattcacttttttattgacaaacaagccagaaaccgatggaaaattacgacaaaatgtgtataaggcaacgcacagactgtactttgagtcattttattgcttgcatgattttccatacgtatttcttggcgcatcacagtttaatatgttattattactatttatttaaatctactccatgtttactccaaagcaatgtgtctcttcatgcgaacagtctttttgcgtctaaattatctttcagcccattcgtcttcccaaaatccattcgatctacatatatgtgtgacttgctgagagaaaacctatgctggtgtgtttattttcgatagacccacgcacacagtctcatgatttcactcgctcttcactttcaattggaggctcgtttcgtatacgtgaacgggagagccgtgcgatctatggaagtgtgcgatttttgaaggcactcacaaatactactatgcggcgagtcgctctcttcctcgctcactgcccacactctttggaaaatgatcagctgttggatcagctgtttggattgcatgcacaactttggaaattagccaccaattctggcttatttgaaaataatagtgcaatataaactagatgtactgtacttttgaggcagcttctagaatttcatcacaaagtcccgagtttcacgaggttgatgcatgctaacattcaaaaatagaggcgttcgcaacagggaggccttgcccgcacggctgtacattatatcggtgtatatacataggtatgtatgtacatacatatcagtgaaaacaacactgtcgctatctcgctcactgatcgtctcaaagcaagtgggtataaaagccagggatctctttcactcggaattcagttgtcaattatcaggcaaactaacaagaagagggaacaagttttctaacctattcaaaatgagttccaattctctattcgaaaccgacgaagatgtcgctcaggcaaacaagttatcccgaaaagtgaaggagtccccctttatgctggtgggtattgccggattcgtggccgcaggtttgattggagcctacaaatatcggaaccgaggcagcatgagcaccagcgtctttctgatgcagttgcgtgtggctgcccagggaaccgtcgttggatgtttgacagccggattggcgtacaccatggccaaggagtacctgctccacgaggaaccgaaaagcaataccaggccagacgaataaataagatatagtaggatcatcggccaaagaccaaaaatacatacataaaatggtgaccgttaattaaactgtaagtacatctgtcgaaatttctgaatgaacaactattaatttcattttcccaacagcatcaaattgcctacctccccaccaccttcatcgaatcagaaatggtagaacaaattattctagaatttaagaaagttctgcaaagtattagccatcaggtttaatcttagttaaaattagttaactattaagcgtacacaataaagaatgtttctaccaaaaaacacttcacttacagttatgacatttatgattcatattccgttggagtaatgttatatttaaacaagagaaaccgctatagtcaatttcctcgactatcagatactctttaattagctagtgggagtgcgaacgagaaagttcaacatatgtataataaaatgaataaatttcaaaggcgttcatgcagacggacagctcagcctcgactcggatattgatcatgatcaagaatttatatacttcatatggtcgataaggcatcattttatttgttttatgctttttaagaaatcccagtatatccttttactctacgactaatggttttaaaaactgatgcattccgaataagaacactacgattttgataaaataaaaaaccaaataatttgtcaaaaaaggtacaccatctcattttcactattattccatcgtatatattatacagttttgacttatttaccaactgcaatagaaatacatcaatagattaaaatcactataccatccgcaaggaaataaaaaacagacattatacaatctaaaagaacgtcaaaatcgcagtaactcccctaattctgattggattacattattctccaaaaatttctttcattaaatcaattaaaatagtttggatattttgttaaaataattttttattaaataaatgaactgcacatagtatatagtatatgtcaggaaa

SEQ ID NO: 1391 - DNA, 303 bp, DROSOPHILA
atgagttccaattctctattcgaaaccgacgaagatgtcgctcaggcaaacaagttatcccgaaaagtgaaggagtccccctttatgctggtgggtattgccggattcgtggccgcaggtttgattggagcctacaaatatcggaaccgaggcagcatgagcaccagcgtctttctgatgcagttgcgtgtggctgcccagggaaccgtcgttggatgtttgacagccggattggcgtacaccatggccaaggagtacctgctccacgaggaaccgaaaagcaataccaggccagacgaataa

SEQ ID NO: 1392 - protein, 100 aa, DROSOPHILA
MSSNSLFETDEDVAQANKLSRKVKESPFMLVGIAGFVAAGLIGAYKYRNRGSMSTSVFLMQLRVAAQGTVVGCLTAGLAYTMAKEYLLHEEPKSNTRPDE

SEQ ID NO: 1393 - DNA, 6026 bp, DROSOPHILA
ttttacatcatttacatctcaatccatttctccatcagtatatggtatcacacttggatcgacgactgctacattggataggtcaaagtgaaatgtgtggatggcctttggaagctacaaaggctggaaatagtggtaggcgatgtgccaatttttggcgcatatggaaggttgcaagtattgatcaccggcggctacggtggatgtggctccaatttattctttggagtaaatttccggtttggtggataaaaaagttccaatcgactgacaaccaacagacaactaaaaaaatttggcgctcaacgatcttagccattgacaaatatgagactttctgattttttgagctatacattttgtaaatttttgtttctttaagcttaatggttttttcgtttgtttatcttagcctttatatattttcttagtaattaaacatgtatttattttgtatctatctctttgtatttgtatttttttgtatgtatctctgtttgccttttcgaaagccacatctaggcacttaacagtttagacctttaaaactcggtctgtacaaaatggatcattcttctagatcatacacttacctttaaggcataacccttaactcacttttgaaatcttttgaaaatgtatattcttttgaacaaaaaggttggcactcgagagcaatagcaatacgtataagcaatcgaaaaaaacgaaaatcataaaaaatcctaacattattacagttcacatatgaaatcaatttaggtttgtgcacttacagttttttaagaaaatggctttggccagtttttaggcaggaaggtaaaaaatttgttcagtggatcggcgttgacaataaattaagatcaaaacaaaagcaaacgtttcggtagtggagacacgacattctttttacatcgaattttttgtcgagttcaaatatcgatagattatatcgatatcgtcttcgtctgacaaaccatttcacgataccaaaaaaaaagtgcaaaaataactaaattctcggcgtaattatttagtaaatagcgtagctaagcagcaggtgagtaggtcgcaagcgcgcccctccacgatccatcaagcggtaattggcctgctgtgcaattgctcgaggacaaggccatttgcctggtggcccccacgcaaaaagtaagcgattatgccaaaaagcaaagcagaagtggtctctgccaacgcatgagggtcgctcggtcgcccattgttatatttgcgaaggcagaatcagtcggcgttctaattagcgtgcaccctgtcccatcagaaaacccttccaaatccatatccagacggaccacggattaggactaagacccatttgacatgtcgctcaagcccaaaatagtggagtttgtcgatgtttggccgcgcctgcgctgcatcgccgagtcggtgataacgctcaccaaagtggagcgctcggtgtggaatactagcttcaggtacgtcttggcaacggtcggagtattaaacagcctggagagagatattgtgataggtcactagagactacaaagttacccaactcagaagaaacacaaataacactaactaacttttaaattaatccaacataagtaatggtttcaatcacattattttgcatttgagttggtaaactatgaatgtactagtacctagcggttcaactatatattttattcaacagcaaaattcacaaatatagctgctagcgaggcgaaaatgatttggtaaatgtcgtagaatcttgataaatgcaatcatagttttaataataaatgcctgttttctagcttgaatttaaatattttgaccgcttaaaggttaaactaagttcaagtaaatattaaatagatcgatgacgtatctttttaaaattaataatcaaaacagtgtaacgcaggctgcttttattctgaccgcaactgttcgtatatatgtgtgaagcgtgagttgccaaaataaaatttctaaaataacgagcactaatacatctgtctttccaatcacattcctttaacatatagcgacgtttacacactgtgcgtggcgcagccggaaccgatggctgatcgtctttatggcgaaacaaaacactttcttgagcagcacgtccaggagatgctggccaaaaaggtgctgatcgagggagaatgctcccattccaatggtggcccagaccttctccagcgttactacatcacctggatggaatatagccagggtatcaagtatctgcaccaattgtacatgtaagaatgcatcgaagtctgtaataactcaatgatcgttggaattaatttcctttagctacctgaatcaacaacacatcaagaaacaaaagattaccgatacggaatcgttctacggtaatctgtcaagcgatgctgcggagcagatggagattggcgagctaggtctagacatttggcgcctgtatatgattgagtacttgtccagcgaactggtccgtcacatactcgagggcattgccgcagacagagctagcaatggcaccttggatcaccatcgcgtgcaaattatcaacggagtgatacacagcttcgtggaggtacaggactataagaaaacaggctcgcttaagctctaccaggaactctttgaaggccccatgctggaggccagtggcgcctactacacagacgaggctaacaagttgctccatcggtgctcagtgtcggagtacatgcaggaggttatccggatactggaatatgaaagccggagagcccaaaagtttttacacgtcagttccctgccaaaactacgtaaagagtgcgaggagaagtttattaacgatcgtttgggcttcatctactcggagtgccgcgaaatggtttcagaggagcggcgccaagacttacgcaacatgtacgtcgtactaaagcccatacccgataatctcaagtctgagctcataaccaccttcctcgatcacatcaaaagtgaaggtctgcagaccgtatctgcgctgaagggcgaaaacatccatattgcgttcgtagagaatatgttgaaggtacatcacaagtaccaagagctgatcgcagacgtcttcgaaaacgattctctattcctgagcgcattagacaaggcgtgcgccagcgttatcaatcgccggccaaccgagcggcagccttgccgtagtgccgagtatgtggcgaaatactgtgatacgctactgaaaaagtctaagacctgcgaggcagagatcgatcaaaagcttactaacaacataaccatatttaaatatatcgaggataaggatgtgtatcaaaagttttatagccgactgttagccaagcgcctaatccacgagcaaagtcagagcatggatgcggaggagggaatgatcaatcgtttgaaggtgcgtggtctgctagtctaaaatgtacttcacagtgaataactgcaataatgtgaattatttatttttaatgctgttttaatttgttatgacccttttacaaaactacattagcttaaatagatcttcttttattaatacttacagcaagcctgcggttatgaatttaccaataaacttcatcgcatgtttacggatatatcggtatcagtagatctgaacaacaagtttaatactcaccttaaggatagcaatgtggacttaggtgagacggaaaatgtatattcattaaagatagtttatttttatgtatgtgtatttctatgcaggcatcaaccttgccattaaggtactgcaggcgggcgcgtggcccttgggatctactcaagttataccatttgcagtaccacaggaatttgaaaaatctattaaaatggtacgtttttcgtaaatgtatatattttattttaaaacgagatagaagctgcctttgacaaaccaaagttataaaaaatttttttcagactttctttatttagtcaaatttttaaagagaggccttttaacaatattcagaaacatatataaatatttaaagcagcaataaatacaaataatatataataataaatacagaaaaacctttatgtaaaaaactttccttcaaatcgacgactacatcgtaaggtgttctcttgaaatgtgtgacatatagaaagttaaaagtatctttatttcaataaaggtactttagcataccaaatcaaaacgcaacttcttttggtccaaatacatcttaaaccgtgtgactttgtcgaaggtacttcagaaattttaaatgtatacgttaatcgtgtactgtacctttgttatgatttttcagttcgaggattactatcataaattatttagtggccggaagttgacttggctacatcacatgtgtcatggagaattaaagttgagccatttgaaaaaatcttatatcgtgactatgcaaacataccagatggcgataatactgctgttcgagacttgtgatagtctgagttgtcgggagatccagaacaccttacagctaaacgacgaaacgtttcaaaagcacatgcagcctattatcgagtcaaagcttttaaatgccagctcagagaatctcgccggtgagactcgaatagaattaaatttggattacacaaataagcgtacaaagtttaaaataagttcggctttgcaaaaagaaacgccacaggaggtaaggcatttcgatttcaacctggttacctggtacctggttttctaacgacgttatttatgtaggttgagcacacaattaactcggtagatgaggaccgaaaactctttctacaagccgccattgtaaggattatgaaagcgcgtaaagtcttaaagcacaatgccttaatacaagaggtaatatctaaaacacctgactgtgaattaaaattacatgatgtattttttctttaggttctctctttatcgaaggttagctttactcccaacatagcaatgatcaagaaatgcgtggagtcattaattgacaaacaatatattgagcgaacggcgaactcgggcgatgaatatagctacatggcatagactgcggtagagattttttattcttaaacaagaaccttcccggacaacaacctcccatacacacaactgacgctaaccaagcggcttattttgtctaaaaagaactacctacaatgttaaaaaaagaaatcaaaaggtcaagcaatttgagttttgttatttttgtggtcatagcatattggtatgaaaggtgtgtggaaatcaaacgacgttactgatacttttaatttagcttagttagttgatccattttgatttaatgcgtgtgtcctattcaattgtagatataatatatttctttatgtattgtatatttatctggttttattaacacacgcacaaaccagaataatgtgctggaaaatgtataataaatcccaaaaaatgtctaaaaatatgtcattcaaagtatttcgtatcctgtgcgttaacgctgtaccactgtacacttcaaatttacataaatgaatgctgtgcaaaaagcagtcagcattgcagtttaagtatgcggatagagatctgtactttttatttggtcgtctcggaaaaaactggatctattgtccggaatcccattcttataattttttgattttctagtactttttaataacgaatccgggtagaaataggcgtaccaccacctacaaattggcatatcgtatattgagctttgagttgtcaaagtgccaaagaaagtgtaaaagcaaacatttttcgaaactttcaagattgctaagattcttagattttgttttaaaagagcttttaaggactttcccatctttttgtttttgctcacacattttattggaccttggtttaaaatataaaattcccttaaattcttttactaatcttagaatgtcgattttattaatttacaataccttgtacgtatgttcagtaaccatttaagtttcgcctttgccaagaaatccaatatttgtatatattaaatacccaagggccgtggattatatttgtttttagtcatttt

SEQ ID NO: 1394 - DNA, 2390 bp, DROSOPHILA
gtgcaaaaataactaaattctcggcgtaattatttagtaaatagcgtagctaagcagcagcagaaaacccttccaaatccatatccagacggaccacggattaggactaagacccatttgacatgtcgctcaagcccaaaatagtggagtttgtcgatgtttggccgcgcctgcgctgcatcgccgagtcggtgataacgctcaccaaagtggagcgctcggtgtggaatactagcttcagcgacgtttacacactgtgcgtggcgcagccggaaccgatggctgatcgtctttatggcgaaacaaaacactttcttgagcagcacgtccaggagatgctggccaaaaaggtgctgatcgagggagaatgctcccattccaatggtggcccagaccttctccagcgttactacatcacctggatggaatatagccagggtatcaagtatctgcaccaattgtacatctacctgaatcaacaacacatcaagaaacaaaagattaccgatacggaatcgttctacggtaatctgtcaagcgatgctgcggagcagatggagattggcgagctaggtctagacatttggcgcctgtatatgattgagtacttgtccagcgaactggtccgtcacatactcgagggcattgccgcagacagagctagcaatggcaccttggatcaccatcgcgtgcaaattatcaacggagtgatacacagcttcgtggaggtacaggactataagaaaacaggctcgcttaagctctaccaggaactctttgaaggccccatgctggaggccagtggcgcctactacacagacgaggctaacaagttgctccatcggtgctcagtgtcggagtacatgcaggaggttatccggatactggaatatgaaagccggagagcccaaaagtttttacacgtcagttccctgccaaaactacgtaaagagtgcgaggagaagtttattaacgatcgtttgggcttcatctactcggagtgccgcgaaatggtttcagaggagcggcgccaagacttacgcaacatgtacgtcgtactaaagcccatacccgataatctcaagtctgagctcataaccaccttcctcgatcacatcaaaagtgaaggtctgcagaccgtatctgcgctgaagggcgaaaacatccatattgcgttcgtagagaatatgttgaaggtacatcacaagtaccaagagctgatcgcagacgtcttcgaaaacgattctctattcctgagcgcattagacaaggcgtgcgccagcgttatcaatcgccggccaaccgagcggcagccttgccgtagtgccgagtatgtggcgaaatactgtgatacgctactgaaaaagtctaagacctgcgaggcagagatcgatcaaaagcttactaacaacataaccatatttaaatatatcgaggataaggatgtgtatcaaaagttttatagccgactgttagccaagcgcctaatccacgagcaaagtcagagcatggatgcggaggagggaatgatcaatcgtttgaagcaagcctgcggttatgaatttaccaataaacttcatcgcatgtttacggatatatcggtatcagtagatctgaacaacaagtttaatactcaccttaaggatagcaatgtggacttagatgcaggcatcaaccttgccattaaggtactgcaggcgggcgcgtggcccttgggatctactcaagttataccatttgcagtaccacaggaatttgaaaaatctattaaaatgttcgaggattactatcataaattatttagtggccggaagttgacttggctacatcacatgtgtcatggagaattaaagttgagccatttgaaaaaatcttatatcgtgactatgcaaacataccagatggcgataatactgctgttcgagacttgtgatagtctgagttgtcgggagatccagaacaccttacagctaaacgacgaaacgtttcaaaagcacatgcagcctattatcgagtcaaagcttttaaatgccagctcagagaatctcgccggtgagactcgaatagaattaaatttggattacacaaataagcgtacaaagtttaaaataagttcggctttgcaaaaagaaacgccacaggaggttgagcacacaattaactcggtagatgaggaccgaaaactctttctacaagccgccattgtaaggattatgaaagcgcgtaaagtcttaaagcacaatgccttaatacaagaggttctctctttatcgaaggttagctttactcccaacatagcaatgatcaagaaatgcgtggagtcattaattgacaaacaatatattgagcgaacggcgaactcgggcgatgaatatagctacatggcatag

SEQ ID NO: 1395 - protein, 755 aa, DROSOPHILA
MSLKPKIVEFVDVWPRLRCIAESVITLTKVERSVWNTSFSDVYTLCVAQPEPMADRLYGETKHFLEQHVQEMLAKKVLIEGECSHSNGGPDLLQRYYITWMEYSQGIKYLHQLYIYLNQQHIKKQKITDTESFYGNLSSDAAEQMEIGELGLDIWRLYMIEYLSSELVRHILEGIAADRASNGTLDHHRVQIINGVIHSFVEVQDYKKTGSLKLYQELFEGPMLEASGAYYTDEANKLLHRCSVSEYMQEVIRILEYESRRAQKFLHVSSLPKLRKECEEKFINDRLGFIYSECREMVSEERRQDLRNMYVVLKPIPDNLKSELITTFLDHIKSEGLQTVSALKGENIHIAFVENMLKVHHKYQELIADVFENDSLFLSALDKACASVINRRPTERQPCRSAEYVAKYCDTLLKKSKTCEAEIDQKLTNNITIFKYIEDKDVYQKFYSRLLAKRLIHEQSQSMDAEEGMINRLKQACGYEFTNKLHRMFTDISVSVDLNNKFNTHLKDSNVDLDAGINLAIKVLQAGAWPLGSTQVIPFAVPQEFEKSIKMFEDYYHKLFSGRKLTWLHHMCHGELKLSHLKKSYIVTMQTYQMAIILLFETCDSLSCREIQNTLQLNDETFQKHMQPIIESKLLNASSENLAGETRIELNLDYTNKRTKFKISSALQKETPQEVEHTINSVDEDRKLFLQAAIVRIMKARKVLKHNALIQEVLSLSKVSFTPNIAMIKKCVESLIDKQYIERTANSGDEYSYMA

SEQ ID NO: 1396 - DNA, 12202 bp, DROSOPHILA
ctggaactatattcgattaaataaatgtatatataaacgatttcataaactcttaccttgtttcctacatttcttgggaacgcttttttgtgcttagttagaatcaatccagagacgatctacatatgtaagtattccggatagtccacttctgactgtgttaggcttaattaactgtatatagagcatctttagccgagtcgatctggccaagtcccttcttataaacacgtaattctagtataattgaattagacaagcacttattagttacgacttcgctgcaaaaaaagcaagtgagggcctcccttaatatacaaaagtttcgataccaaacgttgtgaaaaaactattatacccgacattatatactgtataagcagagttcatatttattttagacttctgtcgtttgagttatgtatcatcgaactataaataataaataaatacgtaagtacgttatgatgtatagatacttaataaatgaaatttgcaagctgtaggcaatcgacggtagtgctcatatcagcatgtttggtttagaatgaatgaaaaaataaatatgtctatttaatgcaaatataatatataatttgcaattacggcataacctaagaatatatagcccaaattaatataatttatttattttttgaagtttgtatataaacttaacaggccgaaaagaaatgataaaatacaaataaatttcagtttttatttatagaaatgaaaaatgtatttcttagacagcaaccttatcggagctttctattcacggtcaggcattactattaaatccaccaagcaacgcccattagagtgggtccagtgggaccactggtatagactaatacatcttgtattgctgaattcaggcacgaagactttatagcgctcaattttcctttggaatacttactagacataatatataatgatattttgaaatcctactaatttaataatactgattagtgataacacggtagtaacattatgatttaggccggaataccgcaccttacgtacgagtgtaattttattgagtttttcactattttatgcaaagtaaaccatgaaatataatctaataaagatgaatagttctttaattccacttctatcacaacaaaaaaaggtaaaatatagcaaggcaatcatagcgcctctaaactcttataataataagcttgaaaattgttcgtataataaataattggtacacattgatatataaggtataatttttaaacaacgtaaaaacaatacttttcctattatatattctattgttctagttaagagaacctataaaattcttataaaatgtatgtgttctggtatttcacacgtgtcaattacactcgaactttcctaattcgaaatctgtatcttttttggcaaaagaagataaaaatgcatgtgaataatattgtataacttgattttatgatgcagatgttgattcgaaataagaaagttccaccatatattatattatttatataatacattatgtattcattatatgtacaccttacactactttgtaaaaataaattgtttatattatagtgtcgagttgccgggcttgatgtaagatctttttttgatgtccaactaaagtaattcccatgtccgaaagttgttgagctgttaacctggatatctgtacacgaaaattactattaatatttgacaataaaaaattgattaatacaaaaatgataattagaagagtttacctgttgagcatttattaaattagcctctttaaaatgatgacagtatctagacattttaatgtgctctaaccaaaggtcagtgcttatgaaaatattttgaccgcgctgtccatccaaaatatgattaccgtctgattctggcgagggtcgtgttgtcaataatgactgtggttgtcgtgccaaattgtcaagagttgaaacgatacttgcaaatgtggggcgatgagtacgttgcttttgccagcaatccaacattagctgataaagggcttctggacaatccatcggagctggtaaacggtagcccttttctatactctttatcacgtcctagagaatgaataggtgttacaagtataaataaaaatataatagatttggatcgaggtcatacctgatttgaccagttccaatatggacgttccccataggacatgacctcccatagaactactccatacgaccaaacatccgatgctgaagtaaattttctaaaagcaatggcttccggcgcagtccaacgtacaggaattttaccgccctttaaataacaaacatataagcctaatgtaaagacgaaggaaacacatgtgaaaaacaatggcccactaacacagaaaattataatgatgacgccgcctttttaacttattttattttggggtgttgagatctgtaatatacttcgaacagagcttacctcaatcgaaacaagatacattaattttattaaatttttgtaaatgttactaatatttgtcccaaatgtaatatttctagagttgaaggtgcaattcaattctacaaccttctagcttttatagtttctgagatatcgtcgttcatacggatcaagatatttgctggcgtaagaacgggcgtggcaaaccctttaaaacactaaaacttcttcatataaaaatttgtaataaaaaaaactgctccctaaaatcacctaatgacattaaaacgtggtttaaaggtatcagattagataccttcatattattcataataaacacatcgtaatggtactgttatcgtattaaacagtttctcttgtacatatatatcgtacaattaaatcataagttattcgatcagttttacttacccgagttgtgtatgcatcacttgcattttcaatttcacgtgacaatccgaagtccgcgattttgcatattaattgggcatttacaagaacattacgtgccgccaagtctctgtgtacataattcatatcacttaaatatgacatcccgctggctataccccgaagcataactataagctgtaatgtttgaaactttccatcattcacccgaagaaatgtgtctaagctgccattttccatgtactcagtaataatcataactggattagaccgagtaactactccctgtagataaataacgtttggatgatcaaactgtcccataatagaagcctctgtcaagaaatcacagcgcgctttttccgaagaccctgtgataacgaatgttttagatgttaaaacaaatacttgttaaaccacttgcaaacttgcctggttttaaagtctttattgccacatcaatgtcctgtacaaagtttgggggtatttttaatcgaccacgacatacatcgccaaattctccacctcctaaacaatgttgttcgtaagatactaaatatttagtatgaatgtggcaaaaaacttaccgataatagcttctattgtaatgtagtttgcatcgatttctcgagcgaattcccttatagcttgattaggatcttcataggtatgcggatctacgtagcttctgctatttccaaataaaggcgtcgtcactaaaatggacataggataataagagtcttgacaaaattaccatttattctagtaaatacttaggtatatatacataattattattaaagatataattattagtatggattggaaataacaagccaagattgtagcagtctgtttttctgaactttgttaaaattttagtagcaagaagaaagacattttcgacaataaagttgaaaagagctctgaaatcggacattgcccttcttgtcttttaactttgtaaatatatacaatccctacgagttacccttaaacccaaacttttttatgcataatatgcataaaccaagcatcaatttcggacgcaaaaattaaataaattttattagtttgtacaagcagaaccgttttccgtggctatactcggttccaattattattatggattggaaaaaacaagccaagattgtagcagtctgttttgcaattttgttaaaattttagtttcaagaaaaaagacattttcgacaataaagttgaagagagctctgaaatcggacattgcccttgtcttttaactttgtataattatacaatccctacgaattacccttaaacccaaacaagcatcaatttcggacgcggaaattaattaaattttattagtttgtactaacagaaccgttttccgtggctatactcggtaccaattcagagtattgaattccaatttcacgtattgttacggaaaagttacagttgttcagttgtaaaaacttactcactgaactcactgactgcctacaagcagttcgacaggcacaaaagcaaaaactgcagcttaccttaccaggaagactattaatttaaaagttaacacgcctttagaaatagatttcgagaactggtatttaacttatctacttctaatgacgacactatccataaatatactaaatgcatgcaaccaaaaccacttaaacttagaatatagcaaagatatacaaagtcacgaaaagttataccgtttaaatgaagttttttaacaattggagtagtatccatagaattaactaaaaataaaaataaaaatatgttgtattgtatggatatagcgtttgtataattaccaaatcgaaaattcacgaacaaaaatgttatactcggacatcgacgccagctaccctatacttattcatcgacaatctggtatttcttttctttcggaggtttcaactagtccgacaaaaaacgtcatagggaagcacccactgacaacagaaccgtatccatgtcttttaaatcgctcgaaaatgttgcactaattaagcacacaaaatggatacagaaaatatgccttatatgcacacttacacatttatccattcaatttttacccttattattattacggtcaaatattaggggacataacttttagtcagtactttggaacatgcgtttgtactgctgtctaacagttctctcaatttaaaagctttttccattatgttacacgtggtttcgagaaattaaaacttagattctaacgactcctattccgggccaattctcgacatctcaaaggtgtcctgattttaaatcaaaaataagagagaatgctatagtcgagtttcccgactatcagatacccgttacatagctagtgtaaatgcgaacgggaaattttatcatttttctgcgatatcgatagatattgggtaataaaattttctctacgagcaatgggaataataatactctttctgcacgacttgttcttattaattcatttgagttgtcattgattgaaaaatcgatttgccagaaaccttttcagcacacccacaataatgccgatcgaaggtgcaaaaagcgctcaccccataatttctatcgacgtttgcttatataatcgcaattattttcatacaacaatcttaagcgccctagtgcttttattaaaaggtgcgctacaagagcttacattttatatttcccaacgggtaaaataaaatgtacaggtgaagaatacatctgcctctaaataacgattccaaatcttttgtctgcataaatgcttcgagtcacatccattttttttaaaaaggttaaatttttttggattatttttatgatatgattttcatagtttgaatacacaactagcatattatttataaaaaaaatcttaccttcgttgctggcgtagtcaagtggtaatggcaaatgatttgtcgattttttatcaagatcatcctgatgcttcgatctcatgaaatatactgtagctattataaaaatgactagaaataatactcccgtcacgatggctccagcaataaatcgtatttgcacagaatcgtcatatactgttatgatggaatatatgattaaatattactatatatattatatatatatatattactatatataagaatgacaattacctgaaccaacggattgaagagtttgggcgtaaatcatgttactataagagccaaatccattattcgttttacaacgaacttgaaatccatactccgtattttctagaagtcctactatatgtgccttcgtttcttttgtgttcaaagctgatttatttatagcatctaattcgacctttggaaaccagcgcacttcataaaattcaagtggaaaatcactttgaacaggtttatcccattctagatcggcatctttattagttatagccaatatacgcaaattaaaaactgtcgagagcaaaactgactcagttgtaaaaacgatttcagcttgaccagtctttacttcgtttaaatccaaaggtatatttaataaagacgtatttgaaaatactatgtcactgactgccaccagggaagactcgttggagtgccttttaaattcgttaatatgagacacgctatttattgcgtgtatctgcacagtgtatgtcgttaccggttccagatttgtaagtgttatttttgtttcgttaaatgtgtcagttgagggattgtaaaccacatttgggctgcatatattacacttgatcttgtacacaatatcactgtgatatattttagaattagtttcagatgaaaacgattcatttttggccggtgcgctccaagatattattgcacttgtttgatcaacaaacaacaacgtgagattagtaggcgcagctggtggactataacacggcatatgtcgaccatcatttggatgtctatagaatccagacgcacacttacagaaaggtgaaccagtttttgaagcatttgaattgggaggacacggagtacattttgtaacctctggggatttaaatgtcccaagtggacattctgaaaaaatatattaaaataacattaaaagctacagctcagtattatgttgtctacgctccgcaaagcatgtttaaagtgcacgtgcagcaaatgcgcaacataacctaagcgccaaataaatataatatatataaatataaatatatatataaataaatgatggggatcggggcactctacccctaccgaactattgaaatctcatgttaaaaatatataaattaagcagatctaactcaattcgatactgttatcgagaagtaaatacgttttgcctaagtagctgaagttgaagaatgcaaaaagcttaggttcacttctaatcaaaataaagaacaacttacaaataataaatttatgcagctcccttatgaacgttattatccacaacttcccctcttattatacgaaagatgtcatttacttaaactattagaaaataagacactataaagacattaaactaagagaactgatgagcaattcatctgaagtaaaacaaaatcagagctcttcctaagttcattatgatcggctacaataattactcaattcgcggatgggaaaataataaggagttaaacattggaaagttataaataataccaacctgtacaagtcttatttgtgtaattcggctcatagccagccttgcaacgacacccaccagtaagaattgtccattttccatcacctttacataagtaagttggcgtctcatacggttctgcgttatcgacacatgttccattttgtttctcaattatagtaatttctcttcccgtaggtgtttcgttaaagtgtgcaaagttttcggtaacagcaggacacgtaatataatatacttttactgccagaacgctaatacaagcgccctgatctctgaaagcaaaatatacgccttttttgttgacggctatactcttcacctctgtgttaatatctacatcggagttctgattgaagcgcccctcgccagccgcgatgcgagcaatcagcctgtagctgtctgtttgccatggtggaggttctctagtagccgcatcaaactcgtaaaaaagtaagctaaatgtttccttgcatgacaaggcgtttcctaaaaaaattgaacacatttttctaataaagattattacactaaataataccctacaaaccgcatacataacaggaacttcaaaatttgttcaccaatattcgtatcatttttttgttagaaacaattttatacacttacctgggaataaagaacaatcgcgtattgtgaactgaatttcaatgtaaagtcggtttgctgatccacgatcgataaacggcgaccacaaccagttattgacgttgtgatatgccacatcgcaaaccacatagctcctccagttaatgcccttaacgaagtcggtaaatgactcctccacccactaaaaataagtttaaatgaaggagatattttgtatcggtacataaagaaactttataggatcttaatacactattaactttaaattatgtacatattcattgcaatttaaaaaaaacacaatacttaatatattatatatatatccttgcagttattgtctatacatataataagtgggttataccaaagacactagaataacaagatgcgtaacgccatacgattttttggcacacgattttttcgccgtggctctgaaggcggctccaggctctctcgaattttggttagagagcgagagagcggagagcgctacagcgaacagctcttttcaacgcataaagtgatagcagacaactgtatgtgtgcacacgtatgctcatgcattataaatttgacaaaatatgcccttcaccttagaagttctttgactttaaatctatattatttttgatcaattggcaccatgcgattcttgttttgcattgccttaacgttattattatttgaaaatagattagaaatagccaaatctatgtacatatcacaaaaataaatttcaaaaatgactttatataagaatatttgtcattagagtattcatcttgaaaaattaataaggcaataactgttgagtgcttgtgtctttgatatgacttttgcaataaacagttatcaatatttttatgaaatttatgaaattacagtagttataataatttctattgtacttcctttaattatttagtatatttattaagtcatttgacttaatatgatgtaacattaacattaaaagtgtttaaaaaaatatttcgcttttaaaagattggcagatgaaagacaaattagaattaaacataaatataaatgtgtaaacggtagctaattcgagcggcgattttaacaaacaaattaaaaagctttaaaattataatagtcagagcgaatttttaaaaattatcttattttatcatattgctacgaaattggcaaaaaactaccctaatatgtacaatgtaaattcttttcgtcgatcagaatttatttcggcccgaaaatcatatacgcgttctcgtctcttgtttccactcacacaagcaagcaaattctatttttagatttcttacgctctcagccggagcgagcggaaagagagcaattttggccgtcactaaaaaagtggctgcatagtgccaaaccaatgtatggccgttacgcatcttgttattctagtgtctttggttatactgaaaaagacattttatgattagaaacgacgaaacgatgaattcttttcaaatgttttaaataaatttcccaaacgtttctatggcagctgaagaatgttagtcatctgcttcggatcaaagtaaacattattccaaatgttgtgtataccaaataaaaacacatgattatatcagcgtttaaaaaactgtggtaagttcatttcacatgaatttgattctgcttctgagaaaattaaaagtcgaagacaaaggttcttttgagcggcaagcgaagagttctggaagtcgttggcagtcgcagcagcataagcatatttacatattaaaaacgttcaaaattaaatgattttcaattagaaaaaagagcacatataaagaaatctatataaaatctttaagaatttgtacacaatcgaattgacatagaataaattgaatataaatatcttattactactatcttattattgtcgacgtaagtttaactacaaacaaacgtttgttttttaaataaaaattgaaaataagagcaacaataacatataatgcgtacccctggtgtttgggcttgaggtccatatggatacctggtccactctaatgtagcttctcgagttgtatccaatagaacaactgcagatattcgtgagcattaaaaagatatcatttactgttaagtcttaatattgttaagcagtacgtaccctgatctgcatgtgccaatttaaagtgaattgaaattataataagcagtattgtccttaataatgacattctcgaaacaatttgagatctgttttgctcgctaattggagcttgatttttgtaaaacgcagacttgagggcgcttatagcatcatttagtacggaagttagaatggttacggaagaagttttacttttaataccatcatatttcacctttttgtcatttgggtggcacccaaccattttcattttgttgggatcgttttcgaacagttttatttttgatttgggttgtacgcactctgatgcggatttaccaatgtcaatagcattatttgtgtttgtgggtccagtttaaaatccaagactaaaaaataaattgattagctttaatgcactttgtataagcatgaatgtgattaatgtataaataatttggaaggatctgttcctgttcggtattcactggcatatgtgcatatccatatatacaaggaagcgtatacacatatgagcctgcattttccgacgctgctatatacatacatacgaccatacatgttatacatatttacacaaaatgacagtgtgtatgtattcttgttaagggacgctagcttcgatttaaacattacatttcacggatgattactgttatcaattcaagatgttatggctttggaacacaagatatttgaacggattttattattttatttgtacattttgtcatttaggaccacttttattgatacctttacagccgactactactatggaagtctcgttttaattttaaagtggttcttttacgaccacaaaatcccttgtagattttctattgatacttggtaaagaccagagtatcattttcagtcttttttctttattttttattttttaaattcacttatactcagcaattctgttaaaacaactggtatcgataacttttataacgtcattaaaatccatgaaaacaaattttctttaaaaaaaataagttaaaatagcatcgacgaaataccacaaattcggaataatgaaattggtacaaaatgagctaacagcataaactgatgttcttgttttatgttttatacgaattattgacacttggcctttaattaatatagaacgagaataatattcattaaaagtgattgtctctctactgaaaatttaaacgaaatattaaaaaaaaggcgttaccaatacttttaatatcttgcttgataatcgtaataatctgacattcatatatgtatatgcatatgtatatgtaatcgttgcatatctactgatcactaaacgattcgattgcttacttttttttgtgaaagccgttatagtagctctaatgattaatgataatttaattttccatttaataaaggtagttcgggaaagaatccataggaaaccaaaacggaccattaatgaaaataaagacaacacttggaaagcttaaaaacatcaacgtttgcatcgttgtccataaagcttttaaagggtaggcaaaccaatggagttttaaagtaaaatggtttttaagccaaaaagaataaataaatattttttttaatttaaaagctggaattgtttttccaccggcttgcttatgttttttagttttttttttctcacgtcctatttcaaaaagtacatacatatgtaccaatatagttttaataggtgagcaaacgaaattatttacttttaagagcggacaaacaataaacatttattttaatggctgtgccaacgataaaaacaatttttaaagggtagacaaacgattaaaactatttttagagggtggacaaacttgttttattgatactatttatataaagatctggaaaaaagttgcattctctaataaaacttatgggatatattttctaaattatacctgttttaag

SEQ ID NO: 1397 - DNA, 4149 bp, DROSOPHILA
aattgctgagtataagtgaatttaaaaaataaaaaataaagaaaaaagactgaaaatgatactctggtctttaccaagtatcaatagaaaatctacaagggattttgtggtcgtaaaagaaccactttaaaattaaaacgagacttccatagtagtagtcggctgtaaagtcttggattttaaactggacccacaaacacaaataatgctattgacattggtaaatccgcatcagagtgcgtacaacccaaatcaaaaataaaactgttcgaaaacgatcccaacaaaatgaaaatggttgggtgccacccaaatgacaaaaaggtgaaatatgatggtattaaaagtaaaacttcttccgtaaccattctaacttccgtactaaatgatgctataagcgccctcaagtctgcgttttacaaaaatcaagctccaattagcgagcaaaacagatctcaaattgtttcgagaatgtcattattaaggacaatactgcttattataatttcaattcactttaaattggcacatgcagatcaggttgttctattggatacaactcgagaagctacattagagtggaccaggtatccatatggacctcaagcccaaacaccagggtgggtggaggagtcatttaccgacttcgttaagggcattaactggaggagctatgtggtttgcgatgtggcatatcacaacgtcaataactggttgtggtcgccgtttatcgatcgtggatcagcaaaccgactttacattgaaattcagttcacaatacgcgattgttctttattcccaggaaacgccttgtcatgcaaggaaacatttagcttacttttttacgagtttgatgcggctactagagaacctccaccatggcaaacagacagctacaggctgattgctcgcatcgcggctggcgaggggcgcttcaatcagaactccgatgtagatattaacacagaggtgaagagtatagccgtcaacaaaaaaggcgtatattttgctttcagagatcagggcgcttgtattagcgttctggcagtaaaagtatattatattacgtgtcctgctgttaccgaaaactttgcacactttaacgaaacacctacgggaagagaaattactataattgagaaacaaaatggaacatgtgtcgataacgcagaaccgtatgagacgccaacttacttatgtaaaggtgatggaaaatggacaattcttactggtgggtgtcgttgcaaggctggctatgagccgaattacacaaataagacttgtacagaatgtccacttgggacatttaaatccccagaggttacaaaatgtactccgtgtcctcccaattcaaatgcttcaaaaactggttcacctttctgtaagtgtgcgtctggattctatagacatccaaatgatggtcgacatatgccgtgttatagtccaccagctgcgcctactaatctcacgttgttgtttgttgatcaaacaagtgcaataatatcttggagcgcaccggccaaaaatgaatcgttttcatctgaaactaattctaaaatatatcacagtgatattgtgtacaagatcaagtgtaatatatgcagcccaaatgtggtttacaatccctcaactgacacatttaacgaaacaaaaataacacttacaaatctggaaccggtaacgacatacactgtgcagatacacgcaataaatagcgtgtctcatattaacgaatttaaaaggcactccaacgagtcttccctggtggcagtcagtgacatagtattttcaaatacgtctttattaaatatacctttggatttaaacgaagtaaagactggtcaagctgaaatcgtttttacaactgagtcagttttgctctcgacagtttttaatttgcgtatattggctataactaataaagatgccgatctagaatgggataaacctgttcaaagtgattttccacttgaattttatgaagtgcgctggtttccaaaggtcgaattagatgctataaataaatcagctttgaacacaaaagaaacgaaggcacatatagtaggacttctagaaaatacggagtatggatttcaagttcgttgtaaaacgaataatggatttggctcttatagtaacatgatttacgcccaaactcttcaatccgttggttcagtatatgacgattctgtgcaaatacgatttattgctggagccatcgtgacgggagtattatttctagtcatttttataatagctacagtatatttcatgagatcgaagcatcaggatgatcttgataaaaaatcgacaaatcatttgccattaccacttgactacgccagcaacgaagttaattctatggatactactccaattgttaaaaaacttcatttaaacgtgacgacgcctttatttggaaatagcagaagctacgtagatccgcatacctatgaagatcctaatcaagctataagggaattcgctcgagaaatcgatgcaaactacattacaatagaagctattatcggaggtggagaatttggcgatgtatgtcgtggtcgattaaaaatacccccaaactttgtacaggacattgatgtggcaataaagactttaaaaccagggtcttcggaaaaagcgcgctgtgatttcttgacagaggcttctattatgggacagtttgatcatccaaacgttatttatctacagggagtagttactcggtctaatccagttatgattattactgagtacatggaaaatggcagcttagacacatttcttcgggtgaatgatggaaagtttcaaacattacagcttatagttatgcttcggggtatagccagcgggatgtcatatttaagtgatatgaattatgtacacagagacttggcggcacgtaatgttcttgtaaatgcccaattaatatgcaaaatcgcggacttcggattgtcacgtgaaattgaaaatgcaagtgatgcatacacaactcggggcggtaaaattcctgtacgttggactgcgccggaagccattgcttttagaaaatttacttcagcatcggatgtttggtcgtatggagtagttctatgggaggtcatgtcctatggggaacgtccatattggaactggtcaaatcaggacgtgataaagagtatagaaaagggctaccgtttaccagctccgatggattgtccagaagccctttatcagctaatgttggattgctggcaaaagcaacgtactcatcgccccacatttgcaagtatcgtttcaactcttgacaatttggcacgacaaccacagtcattattgacaacacgaccctcgccagaatcagacggtaatcatattttggatggacagcgcggtcaaaatattttcataagcactgacctttggttagagcacattaaaatgtctagatactgtcatcattttaaagaggctaatttaataaatgctcaacagatatccaggttaacagctcaacaactttcggacatgggaattactttagttggacatcaaaaaaagatcttacatcaagcccggcaactcgacactataatataaacaatttatttttacaaagtagtgtaaggtgtacatataatgaatacataatgtattatataaataatataatatatggtggaactttcttatttcgaatcaacatctgcatcataaaatcaagttatacaatattattcacatgcatttttatcttcttttgccaaaaaagatacagatttcgaattaggaaagttcgagtgtaattgacacgtgtgaaataccagaacacatacattttataagaattttataggttctcttaactagaacaatagaatatataataggaaaagtattgtttttacgttgtttaaaaattataccttatatatcaatgtgtaccaattatttattatacgaacaattttcaagcttattattataagagtttagaggcgctatgattgccttgctatattttacctttttttgttgtgatagaagtggaattaaagaactattcatctttattagattatatttcatggtttactttgcataaaatagtgaaaaactcaataaaattacactcgtacgtaaggtgcggtattccggcctaaatcataa

SEQ ID NO: 1398 - protein, 1096 aa, DROSOPHILA
MKMVGCHPNDKKVKYDGIKSKTSSVTILTSVLNDAISALKSAFYKNQAPISEQNRSQIVSRMSLLRTILLIIISIHFKLAHADQVVLLDTTREATLEWTRYPYGPQAQTPGWVEESFTDFVKGINWRSYVVCDVAYHNVNNWLWSPFIDRGSANRLYIEIQFTIRDCSLFPGNALSCKETFSLLFYEFDAATREPPPWQTDSYRLIARIAAGEGRFNQNSDVDINTEVKSIAVNKKGVYFAFRDQGACISVLAVKVYYITCPAVTENFAHFNETPTGREITIIEKQNGTCVDNAEPYETPTYLCKGDGKWTILTGGCRCKAGYEPNYTNKTCTECPLGTFKSPEVTKCTPCPPNSNASKTGSPFCKCASGFYRHPNDGRHMPCYSPPAAPTNLTLLFVDQTSAIISWSAPAKNESFSSETNSKIYHSDIVYKIKCNICSPNVVYNPSTDTFNETKITLTNLEPVTTYTVQIHAINSVSHINEFKRHSNESSLVAVSDIVFSNTSLLNIPLDLNEVKTGQAEIVFTTESVLLSTVFNLRILAITNKDADLEWDKPVQSDFPLEFYEVRWFPKVELDAINKSALNTKETKAHIVGLLENTEYGFQVRCKTNNGFGSYSNMIYAQTLQSVGSVYDDSVQIRFIAGAIVTGVLFLVIFIIATVYFMRSKHQDDLDKKSTNHLPLPLDYASNEVNSMDTTPIVKKLHLNVTTPLFGNSRSYVDPHTYEDPNQAIREFAREIDANYITIEAIIGGGEFGDVCRGRLKIPPNFVQDIDVAIKTLKPGSSEKARCDFLTEASIMGQFDHPNVIYLQGVVTRSNPVMIITEYMENGSLDTFLRVNDGKFQTLQLIVMLRGIASGMSYLSDMNYVHRDLAARNVLVNAQLICKIADFGLSREIENASDAYTTRGGKIPVRWTAPEAIAFRKFTSASDVWSYGVVLWEVMSYGERPYWNWSNQDVIKSIEKGYRLPAPMDCPEALYQLMLDCWQKQRTHRPTFASIVSTLDNLARQPQSLLTTRPSPESDGNHILDGQRGQNIFISTDLWLEHIKMSRYCHHFKEANLINAQQISRLTAQQLSDMGITLVGHQKKILHQARQLDTII

SEQ ID NO: 1399 - DNA, 3147 bp, DROSOPHILA
gcctcttttcttttaaacaaagaatatagcacttttaatgcattaaatacgtatttaaaccttttcttttgaaacgccaaattcatattagagtttcataagattgttttaaaacataacaacataataattgaagaattggaaatctttttaggtgtttgtaagcctttgaattcctaattggaatagctaaagatccatatttcatcttcaaatctctttgcaactagagatttattttatctggcaattattaagtatacatttttatatggtactttaaactgatggtttaatcagttacatggattttctaaattaaaaatggtcatgtgaagatagccactcttctaacaatctaatcacatttatagtaagaaatacaatacaatacaatacaatacaatacaatacaatacaatacaatagaaagacaatcgaatctgcgcaatccgtgtgaaattcaaggactacagctgggtggctaatcatttccccctatccacttacacctcggattacctcttattccgactcccggagtcttgtgtctgccaatgcggaactattttcgctatctgaacagacgttcggacctcgatatgcggcaaagattcacagcccggctgttgattccgattcggtggcaatgtgttcgttgttattgtaaaacgggcaatggcaactgggcagtgggcagtggggttttcgggttgtggcttctacgtaagtggaagagacgccgtgatatgcgctggcagcgatgcgtgcgatctatcaacatttggccatgtttcgttcgcatcgcgtgggcccggagcggaacagccggcaccggagttggcatcaatccaaatgtcacgtacccggagccggagacgcgtccggagcatatttaaagtagtcggccaccaatggagggcagcagaagacagcagacagtccaagcgggagcacaccagaagccgaagagcaactggaactgcaactgggagacaagatgacgagatcgacctacatttgggcgctggccgcctgcctgatcgtaagtgttcaagctcgaaatcttaggattaatcccaagaaaaccaagtctatcaattctgactgctttcgtttgtgccatgtaaatcgtacatgaaaagcaaattgactttcctttaaattacttgaaacggaatcaagctatctatcgatgctagacttattttaagtatatgtatatgtcgatccaattctaatccaccccccccccctcaatttacttttaggcctgtgcaagcgccaactacggcagttcccagggctatggacccgagtccggaagcggtgcctccgatggcggtgctgatgccgcttcagcggccgcagcagctgccggcggtgccggtggagctggtggcgagtacggtggtgctaacgccggtgctggtgctctcgaatccggagccgatgccgccggtgtggcacaggctggccagagcagctacggatccgaccagaacattccgtacaagccggtgaacaccaagggtaacaccctgacctcatcgatcacctacccgcagaacaagggcgagatcctcatccatcgtcccgctcccatcattgtcaagcgtccgcccaccaaggtgctggtgaaccatccaccattggtggttaagcccgctcccgtggtgctccacaagcccccagcaatcgttctccgcaaggtctacgtcaagcaccacccacgtcgcgtcaaggttgagcccgtgttcgtcaatgtggtcaagcccccagcagagaagtactttgtcaacgagaacaagcagggctacggacagggctcgcagtcccacggacacggccatggacacggtggccatggacacggacacagcggacacggacacggtggacacggtgctggaccccatggtcctggaccccatgacggtggccgtgctctgcccgcctacgcttcgggagctgattccgctgccgccagcgctggctatcagctgctccagagcggcaaccagggtctgtccgctcttgccaacatcgccggcgagcgtgagggtccctatggtcccgctccaagccatcagcactatagcgccggtccagccggacatggcggctatgctgctcccgcctattaggtaacagatgcggaggagttacggattggatgactgctgcggctccggaatcaactgaagcggctggtttagtcattcgcttatccggctgattagttactatgttttttttacaaaaaaaaaaaaaaaaaacagcctgatcgaccaacgcccatgcctacgcccacgcccactcatgcacaccccaataccacccactcacccattcaacggcccaggaggggcgtggcactcaggtttctttgcaaaacaaataaaaaatttgaacaaaaaaaaaaaaacaattatacccaagctgaatgttgttttcgatgaagggtgaaatctaaatgctagttatatttaaattaaactatcattagatatatactctaattgatagttattgatagtcttgcgactcattttaaacttgatacacttatagcatagacagtgagtaatatcattgatattattatataattattgttacacaaagtgcatatgatgagaatcgatttaatgatgggagaactgacttacccgcaactttattcgcagcaacaagtgtcgcatataataaatacaataaatccgaaacgcaggctgtcattacacacatcgtttggttgtccttccccattgttgtgcgttatgccaatggcatcccacgcaattgttcaataacaaacgggcggcaaaatcggctataatgataggtaaggcaaagaagagctcggctgatgacaggtggaatcgcaatttaggtcgcccagtgccgcccatttggcagtttgaaaattcagcataaaaatgcgatacctttgcacagagatttcagtctgtaagcagaaataaattgagagcattaataaaataaccaactaaacagaattattaaagcgagccaaaacaaatcggtttcaagttcaaatatttttttttgcgaacacttttcggtgataaaaaaaaaaaaaacaaaaccaaataaccaacaacagaggcgaaatgagtcact

SEQ ID NO: 1400 - DNA, 921 bp, DROSOPHILA
atgacgagatcgacctacatttgggcgctggccgcctgcctgatcgcctgtgcaagcgccaactacggcagttcccagggctatggacccgagtccggaagcggtgcctccgatggcggtgctgatgccgcttcagcggccgcagcagctgccggcggtgccggtggagctggtggcgagtacggtggtgctaacgccggtgctggtgctctcgaatccggagccgatgccgccggtgtggcacaggctggccagagcagctacggatccgaccagaacattccgtacaagccggtgaacaccaagggtaacaccctgacctcatcgatcacctacccgcagaacaagggcgagatcctcatccatcgtcccgctcccatcattgtcaagcgtccgcccaccaaggtgctggtgaaccatccaccattggtggttaagcccgctcccgtggtgctccacaagcccccagcaatcgttctccgcaaggtctacgtcaagcaccacccacgtcgcgtcaaggttgagcccgtgttcgtcaatgtggtcaagcccccagcagagaagtactttgtcaacgagaacaagcagggctacggacagggctcgcagtcccacggacacggccatggacacggtggccatggacacggacacagcggacacggacacggtggacacggtgctggaccccatggtcctggaccccatgacggtggccgtgctctgcccgcctacgcttcgggagctgattccgctgccgccagcgctggctatcagctgctccagagcggcaaccagggtctgtccgctcttgccaacatcgccggcgagcgtgagggtccctatggtcccgctccaagccatcagcactatagcgccggtccagccggacatggcggctatgctgctcccgcctattag

SEQ ID NO: 1401 - protein, 306 aa, DROSOPHILA
MTRSTYIWALAACLIACASANYGSSQGYGPESGSGASDGGADAASAAAAAAGGAGGAGGEYGGANAGAGALESGADAAGVAQAGQSSYGSDQNIPYKPVNTKGNTLTSSITYPQNKGEILIHRPAPIIVKRPPTKVLVNHPPLVVKPAPVVLHKPPAIVLRKVYVKHHPRRVKVEPVFVNVVKPPAEKYFVNENKQGYGQGSQSHGHGHGHGGHGHGHSGHGHGGHGAGPHGPGPHDGGRALPAYASGADSAAASAGYQLLQSGNQGLSALANIAGEREGPYGPAPSHQHYSAGPAGHGGYAAPAY

SEQ ID NO: 1402 - DNA, 3407 bp, DROSOPHILA
gaattggcaaacggttgaggggcaagctccaataaaaaggcattgtggttggtggacccattttttggcaccccactatgcaagctaagggttttcaatgggcttgccctttgacccgtgccgtgtgtgcgaatggtcgtcgtctgatttaagattaaaaacttataaactaaaaacacaactgtaacattgcctgtgattcattcgatcatctgtgtgtggagtgtacgctgtgtgaaagacttgtgtggatatatgtatgtattataatgatatctgtgaagtaagagaaagcaccccgcgcagcagagaagcgatatttttttgtaaacatttaaaggattgcaattgaatgcacaaatgcatgaaggtgtgagctgaaacaaatgagaaacgtaacatatggtactgatttttatactgagaactgagacttactatatatacatacgaacaacaaataacaacacaacctacttacttacctaaggactcacaaggattactttacccgggactctacgtacatacgtacagacactagaacaatactacacacgaaacgccaacgccaactagtgaaatttacacctcacccacacattgcctacttacataacaccacaacgttcatatgagcattctaatcgaatatgattatcctaaatatacactgacgattggagacgctgacgcgcggtgcttaagccggaaataaacttagtatatgtgctactcggtatgctagttaatgctaacctagtcattaagtagggatgcgcgagagaacctttgatcacgattgcgataggagagaatcaattatgttacgttatctagtatgctgtattaccaattacaaaaaatgaaaacccctctgaatatcaatgtgcggcctaactgttccgaaacaaattgtatgactgatagtttgtacgcgaaatcttagcaaatgtaatctgtgtctgtgtgcaagagcgagaataaaagaattttgagtgcaagagcaacaagaaatgtgttttattccgatgaaatccaggcgggggcacagcacatcttggcgtcttacagcttggccctctctggaagggaaagtactcccgagtcgagcaaatctttaaactcgtcgggcttaagatctagttcgtccatccactccacctgcgcaccatcagttgccttgggcaactttcccggagttctgcttaggactggagcaggacgtggcgtcgctgtatcctcagtcacctcgaacgaattcctctgtatattgtgatcgtgtctgtgaacctcgcggtaatccagaacgggatagacacaggcgtcgacatcctcaaatatttgcgaccattcagcttgggtcttggagaggaaagcctcagtcaaaagctttcttcctcgaacctgatgctcctcgccaaactgactgacatcttcgggcagttccaagcgctgttttagcatctcaaagaactgcggttccagggcgcccacggacatgtagcgaccgtctttggtttcgtacgtgtcgtaaaagaatgatccaccatcgacgaggttgtcaccgcgctccctcccccaaataaccagattcctggacataaacagccaactggccacataggcagctccctcgaccatcgaggcatccactacttggccttttcccgacctgtggcgctccaagagggcaaggcaaattcccagagcgcacatcaaactgccgccagcgaaatcggccagaatattaatgggtgcagtgaccttttcgtggcgcctgcccagcatggaaagtactcccgataaggccgcgtagttgatgtcgtgtcccgcccgttgcgccagtcttccatgctggccaaagccggtgaggcgggcataaatcaggcggggattggctgtgcacaagtcggtgggacccagatttagtttctccattactcccggtcgaaaaggttcgatgagcacatcgcacttcttgaccagcctttgcaccgcttgctgacctttcgggttcttcagatccaggcaaagtgtgcgctttccctgctgcagtacatccaaagggttttccatcacctgaacgagatgggaacatggattcaaattcggcgatcggagttgtattgaatttaacgcccagtttgtttaccttgtcgatgcgggtgactgtggccccaaagtcggttagaatcttcccacaaaacggtcctggtgctaaacccacgaattcgagtaccctgatgcctttaagtggcatctttggaggagttttgatgcgaaaagtaacaagaaaattaagtgcactttgaacggcattgcagcagagatgccaacttgtaggtgattttttctaatctcacgagacaaggagtcgaatgaaataactttaacctgcacctcctgtctctgcatgtattttttttgtttttgataaaaattaatcttgataacaagaaatgtaccagtgaaagttttatttattttcgtgacttaactgtcgagctcgacaacccggtgctctcggtgctgccaactggtgtgaaacttttaattcgcaaaagggaaaagccgcaacaacattcaatcccaattaactacaactaacagttggccaccgctgctggacgaaaccaaattgaccgggagtgagaccaggacgtgacccaaaaacgatgccacagcaacggcgcaaggtggcctttagcggcaagaagaagaaggaccagatgttgcaaaagcgcaacacaaaaggtgagaaaaccgagattgtgtgcccacctgtgaaaaggggcgtaaggctggaaaatcgaagcggatgactaacaattgttacgccggcaggtcccccaaagtatctgaggagcacgcaggagtcgtatgaggacagcgatgtgccggaaacgaccaggaaactcatggagcagccttttgcgcgcggcggaaaccgaaacaagaacgtcaatcgctataatttgcaattctaccaggagggcaaaaaggaactggagcaaatgaaacaagagggctttaaaccgttcgagaaactcagtcccgctcagcgggaagtggacgaccgatactttgccggctgcgacttcccagttcgtccaccttggacgctaacggagtccaaggaagagcttgatcgcaccgagaatcgctactttaaggtaggtcagtctactggcggcttggtttataatattaacatatccattaataatcttttgtcaggaatacgtggacgagctgcagaaaaagcagcgtgctggagattcgaaggagctttcgctgtttgagctgaatctggaaacctggcgtcagctatggcgtgtcctggagttctcggacatcctgctgatcattgtggacgtgcgctatgccacgctgatgtttccacc

SEQ ID NO: 1403 - DNA, 1334 bp, DROSOPHILA
ggaggtgcaggttaaagttatttcattcgactccttgtctcgtgagattagaaaaaatcacctacaagttggcatctctgctgcaatgccgttcaaagtgcacttaattttcttgttacttttcgcatcaaaactcctccaaagatgccacttaaaggcatcagggtactcgaattcgtgggtttagcaccaggaccgttttgtgggaagattctaaccgactttggggccacagtcacccgcatcgacaaggtgatggaaaaccctttggatgtactgcagcagggaaagcgcacactttgcctggatctgaagaacccgaaaggtcagcaagcggtgcaaaggctggtcaagaagtgcgatgtgctcatcgaaccttttcgaccgggagtaatggagaaactaaatctgggtcccaccgacttgtgcacagccaatccccgcctgatttatgcccgcctcaccggctttggccagcatggaagactggcgcaacgggcgggacacgacatcaactacgcggccttatcgggagtactttccatgctgggcaggcgccacgaaaaggtcactgcacccattaatattctggccgatttcgctggcggcagtttgatgtgcgctctgggaatttgccttgccctcttggagcgccacaggtcgggaaaaggccaagtagtggatgcctcgatggtcgagggagctgcctatgtggccagttggctgtttatgtccaggaatctggttatttgggggagggagcgcggtgacaacctcgtcgatggtggatcattcttttacgacacgtacgaaaccaaagacggtcgctacatgtccgtgggcgccctggaaccgcagttctttgagatgctaaaacagcgcttggaactgcccgaagatgtcagtcagtttggcgaggagcatcaggttcgaggaagaaagcttttgactgaggctttcctctccaagacccaagctgaatggtcgcaaatatttgaggatgtcgacgcctgtgtctatcccgttctggattaccgcgaggttcacagacacgatcacaatatacagaggaattcgttcgaggtgactgaggatacagcgacgccacgtcctgctccagtcctaagcagaactccgggaaagttgcccaaggcaactgatggtgcgcaggtggagtggatggacgaactagatcttaagcccgacgagtttaaagatttgctcgactcgggagtactttcccttccagagagggccaagctgtaagacgccaagatgtgctgtgcccccgcctggatttcatcggaataaaacacatttcttgttgctcttgc

SEQ ID NO: 1404 - protein, 373 aa, DROSOPHILA
MPLKGIRVLEFVGLAPGPFCGKILTDFGATVTRIDKVMENPLDVLQQGKRTLCLDLKNPKGQQAVQRLVKKCDVLIEPFRPGVMEKLNLGPTDLCTANPRLIYARLTGFGQHGRLAQRAGHDINYAALSGVLSMLGRRHEKVTAPINILADFAGGSLMCALGICLALLERHRSGKGQVVDASMVEGAAYVASWLFMSRNLVIWGRERGDNLVDGGSFFYDTYETKDGRYMSVGALEPQFFEMLKQRLELPEDVSQFGEEHQVRGRKLLTEAFLSKTQAEWSQIFEDVDACVYPVLDYREVHRHDHNIQRNSFEVTEDTATPRPAPVLSRTPGKLPKATDGAQVEWMDELDLKPDEFKDLLDSGVLSLPERAKL

SEQ ID NO: 1405 - DNA, 5648 bp, DROSOPHILA
gtagaccagttcgtcgttatccttgaaataattatttcatcagttatttcaaaatatatttaaataatagaaggcatagaatataaggtttacctctcccccatttcattgttagccccttcgattactcatcgaaccaccctcgtatcgacccttcaccttaagcaacgcacaatcaatgggctgacttgattgccttagcctcggcactcgtatggctgcaattactcaccagttccttgggtatggacagcgattttcgctgctccaggggcaagtcgagtagctccgggatgcgacaccaatagtcatccggagtatcagccataaacaactggttaaacgcacaaaaaccgcacggtatgcaggcgggcaggcaaattccgaaaaccaagagcttctggtatttgccgaattcgccaatggtgggcagaaggtcgtccagatcgaaggcctcctggaaagaaaacagcaaatctagagaagatcaaggaccgtgtctcacagatatgcacatccaccgagggctgggattcgggcttgtggcgttgtcgcagctccgaaagttcatcgtattcgtccccatcgttgtcctcaatatctgacatggatgcgcctctagacaagctctgagctggaaatgtttactcacactgcccgattggctcagctcacggaagccatagaagcaaccactgacaactgtcagttgtctagggttgaaagaatgagctggttctgttgatagtaaaaagtttgtcgcagtgggctcgattcgtaatttatatttttgtttattctttagtcgcaagttagatttaaatagtttaaactaaagtatttaaaatattacacgtgaattcaatcctgctcgaattacggctaagacgagccactaattacagttgttaggctttgatattacaagtagagaacggggtttaaagtacttcgttatgcagctcagtacatttaaagggattttagttttttttttcttgataatttcttcttttcttggaatcgttgctagagctgggaaatggacaatgctaaattttacgcctaaagattaacagaacgaagagctatacaaaagatgcttcaagtcgttttaactccaactcgttcgctgtttactgcttaaaaattattgcgcgcttcgttactccactgttccttgcctgatacaaacatatgttattatacacatatcaatcgtaattatagtaaacagaaaactgtctgtgccgggcgcacagcgcagaaatcacacacacattaggcttaagtgtaaatttgtggctacacatacaaaaatacattcgcacgagctccttcttgaattatgcggtttaatccaccttgacaacactgtagatcttacgtatgaaccaaaagcacgcgaagaacccgatggtgccggtcagcaagaagaacaggaataccataatggccgtgtagccgaaatacaggaacgtcgaggcactgtccttgatcgaaagctttgtgacgaagtagtggcagcagtatatgaacagatagactgctgtgaagccggacgtcaggaaggagcgccaccaccagtgatagtcctccgcacacaagtgaaagtagcacagcagaatggtggtctccgagcatgtgatgaccaatatgacaaagaccaggaacagaaaaccgaacatgtagtaaatctggctggaccacagcgagctcaggataaagaacagctgaatgaagatgcagccaaagggtagaacgccgcccataacgattccaggaataggctgtgtgtagatcgattggtccggaatctgacggggaatctggttggtacgcacagggtgctccaatgcctgaaatcgtacagacaaatgtaaggaaccattttaaaaactagctaaatatatactcacgcgcttgcggaatccaaagtaagctcctacaaaggttagtggcacagagacgccaaaccacaaggcaagcagagcaattagcgtgctaaatggcacagctccggagctattttccccccacagcaccaggttcatgacgaagaacaatgagaagaccacactaaaaaagaaaaacgattaaataataatatcgctttaatttcaaagaacttacccagggcaaacgatcgaggtaaggatgacattactcttccatttcagcccaccgaaactcttgtagatacgcgcagacacgtaaccagccggtgtacccaacgaaacaaacaagaccatggaacaggtcatcagggctccccgattggctggggacaagaatcccaggcaggcaaatgctaaggtgatcatggccatcacaagcacctgtacacccgaacccaggaataccgacaacagcatgcccttccgcggcggcctgaacacatcaccatgtaccagtttccagccaaactcctcctgggcatcctcaccgctatccatctgattatagcgggctatatctttgtgcaacgtacgcagcattatcattgccaccatgccactcaggaaaaggacaataaccagggagttgagaatggagaaccactggatattcgtgtgcggcatggattccaaaatgtagtcccaacgtgatgaccatttgatagaatcgttctttacaaacttcacgctgtacgtgtagacaatttccagctgttctccagcctttaaagagttctcactgattgccagtggctctgtgctcaagcaattggggttttccttatcggtgtgcttaatagatttgggagtcacttttacagagattatgcgtccactgttgccgaactgaattccccagtcctccgactgtccactgtgataagtaatctcgagatccacatggttgaatggataataatgcattggctggttatatatagagttgatgggacaaccctcgccatcactgcgaactagacaacccatgggaaaaccaattccgcagtattgcttgccgttctccagtgggtagcaccatgtaaccggcatgttgtccacaatccaatgatgttggtagttcaagctgattcctttcttaagaaccatcatacgacggttgctagccggatcgtctcctttgtaagtcttgacacaggtctaaatacgaagagtcattaaatcattatgttggtaatgcgttaaaactgtttaatcttacggtcgcacattgctggttttccaagaactgaattttatagggtcctggacgaattcgctctccgaacacaacctgtcccagattctccaccggtgagttctgctcctcgcccaaacaaaagtcgaagtgatggtactcatagggtattacggattcctcagtgtttaagcggttgacgtacaacaagatttccgactgaagaagataatcaggaattagatcaatcaattggattgacaactgttgataatactagtgtattttaatcttatcgtggaaataattattaaagtttggtaaaaattccaaaagtttgcaaatgcgttcgataatttgaccccgtaatttgcttttactttgggttcttagaaatttatcttatcaaaaagctctcttagattgttagaaacaattgaatgtgaaacaccttaattaattcttatcattgggcaacgtctaatttaagggcgtataaaccgattaggatttcttgacctacgggtatattaaaaagttgtttagatttgtttaaagataagatgaagcaaacaaaaccaatagctcacgctttatcatccaatagttaggtcatcttttaaaagggctaaccccatctatttgggatatcaaactaaaaattatactttgtcctgaatttatattgttattgtgttatactattattactaaaaagaaaataacccaaacataatgcaaggaagcatgacaagctaaccgcgttccctggttcaattattggttagccgccactatgttaagattcttaaggtcgggagcccccgaaatcgcattcgcgagccagctgaaccaacattagaactcccatctagctgtcgctaggaaagagagctggcgtaggcaacgtcagcagaagttgagatagagggccacatatggaccccacatataactagttactgcgcttatcagtgcttccgcctgtgaccaccattagaggaatatagaaccaatgtacataactagttccagtgcctttgctaattgtggcgggcgtggggcaaacacacccactatctacgtacatatgtacatctgcacttctgcacatacgtatacacctaccttgcatgtggatgagacgtcggttttcttgcagaaattgaccggtgccagtccgggcagatagaaggcctgtgtcggggtcgcaaggtgcaagagaacgacgcccaggagcggcagaagtccggatagcaggatcatctcgaattggggtaaccaacgaacggcaggagtagcagaccttcttcctttacttgtacgggttgtaatcacaacgtggccgtgtccgcgattctctgccacactttccggatcggcgggccacgcacaaaccgtactatctggatatttatcggaatatacggagtttttcgagtgtttttactacgtttcctcttttttgccgaacgtcagcactgtagcagcgttgccacctagtacagctgagagggctgccaactggctgacaaaaaaactaccagcatttgcaaagctaaatattaccgcgaaaacctttagctcttattattattacgtgcaaaacgaaatttggtagacttaataaacttttatatttaaattaattaattcccctgttcagtaagcgaatgcaaccaatatacacacgtatacgtgtgatacttctaagatattactatttttatccactgtttcttaatatagtaatcaaattttgttcatttgttagttttttacctacgactcttaagtcaaagtattcgattatttagttcgttcgaggttttgcttccgtgcttatctttgaatatgaaaattttcgataagcacaatcattcaaatttaacgattgatttttggggaggcaaacgcgttttaatacaagtagtaagtattttggtcttatcgttcctgactaataatatattttgtcaaatggttgcacatttcctacgcatttaagaatatttaattaatacgttattagatttaaaaattatcgatagttcgaataaagcaatcgaataggtgtcgcctttttcatcgaaactcagtgctatcaaataaaaatcgacattcgtttcagctctatttcaaatcggagacacaagaaatatattgcctgcacttcccgaagagcagataaaggttctgccaccattaaataggcttataataataactaagaaaatcgccgttaggaatcccgcgcttttttaccgttcccgaaaaataaccaaacaacaatgtgagtagaatgaagagttctactgaacgcgcttgttgtgtgcgtgtgtgcgaaaaaatcaattcttttgacaatcaaggtgttgcaacctgtcgaaataaaatcgccagcttcagcggagcagcccaataactttaactcttttgtctccaccatttgcagccgacagactagtgttgtctagtaattacgcaaaaattcc

SEQ ID NO: 1406 - DNA, 2564 bp, DROSOPHILA
caacgctgctacagtgctgacgttcggcaaaaaagaggaaacgtagtaaaaacactcgaaaaactccgtatattccgataaatatccagatagtacggtttgtgcgtggcccgccgatccggaaagtgtggcagagaatcgcggacacggccacgttgtgattacaacccgtacaagtaaaggaagaaggtctgctactcctgccgttcgttggttaccccaattcgagatgatcctgctatccggacttctgccgctcctgggcgtcgttctcttgcaccttgcgaccccgacacaggccttctatctgcccggactggcaccggtcaatttctgcaagaaaaccgacgtctcatccacatgcaagtcggaaatcttgttgtacgtcaaccgcttaaacactgaggaatccgtaataccctatgagtaccatcacttcgacttttgtttgggcgaggagcagaactcaccggtggagaatctgggacaggttgtgttcggagagcgaattcgtccaggaccctataaaattcagttcttggaaaaccagcaatgtgcgaccacctgtgtcaagacttacaaaggagacgatccggctagcaaccgtcgtatgatggttcttaagaaaggaatcagcttgaactaccaacatcattggattgtggacaacatgccggttacatggtgctacccactggagaacggcaagcaatactgcggaattggttttcccatgggttgtctagttcgcagtgatggcgagggttgtcccatcaactctatatataaccagccaatgcattattatccattcaaccatgtggatctcgagattacttatcacagtggacagtcggaggactggggaattcagttcggcaacagtggacgcataatctctgtaaaagtgactcccaaatctattaagcacaccgataaggaaaaccccaattgcttgagcacagagccactggcaatcagtgagaactctttaaaggctggagaacagctggaaattgtctacacgtacagcgtgaagtttgtaaagaacgattctatcaaatggtcatcacgttgggactacattttggaatccatgccgcacacgaatatccagtggttctccattctcaactccctggttattgtccttttcctgagtggcatggtggcaatgataatgctgcgtacgttgcacaaagatatagcccgctataatcagatggatagcggtgaggatgcccaggaggagtttggctggaaactggtacatggtgatgtgttcaggccgccgcggaagggcatgctgttgtcggtattcctgggttcgggtgtacaggtgcttgtgatggccatgatcaccttagcatttgcctgcctgggattcttgtccccagccaatcggggagccctgatgacctgttccatggtcttgtttgtttcgttgggtacaccggctggttacgtgtctgcgcgtatctacaagagtttcggtgggctgaaatggaagagtaatgtcatccttacctcgatcgtttgccctggtgtggtcttctcattgttcttcgtcatgaacctggtgctgtggggggaaaatagctccggagctgtgccatttagcacgctaattgctctgcttgccttgtggtttggcgtctctgtgccactaacctttgtaggagcttactttggattccgcaagcgcgcattggagcaccctgtgcgtaccaaccagattccccgtcagattccggaccaatcgatctacacacagcctattcctggaatcgttatgggcggcgttctaccctttggctgcatcttcattcagctgttctttatcctgagctcgctgtggtccagccagatttactacatgttcggttttctgttcctggtctttgtcatattggtcatcacatgctcggagaccaccattctgctgtgctactttcacttgtgtgcggaggactatcactggtggtggcgctccttcctgacgtccggcttcacagcagtctatctgttcatatactgctgccactacttcgtcacaaagctttcgatcaaggacagtgcctcgacgttcctgtatttcggctacacggccattatggtattcctgttcttcttgctgaccggcaccatcgggttcttcgcgtgcttttggttcatacgtaagatctacagtgttgtcaaggtggattaaaccgcataattcaagaaggagctcgtgcgaatgtatttttgtatgtgtagccacaaatttacacttaagcctaatgtgtgtgtgatttctgcgctgtgcgcccggcacagacagttttctgtttactataattacgattgatatgtgtataataacatatgtttgtatcaggcaaggaacagtggagtaacgaagcgcgcaataatttttaagcagtaaacagcgaacgagttggagttaaaacgacttgaagcatcttttgtatagctcttcgttctgttaatctttaggcgtaaaatttagcattgtccatttcccagctctagcaacgattccaagaaaagaagaaattatc

SEQ ID NO: 1407 - protein, 659 aa, DROSOPHILA
MILLSGLLPLLGVVLLHLATPTQAFYLPGLAPVNFCKKTDVSSTCKSEILLYVNRLNTEESVIPYEYHHFDFCLGEEQNSPVENLGQVVFGERIRPGPYKIQFLENQQCATTCVKTYKGDDPASNRRMMVLKKGISLNYQHHWIVDNMPVTWCYPLENGKQYCGIGFPMGCLVRSDGEGCPINSIYNQPMHYYPFNHVDLEITYHSGQSEDWGIQFGNSGRIISVKVTPKSIKHTDKENPNCLSTEPLAISENSLKAGEQLEIVYTYSVKFVKNDSIKWSSRWDYILESMPHTNIQWFSILNSLVIVLFLSGMVAMIMLRTLHKDIARYNQMDSGEDAQEEFGWKLVHGDVFRPPRKGMLLSVFLGSGVQVLVMAMITLAFACLGFLSPANRGALMTCSMVLFVSLGTPAGYVSARIYKSFGGLKWKSNVILTSIVCPGVVFSLFFVMNLVLWGENSSGAVPFSTLIALLALWFGVSVPLTFVGAYFGFRKRALEHPVRTNQIPRQIPDQSIYTQPIPGIVMGGVLPFGCIFIQLFFILSSLWSSQIYYMFGFLFLVFVILVITCSETTILLCYFHLCAEDYHWWWRSFLTSGFTAVYLFIYCCHYFVTKLSIKDSASTFLYFGYTAIMVFLFFLLTGTIGFFACFWFIRKIYSVVKVD

SEQ ID NO: 1408 - DNA, 5215 bp, DROSOPHILA
tccagattggggcagtattcctttacgaactccaccagcagggactccttttggtaggacgcacagtccacttgaaggactctgatgaagggtcccgccaccttgaagaacctgatcaattgcggcagaggcaccgtctccagactaaccatgtccaaagcatttcgttgcactctcgcccagccctcgaaggccgctcggaacttgggcgccacacaggccagcagaaccttatcggtaatcctgggcagaaactcgagaaccagtcggatgatgtcctccggcagatcaagcagactggtcctgcataatggcgatggcgatggcgatggctcacttttttggactccacccgggcgattggagcgaactgggaatggagtcttcactgatctcgaatgcgttttcgccttaggcattttttggattatttgcttgtacgtaaatttagattaattcatttttgacactgcccagatgttatgataggaaataagggaaaatcaagctcgaccttgtgtaaccgggtaaatattagagtcctgataccgtaattcaagatccaaatctaaatactccagagatctatagggaaaaagactaggacaaaggaccatcttaacgaatctttggatttggaactgcgtactgaacttaagtagcaatattaagaaactacatttttgcttgcaagatctccttggtgtcaacatatttgtgatctgatccagcattatgaattcccatgggtccaggcacttcctacggttgacagtgaccgccagcagtttacggtcgacaggtgggggcaatttcgcgcattcctctattattcaccgcatgagcaagttttctttttgtttgacaacaattaattgcataattgtctgaataaatgcataaatcaattaccggtgattgagaagtcgccatacgatatacgctacacgtacttatttatttatttatttttaccggatatgtttgaagaattaagtttcggtttttgtttacaaagcttttgtaattcacaaaagcaaacaacttaggcataatggcaatgccctataattaatggaaaagtaatggaaaaggaaaagaaaactggtatttaaaggaggaaattgttatagatttaattttaagcagttaaagtatgctgctctatttgctcatagcaaatacttctaaaacacggaatcaaaagcgtttacttagagaactattatttaaattataaataaattagtaagcaattaaatagtgctgttatatgttaagtaacttgttgaaacattaatttcgttatttttcatacaatgacaattgctaacattgtgctgcaaaaatggtaagtttttatgattaattatatttgtatgtttgtttttaaagaagtctctgcccatagttctatatttaaaaagatatcccttagcgttaagcaatagattagtaaatagtttatatgcaatcattttaaactttagcgaaaacaaagaatagccttgcagtttatctaattaattttaagaaatctcttctagatgtgacaatacattagatttgtcgctacaaatcttagatccaatgagtcaactgcatggtgccatcatgcgtcctctgggtgtccatgacgctcatttggcgcactaatcgcttcatcgagggccgatgaacaggtcgcccacttccactggccgttgtgtccaggggcgtacgctcgtcaatgcggggagccggctcccgaacccgtcgactgtcccgcagctccaattccacctcagaagcattggtggaggatccagccaggacatccaggttctcgtacgacgcaggttgagataaaatctctctgcaaaaagtaagcacaatatatattaaattagttttatacccgccttggtcaccacatgcacattgaactcacggcttttgagcgcatctacagcaatctttgaactgccagttcttgccaaactcctcgccctcctcgatggtctgcggcaagcgatgatgcagtgtttccggcagccgcaatcccgtcatgccgcccagcatcgaaaggaagcccatgatgaccaagggcagtttaagattgtcctttcccaagtaggtaataaaaggtatgccaatgagacccaatcctccaatataactggaagcaccaatgccgataccccgaacctgagtgggataaagttccccggcaaaggggtatatgatcaggaaggaggcggatagcaaggctttggatactagatacagcacaagggtctcatccacggcatcatcgggcaacattacagtgatcacacaggccacgccactgaaaaatgttggacttcgaattttacacaaaaaacacaagatgatgggtcaaacacctaccccaatatcattgataagctcaatggccatcttctgccccaggtatccatgaagtaccagcagcacaaatagctcggcagctccacaacagccgacagaaagaagctgacatactgattggtgcccagcgctggtccgtaataactgagtcccagataaaccgtctcattggcaaaccaactcagcgtgattaggatggtctttaagcgcatattgggggtgcgacagagatctgctagccccacattggccatctttttcttttgcttcttgagcttatcccgtcgtatctgagcctccagcttgagatgcacagcctcgggaaactctctgccattgacctttgccatgcgctccagaatcttgagagcctcctccaggcgaccgcgcatcaaaagccatctcggtgattccggcatgacgaacatgtacaggaaataggcgtaaaacggcagggatgtgatgtaggagaggcgcacccaatcccgctccagataagtgacgccggacaggagcatgatgcccgaagtgtaaaaggtgcacgtcatcacagtcacgaaggatcgatagttttcacccaccagttccagagctgcagacgcagaaaagttaatggttaaagttagaagcaacaatgaaatacccacatattataaatggtatctggtagacagctggaatggtcagtcctacgatgactcgactgccggcccaagtccaaaaatccttgctcagcgaagtcattaggctgccagccagcaaagtggccaaacagacgaaataggagagccttcgtccaccacgatcattgagtaatccgaaaagatagactcccactggaccgccagtattaagagcagccaatccaatcgtaggataaatatcctgatcgcacactagatcgaactgaaataggaggatttaatggtttatagtaagccaatccttcgctcctaggtaaaggtagtactgatgcttgggaaatgattcgagcaactcctacatgaatgacgttgtagtttcaaatgaaggcttggtggtctggattgcgcacatcaatcacaatggaggaccagacgacgcttgtgttgtactcccatccctgggggcacttgatcagtggccaactggcattcggctccatggtcgtcaggtcatcctcttcccccgattcaaggagctgcgtccagttgactccgtaggtataacatttgctgtagaccagttcgtcgttatccttgaaataattatttcatcagttatttcaaaatatatttaaataatagaaggcatagaatataaggtttacctctcccccatttcattgttagccccttcgattactcatcgaaccaccctcgtatcgacccttcaccttaagcaacgcacaatcaatgggctgacttgattgccttagcctcggcactcgtatggctgcaattactcaccagttccttgggtatggacagcgattttcgctgctccaggggcaagtcgagtagctccgggatgcgacaccaatagtcatccggagtatcagccataaacaactggttaaacgcacaaaaaccgcacggtatgcaggcgggcaggcaaattccgaaaaccaagagcttctggtatttgccgaattcgccaatggtgggcagaaggtcgtccagatcgaaggcctcctggaaagaaaacagcaaatctagagaagatcaaggaccgtgtctcacagatatgcacatccaccgagggctgggattcgggcttgtggcgttgtcgcagctccgaaagttcatcgtattcgtccccatcgttgtcctcaatatctgacatggatgcgcctctagacaagctctgagctggaaatgtttactcacactgcccgattggctcagctcacggaagccatagaagcaaccactgacaactgtcagttgtctagggttgaaagaatgagctggttctgttgatagtaaaaagtttgtcgcagtgggctcgattcgtaatttatatttttgtttattctttagtcgcaagttagatttaaatagtttaaactaaagtatttaaaatattacacgtgaattcaatcctgctcgaattacggctaagacgagccactaattacagttgttaggctttgatattacaagtagagaacggggtttaaagtacttcgttatgcagctcagtacatttaaagggattttagttttttttttcttgataatttcttcttttcttggaatcgttgctagagctgggaaatggacaatgctaaattttacgcctaaagattaacagaacgaagagctatacaaaagatgcttcaagtcgttttaactccaactcgttcgctgtttactgcttaaaaattattgcgcgcttcgttactccactgttccttgcctgatacaaacatatgttattatacacatatcaatcgtaattatagtaaacagaaaactgtctgtgccgggcgcacagcgcagaaatcacacacacattaggcttaagtgtaaatttgtggctacacatacaaaaatacattcgcacgagctccttcttgaattatgcggtttaatccaccttgacaacactgtagatcttacgtatgaaccaaaagcacgcgaagaacccgatggtgccggtcagcaagaagaacaggaataccataatggccgtgtagccgaaatacaggaacgtcgaggcactgtccttgatcgaaagctttgtgacgaagtagtggcagcagtatatgaacagatagactgctgtgaagccggacgtcaggaaggagcgccaccaccagtgatagtcctccgcacacaag

SEQ ID NO: 1409 - DNA, 2606 bp, DROSOPHILA
atgtcagatattgaggacaacgatggggacgaatacgatgaactttcggagctgcgacaacgccacaagcccgaatcccagccctcggtggatgaggccttcgatctggacgaccttctgcccaccattggcgaattcggcaaataccagaagctcttggttttcggaatttgcctgcccgcctgcataccgtgcggtttttgtgcgtttaaccagttgtttatggctgatactccggatgactattggtgtcgcatcccggagctactcgacttgcccctggagcagcgaaaatcgctgtccatacccaaggaactggataacgacgaactggtctacagcaaatgttatacctacggagtcaactggacgcagctccttgaatcgggggaagaggatgacctgacgaccatggagccgaatgccagttggccactgatcaagtgcccccagggatgggagtacaacacaagcgtcgtctggtcctccattgtgattgatttcgatctagtgtgcgatcaggatatttatcctacgattggattggctgctcttaatactggcggtccagtgggagtctatcttttcggattactcaatgatcgtggtggacgaaggctctcctatttcgtctgtttggccactttgctggctggcagcctaatgacttcgctgagcaaggatttttggacttgggccggcagtcgagtcatcgtaggactgaccattccagctgtctaccagataccatttataatatctctggaactggtgggtgaaaactatcgatccttcgtgactgtgatgacgtgcaccttttacacttcgggcatcatgctcctgtccggcgtcacttatctggagcgggattgggtgcgcctctcctacatcacatccctgccgttttacgcctatttcctgtacatgttcgtcatgccggaatcaccgagatggcttttgatgcgcggtcgcctggaggaggctctcaagattctggagcgcatggcaaaggtcaatggcagagagtttcccgaggctgtgcatctcaagctggaggctcagatacgacgggataagctcaagaagcaaaagaaaaagatggccaatgtggggctagcagatctctgtcgcacccccaatatgcgcttaaagaccatcctaatcacgctgagttggtttgccaatgagacggtttatctgggactcagttattacggaccagcgctgggcaccaatcagtatgtcagcttctttctgtcggctgttgtggagctgccgagctatttgtgctgctggtacttcatggatacctggggcagaagatggccattgagcttatcaatgatattgggtggcgtggcctgtgtgatcactgtaatgttgcccgatgatgccgtggatgagacccttgtgctgtatctagtatccaaagccttgctatccgcctccttcctgatcatatacccctttgccggggaactttatcccactcaggttcggggtatcggcattggtgcttccagttatattggaggattgggtctcattggcataccttttattacctacttgggaaaggacaatcttaaactgcccttggtcatcatgggcttcctttcgatgctgggcggcatgacgggattgcggctgccggaaacactgcatcatcgcttgccgcagaccatcgaggagggcgaggagtttggcaagaactggcagttcaaagattgctgtagatgcgctcaaaagccagagattttatctcaacctgcgtcgtacgagaacctggatgtcctggctggatcctccaccaatgcttctgaggtggaattggagctgcgggacagtcgacgggttcgggagccggctccccgcattgacgagcgtacgcccctggacacaacggccagtggaagtgggcgacctgttcatcggccctcgatgaagcgattagtgcgccaaatgagcgtcatggacacccagaggacgcatgatggcaccatgcagttgactcattggatctaagatttgtagcgacaaatctaatgtattgtcacatctagaagagatttcttaaaattaattagataaactgcaaggctattctttgttttcgctaaagtttaaaatgattgcatataaactatttactaatctattgcttaacgctaagggatatctttttaaatatagaactatgggcagagacttctttaaaaacaaacatacaaatataattaatcataaaaacttaccatttttgcagcacaatgttagcaattgtcattgtatgaaaaataacgaaattaatgtttcaacaagttacttaacatataacagcactatttaattgcttactaatttatttataatttaaataatagttctctaagtaaacgcttttgattccgtgttttagaagtatttgctatgagcaaatagagcagcatactttaactgcttaaaattaaatctataacaatttcctcctttaaataccagttttcttttccttttccattacttttccattaattatagggcattgccattatgcctaagttgtttgcttttgtgaattacaaaagctttgtaaacaaaaaccg

SEQ ID NO: 1410 - protein, 674 aa, DROSOPHILA
MSDIEDNDGDEYDELSELRQRHKPESQPSVDEAFDLDDLLPTIGEFGKYQKLLVFGICLPACIPCGFCAFNQLFMADTPDDYWCRIPELLDLPLEQRKSLSIPKELDNDELVYSKCYTYGVNWTQLLESGEEDDLTTMEPNASWPLIKCPQGWEYNTSVVWSSIVIDFDLVCDQDIYPTIGLAALNTGGPVGVYLFGLLNDRGGRRLSYFVCLATLLAGSLMTSLSKDFWTWAGSRVIVGLTIPAVYQIPFIISLELVGENYRSFVTVMTCTFYTSGIMLLSGVTYLERDWVRLSYITSLPFYAYFLYMFVMPESPRWLLMRGRLEEALKILERMAKVNGREFPEAVHLKLEAQIRRDKLKKQKKKMANVGLADLCRTPNMRLKTILITLSWFANETVYLGLSYYGPALGTNQYVSFFLSAVVELPSYLCCWYFMDTWGRRWPLSLSMILGGVACVITVMLPDDAVDETLVLYLVSKALLSASFLIIYPFAGELYPTQVRGIGIGASSYIGGLGLIGIPFITYLGKDNLKLPLVIMGFLSMLGGMTGLRLPETLHHRLPQTIEEGEEFGKNWQFKDCCRCAQKPEILSQPASYENLDVLAGSSTNASEVELELRDSRRVREPAPRIDERTPLDTTASGSGRPVHRPSMKRLVRQMSVMDTQRTHDGTMQLTHWI

SEQ ID NO: 1411 - DNA, 3545 bp, DROSOPHILA
catttaaggagccactcgaggtcagtgtaaaacaaatagcacacgcaaaaaacaatcaaaacgtatagatgactaaccagtggagtagtggagtggccacaggtgagttcgctctacgatctgcactgcaaataattctagagaaaaggtgtcataccaaatcacacaaaaaacctgtgaagaatgactggttaaaagatttaattgaacccaactggacatatgtattataagagtcctgcaagatacattagttctataattaaacaaaatgttttctatttttccaagtgtaatcaactggacgcggtcacttagcttcctgctgctaacacagacatcatcggccaacaaagcaacaaagttcagttccaatagagcagcaattgaatgcgaaatttattgccggcgatcgatcgcttggatcgaattgaatcgcggattcagaactgtatcgaatatcgcgtattgttcgatttcggtttccattcgtttggcttgttagccagccgcttgacgtactacagccaaaggcccaaagtgcagcgacacgacccacacacgtttgtccgcaattatcggcgttctaatggagcattgtgagcattgtgatgatcataaatttcgatcgtccacttccttatggcagccatggggtcatgactcatcgatccagtgaggatcccattgtcttagctatccgcgctccaaggccatcgaatgttccactcacggaagaagtgcccaccacgtctattccctaatccagaaatcacagctacggttccttatggcaaaaataatacttgcactccttttaaactgatttttattaatagaaatcaaatttgattggttttgggcagtgtctctcttgatatttgatgttcaataagaaatgattccttggcaacacaaaatttgatcaaattattgcaacaattcatagacatttattttcttaccattttccattcgagtggtgtcgttttaaataaaattaacctttagacgattcaaggaattcacgtaatccggatgctgcaaaatatgaaagtgttagtatatgctttcgaaactcccgccccggttttcccaccgtcaatataggccgcctgatcatggttccctttacattgagcaccacatcacgacctgatcccttcgagcagaatccaatggcctggatcacaaactcctcggtgatctgctcgcaatcggtcaaatcaataactttcaactggggacacttccgcaacatcctcatcatccccacgtccatcacccgaccgcacgcggtcagaccaaatcgctccagctggctgagatcgttgaagaacttgaagtgatcgtcgtccaggatatcgttgttgctgaaccgcagatccgtgaggctactcaactgtcccaggcacctggcgtgctcattggtgatattgaactgaccggataggtgcagatgggtgagcttgtttcctcgtttctctgccagaaccgtaaggaacccaatattcagctcgttggaggtcatccaggttttcagtgtacagcgctccagcttgggcaggttggcgattacctcgaagttggtgtcgcagccggagaagatcagttccaccaagttcgtgcagctctcggcgattttctggtacaagctcacattcataacctcgaaacaacagtcgtcgagatccaaagtgtgcaacgacttaagcggaattccaaactccatcgagttccatagcagacagtctcgaaggaccaaagttttgagattgggaaaaccgcagagattttggcctgttgcgaaaataaagtcccgcaaacgcataaatagagtgcagtgcatacctacctgtatagcaaccattaaccagttcaaaaaactccagctcctggttgggctgcatatcaaagttgagcacatcctctgcatccaaacactcaatagtcacccgtttcaagtgcgtcattttggacataatcgatcggtagtgaaactcatcggtggcgttcgagtaactaatctcctccagattggggcagtattcctttacgaactccaccagcagggactccttttggtaggacgcacagtccacttgaaggactctgatgaagggtcccgccaccttgaagaacctgatcaattgcggcagaggcaccgtctccagactaaccatgtccaaagcatttcgttgcactctcgcccagccctcgaaggccgctcggaacttgggcgccacacaggccagcagaaccttatcggtaatcctgggcagaaactcgagaaccagtcggatgatgtcctccggcagatcaagcagactggtcctgcataatggcgatggcgatggcgatggctcacttttttggactccacccgggcgattggagcgaactgggaatggagtcttcactgatctcgaatgcgttttcgccttaggcattttttggattatttgcttgtacgtaaatttagattaattcatttttgacactgcccagatgttatgataggaaataagggaaaatcaagctcgaccttgtgtaaccgggtaaatattagagtcctgataccgtaattcaagatccaaatctaaatactccagagatctatagggaaaaagactaggacaaaggaccatcttaacgaatctttggatttggaactgcgtactgaacttaagtagcaatattaagaaactacatttttgcttgcaagatctccttggtgtcaacatatttgtgatctgatccagcattatgaattcccatgggtccaggcacttcctacggttgacagtgaccgccagcagtttacggtcgacaggtgggggcaatttcgcgcattcctctattattcaccgcatgagcaagttttctttttgtttgacaacaattaattgcataattgtctgaataaatgcataaatcaattaccggtgattgagaagtcgccatacgatatacgctacacgtacttatttatttatttatttttaccggatatgtttgaagaattaagtttcggtttttgtttacaaagcttttgtaattcacaaaagcaaacaacttaggcataatggcaatgccctataattaatggaaaagtaatggaaaaggaaaagaaaactggtatttaaaggaggaaattgttatagatttaattttaagcagttaaagtatgctgctctatttgctcatagcaaatacttctaaaacacggaatcaaaagcgtttacttagagaactattatttaaattataaataaattagtaagcaattaaatagtgctgttatatgttaagtaacttgttgaaacattaatttcgttatttttcatacaatgacaattgctaacattgtgctgcaaaaatggtaagtttttatgattaattatatttgtatgtttgtttttaaagaagtctctgcccatagttctatatttaaaaagatatcccttagcgttaagcaatagattagtaaatagtttatatgcaatcattttaaactttagcgaaaacaaagaatagccttgcag

SEQ ID NO: 1412 - DNA, 1490 bp, DROSOPHILA
gtcgagcttgattttcccttatttcctatcataacatctgggcagtgtcaaaaatgaattaatctaaatttacgtacaagcaaataatccaaaaaatgcctaaggcgaaaacgcattcgagatcagtgaagactccattcccagttcgctccaatcgcccgggtggagtccaaaaaagtgagccatcgccatcgccatcgccattatgcaggaccagtctgcttgatctgccggaggacatcatccgactggttctcgagtttctgcccaggattaccgataaggttctgctggcctgtgtggcgcccaagttccgagcggccttcgagggctgggcgagagtgcaacgaaatgctttggacatggttagtctggagacggtgcctctgccgcaattgatcaggttcttcaaggtggcgggacccttcatcagagtccttcaagtggactgtgcgtcctaccaaaaggagtccctgctggtggagttcgtaaaggaatactgccccaatctggaggagattagttactcgaacgccaccgatgagtttcactaccgatcgattatgtccaaaatgacgcacttgaaacgggtgactattgagtgtttggatgcagaggatgtgctcaactttgatatgcagcccaaccaggagctggagttttttgaactggttaatggttgctatacaggccaaaatctctgcggttttcccaatctcaaaactttggtccttcgagactgtctgctatggaactcgatggagtttggaattccgcttaagtcgttgcacactttggatctcgacgactgttgtttcgaggttatgaatgtgagcttgtaccagaaaatcgccgagagctgcacgaacttggtggaactgatcttctccggctgcgacaccaacttcgaggtaatcgccaacctgcccaagctggagcgctgtacactgaaaacctggatgacctccaacgagctgaatattgggttccttacggttctggcagagaaacgaggaaacaagctcacccatctgcacctatccggtcagttcaatatcaccaatgagcacgccaggtgcctgggacagttgagtagcctcacggatctgcggttcagcaacaacgatatcctggacgacgatcacttcaagttcttcaacgatctcagccagctggagcgatttggtctgaccgcgtgcggtcgggtgatggacgtggggatgatgaggatgttgcggaagtgtccccagttgaaagttattgatttgaccgattgcgagcagatcaccgaggagtttgtgatccaggccattggattctgctcgaagggatcaggtcgtgatgtggtgctcaatgtaaagggaaccatgatcaggcggcctatattgacggtgggaaaaccggggcgggagtttcgaaagcatatactaacactttcatattttgcagcatccggattacgtgaattccttgaatcgtctaaaggttaa

SEQ ID NO: 1413 - protein, 464 aa, DROSOPHILA
MPKAKTHSRSVKTPFPVRSNRPGGVQKSEPSPSPSPLCRTSLLDLPEDIIRLVLEFLPRITDKVLLACVAPKFRAAFEGWARVQRNALDMVSLETVPLPQLIRFFKVAGPFIRVLQVDCASYQKESLLVEFVKEYCPNLEEISYSNATDEFHYRSIMSKMTHLKRVTIECLDAEDVLNFDMQPNQELEFFELVNGCYTGQNLCGFPNLKTLVLRDCLLWNSMEFGIPLKSLHTLDLDDCCFEVMNVSLYQKIAESCTNLVELIFSGCDTNFEVIANLPKLERCTLKTWMTSNELNIGFLTVLAEKRGNKLTHLHLSGQFNITNEHARCLGQLSSLTDLRFSNNDILDDDHFKFFNDLSQLERFGLTACGRVMDVGMMRMLRKCPQLKVIDLTDCEQITEEFVIQAIGFCSKGSGRDVVLNVKGTMIRRPILTVGKPGREFRKHILTLSYFAASGLREFLESSKG

SEQ ID NO: 1414 - DNA, 9922 bp, DROSOPHILA
tatgctcctgacaatttttttgaacagtaacatcttattgatgcactgtaggaatacatcaaaggataccggaaagatgaaggcgccacatctgaaatgagtcaaaattggttaatctgctctgctcgaaaataatattacccacctctccacattaacaattacgtctggagattccgatcctgatggtttacattcaactgcaacgccttcaactgcatcatgggacttcgcggtttcagcgagcgtcgtcaactggctgccttcaactaagacttcgggttgctctacttgagatggtcctgcagctgctacgtttgcaacatcgttttgtgaaattcctcctggctccggtactttaagcaagttgtcgcgtgtccgcctgggacacggcgccaccttgacagggaaccttgcccgtatgctgggattccggtagaactctttgtagtaccatctgctccactcgaccaacgttctattgtctccattggcagttttcaactcacttgcaatttcagacaaattaacgattaacttttgaaatgccgcaaaggacactggatacatgttgctcctgaaatcaaacaatatttaatgttaagatgtaaaagattcacagtaaccttacgacttgttctatgcaagtaacgttatttgttgtttatcataaacatcacatttcaataccgcgaaataaactaggctgaatatcacagtgtgactgtgctgcaaaatgacaatatttatcgatagcgaacgactaaatattttcactacgagaactcgaacttacttaaaattttacaagccagttaatacttttgtgctttattgtttattgtttatttatttattgtgctgatttaaacagggttataatttcatagctagctaattttacatgttatgattttccaaatgactccaaatttgtaaggtgtgctaggtatagtaggtggtatattccagcggtcgccgcacggtcacactcgagctgcgattcggagggctagaaaatcatcgatgtttacgtacatcgatagttggcagggctttgctttgttttgcaaattccaagcggagttgaggctgtgacagattgcgggtgcgagttgtgaagcaacattgcgtcatcatcagctcctggacagaaaagagctcagggaacgaggcaggtccgcgcccggggacaaggaaagcctttagccacgaggacgcagagggatcaaaggcggaggaggaggcggtggccgtgtcacgggagctggatcaaatggccagcaccactggaagtgcccccagcctgggacccccccagagcgggagtggtggctctggcacattggagggcacgctaagcaagtggacgaatgtgatgaagggctggcagtaccgcttcttcgttctggacgagaatgctggactgctgtcctattacacggtgagtggctgcagtgcacctcctgactgaaacccatatcgcacccagaacgaactcctcatggcccgcagccttatcttatctgctatagatacatttggatacacatacacacttgttggtacccctttattgcgtgatttgttgacaggagattacttttttgagtctgactgaggggtctgactcttgcgccgctgcgaggcttgataggcactattatagaagtcgtaaaagccgtagaacatgccaagaatgacggtggtgaagtagagaagcactaagggcggcatgccgcacaataccagctggaaagcaacctgcgtgaggataagaacgaactgcgtcatctgaatcactgtgatgcacttcttcactggagttagggcctgcaccaaggtcttatccgccactgccgccacaaagtagtacgagtacatgataacgtgaacgatagaattcaagaacacgcagaagtaagcagcagaacctgtacaattgaacgcatttatgaaaatagtcggtcacccagcagccggctagcttaccattttcgttgaagttgatcagtgcgtagaccagcgttaccgtggagaagtgatgaaagatgtgcagcttggacacctggttttgtttcttgcgaagcacaaagatcacggtttcaatcagctcagagatcttcagccagaagagaaagtaggccaagttgtagtaccgcctcacgagctctgggctgctcccgatgtcgcggcacttccaaaagatgtatatggtgttgtccgtaatgtacaggacctgcgagagaaaagcaattagccgatgctgctgctgctgtacaatttataaatatccacctctttgatagcatatatgcaggaaaccacctggatgaaattatgtagcaagataagtcgcttgagctcgtaaggtttgcgccattccatgaaactataagcgaggtattaaaggtcttctttcttatataagtaagccagcgaacccgctgaattgctaatgtcaagtccactgacccacatgcaaacaagcgacgctgacattagcatgtgaacttactgcggacccgctttggtgacgaagtacagatagaggaccagcactgtgatcatgtaccagggatccttataaatcgtaggaacgttcaccaccggctgcaaatttatacctacaattttattgaaaccatcagacagttttttgacaaatccaagaggagctcacttgctgacgcctccatttcgcttctttgtgttgagcttccgctggcctgtatcctttaggtggcgtgggactggtggactgcagctctaccgccttgaccgctggcgaacatttaagcgtgaacagcacgccgaacactgtttttatattccccaagcattgattagaatacattaatttatagcaggcgtaatagccctttgacagtatgagctgcgatttaatgaactttcctaattccgactgcatttctgttacagtcgaaggataagatgataaagggcgtgaggcgcggttgtgttcgtttaaaggatgcgctaatcggaatcgacgaccaggaggacaacacattcacaatcactgtggaccataagaccttccactttcaggtaagtgtctccttagtaaatggaaataaagattgtctaaggaaagcttgatcaatgttttgcagtttcactaatagttcataattcaccgtaatagtttaagtacgacgttgtttgttttatgaactgaagaaccaactcattttaaattccacacttgcattgattttttatgacgtctagtggtatacgtaagcaaaaactatgtagatcaagagggcagcacgtttctttttgcaattcgcgttttcgtcccaaaagatataaagcaagcatgatggcctatccgctttgcttgccaagagttttcgtcctcttaccggaaaagggtatccgggcatcgacccagaaaccactgtctggtcctcacgttccaccttttgtttgactttgttgccttgatgtaacgataaaactttttccaatacccatacacaagcaaaggagcccactaaacttgccaactttccaaacgcttgcaggcgcgacacaacgaggagcgggagcagtgggtgcgccgcctggaggacaccattcgacgccacgcgaaccggtcgcgtctgtgggacagccaaagcgctttctacatcgccggtggctacacgaaggaagggggcgggagcggaacaggcggcagaagacccaaccacctggagttggtggcgcgccgtgtttccgaggcagatgcctacctccagctgatgattgagcaaacgaacgtgagtattgtgccacgtaatgcaggcattatgcaatttattgtcattttttcttgttctctgtcctgcccagttactggacaaacgcatcgcggagctgaccgatccggcggagcagtctaagtgcaaggcactccaggacaacgcaaatgtaagtaagcagaggttacacgtttccctcggactcagtaactacaacctccaggtggagttcgtcacgaaagttgtttgagagtttctccacttcggcgtacgtcagacgccagtaactttcgtcgactgccatgtaatagtccgcgtcccggttattattaacctttcgaacacctaaaacacagctggttcttagtgcaacatctcttccatagagactgagcgtaacgttcaactgcagtccgtcgctgggtgtaaccagccagaggacgaactcactgtttctgtggctatctggtgaacgcctattccgcagagccgtattgggcaatgtctgggaaattagcaccaccaacgggatgtgactatccaggtgcgagtgttggttcagcgggaagctgttatagggctcacattgccgctgggatatcaataactgttgtgcattgtaagccaggagtcccaacacctgattatcaggattcttacagctcgtcggcttaaaagaaagcacagcccgttcatgtttcactacgggaagaaagcgctgaaaggaagcttccttgttctcatgatcacataggtagtgcagcaaaagcaactggctgtctattcgcctttggcagccctcaaagagacatttttttacctcggactttatcaagagcttgttgggtatggtatcttcgtccttcaaagggacttgtccttcatctggaggagcagcctcaatggtaccgaacatcgactgagacattagctttccctgatgcagctgaaccttctgctggtcatccagctgttgcattccaatgcgaagtgtttccatattttcgttgagctccttgatatccgctttcaaattgaacatggtgttcaccttgttcttcagctccaagtgcgcttcctcacgcttctttttatactcttcgaattggtcgcacaacttgtcggcgctgtggatctttgggtccagaaactccattgcggattagctctaattgtagcctttaaaccttaaatgtaattcgatttccttgaaatgctgggaatttagagaattcggatacgggattgtgtgtttttgttttcccagtgaagtttttggttggaatcgtatatccaggcccactgggccacccactcatatcgatttccaatgcaagttcagggttaagaggcggccagatgcaaaagcctgagagaatgtcaatcgaccggcagctgtccacccatggcagctgctcacttcgtctgcaaactttggcaaagccaaaccacttttttcaccactcccgttggctaatacgtagttctcatttcaggccatgctggatcacattaagcactcgattgtcagcctgcagattgccaaaaacatggcccacccaataaatggaatctacaacggtccaccggccacggcctccactagttcctcaaccagtggagttgccatgggcagttgtaacaacgtccaggcaggtggccttaaggtgccgctagaaggtcaagtaataggcaagggtgagctggtggacgacgaggaagactcggccactgagaacggtgagtgctcttggccaagcaactggtcatcgagccagggtcaagcggttcgaaatcaatgcgaaagctcaatttgcattacccccgataatctggcattaatcttggcagccaccaccgctcctttgggtttaattgtgccagcgacctcatactcgagcagcgagggcgaggaggacttctacgatgcctacgacgatcccttcaccagcattggcagctccccgattggctggtaagtagaccacttgtgcaggtcttacaagtagcaactaagacatgcccttgaccaagtgcgccgactggccatcaatcagatgcgatgcggcagccggcaagcgtgctatgttatgtgtgatgtgtgctgcgtgctaatattacgcattcattgcccacagtccggaaccccccgcttcggctttgctactcctccttctcctttggaaaggcgcatgcgcctaagcagcgcatgcaaaatgcaatgcccgaagttcgtcgcagtcgtagtttcggggcagcctgtaatttctgccaagtcgcgtgtaaataataaatacaaaaccttctcctccgcctcaacgggctcccttcgaagctttgttggcacagctgacaacgctttgtcgtcggcgactcgcttcgtcatcgacatccttcggcctagtcgtagctaaagtcgcctttgtgtatgcctgtcagttctagtttcgttcgtcatcgcctcgcagtgtcaaagagctcctttgggtgcaagtggcccccctcggctctccgtttgatggtttttttattgtccagtacatagcgtagactattcggcggcttttgtctacgtttcgattcggtagcttccgttttatgtccgaaattatgcagacgctgggagtgcagtaacgcatacggcccgcatcagcgcctgaaaccaaccaccatgtttaagaagtgggtccgtcgtgttagcctgaggtgagaatgtgcagtatacaatgtacatacatgtgtgccaggtcgacgtaagtgcttccttcataaattgcaaatgaagccagcaactgagatggcaaaggaagcggatgctgttgtgccccgtgacttacacgcacattatgcttaaagatttatccaaggcatcgccggaatcctaatcaacaagtcctaaatttactctcatttttcattgaacagcgcaacgcgcggctttgcggaaaccacatcgcctacccatgaaaaggcgccggatggatttgccaacgccgagccagtggctgtgggcgattcagttgccccccaaacgctgccagagatcgatgaaagtgttgccgatgcggacaccagcattaagacagcgaggaccgcagtaagttcccgaagtgccagctacgataacggaatagactacgacgccctgtacgaggaggaggaagagacggacctcagtatggaggcgcacggatcgatgattacgcacttgctgtcccaggttaaaatcggcatggacctcacgaaagtggtactgcccacgtttattctggagcgccgctcgctcctggaaatgtacgccgattactttgctcatcccgatctgtttataaagtatggtcaagttcaaggcgttatatcagtaatataactcataagcatcttacccaatagaatatcggatctggatgatccacgcgacagaatcgtccaggtctgccgctggtatatgagtgcttaccatgctgggcgcaagagtgcggtggccaagaagccgtacaatccaattttgggagaagtatttcagtgccattgggacattcctggtaggcaatgcaaaactagctactgtagaccaccacttacgcgttttccttgatattaggcatatcccaagacgctcaggaggtacgcgacggtccagtgccttggtgcaggcgggatcaactcacctttttagctgagcaagtgtctcaccatccgccaagtaatacaaagaaaaaaacaagactttattacctctatcacttacgcatttatttgtttcagtttctgccttctatgcggagcattataataaaaaaataacatttgcggcccatgtatggaccaagtcgaagttcttgggactctccattggagttcataacattggtgagggtgttgtgaccctggtggatcgcagcgaggagtacatagtgaccttccccaacggctacggcaggtgagaacgtgtctgtggtatttccggttacaaacaactgaagactatttccattaccaaggtctattcttacggtgccttggattgagctcggcggttcggtggagatcaagtgtccacagtctggatactatgccaacgtggagttcctcaccaagccattctatggcggcaaacggaacagggtctcggcagaggtgactagctctgaatgtgtacatttgttttcttttattaattcggataatccataggtctatgcgccgagcgaaaagaagcctttcgtctctattacgggcgagtggagtggtttgatggaggccaagtggcatgataaaaacgtaagtcgtccaaaatatgtttggtttatgtttgtagtgtactattatatattgtttctgtaaatgttgatcctttacttgtactttttcctccgcatactgcgccaaaacgctgcaacaaacaaccccacgagttggcagccacatccacccttcacaccccaactagacctctacttactatccacgattcttctgcttttctcttaaatagctcgggagcatttcctctgtgtgtttactttgtttgtctagaaaatcgaacccacaaattaatcctatgcctgattgtccaacgttgtattcaaattgttgctatctgtacttatatatgattgctgtgtgtttaatattacacccaatcccaatcagttgaccacatagtgaatctgaatgaatctcttgaattttctagaaaaccgaagtattcgtcgacgtaaatcgcatacccatatttaagaaacaagttcgaccaatcgttgagcaggatgagtacgaatcgcgacgcgtttggaaggaagtgacagcgggactcaagtaaacagcataccaattaattcctgacccccaattgcgagtcatgataaatgtaatctctttgttcgttgctcttccacaggttcaatgacatcgagcgcgctacaactgccaaattcgttgtggagcaacagcagcgtgatcaagccaaggtgcgcaaggaatacgatctggcctgggagcacaaggtacgtcatcccgatatagggtaaaacagttaacagataatattcgttcacagcactttaagcccgtgggcgacaactggatctacgccaagccgctgagtcagcgcatgtatctgcaggagaaggaggccaagagataatgcctccgactgacaacgagagcaacaacaccaaaaacgtctatatatatggatcatatcaagaacgagcctcaactatatgtttaattccacaagtgcgcaaacctctcaacactgacgatacaacgtaacgaatgcaggaaaagttagagcaacaactgaactggcagaaggagatccatgatggaggctccagggtctggttattaattgtaaataatatacacagagaaaaagaaaggagtaaagctctgctcattaggttggaacgcgagtcaagctcgacagctcagcggagacagaaaaatcaaacactcacagtttctatacagaattaacgattattatttactactaagtactagtgtgtttcaaaggcaatcgcagtaaactgcaacacaatgacacctattcaataccttttacattactaacatttactaactagcaacaaagaaagaaatccaatacataatgggatatatcaaaagttgtagattacaaaatgatagttacttaaggataatagagattctatttttgaaataaaagactctgctatagacgaaatacaataccgacacgctagtatccgacagatactgcaccctcgcttctttccaagaccacaggacagacacacggacatagaacacacggtgcacaatgattttccagtcgcatagcttataaatcaaatacgattacctttagtattatgtttcgaattccacttgtcacaataataacaataaagctttaccaagagtccgctggtgacacacctttacaccttactgcaatagaacccaattgaaaaccgaactcctagacacgttgaataatagacattaaatttaatttataactttataacttacgagccaggaagcaacaccacccacacagcaaatctaccgactactctcacgcaaagttaacgcaaaatgaaacgaataaagtaaatacgcttcgaaattgatttaaagtaatatttaac

SEQ ID NO: 1415 - DNA, 2571 bp, DROSOPHILA
cgattcggagggctagaaaatcatcgatgtttacgtacatcgatagttggcagggctttgctttgttttgcaaattccaagcggagttgaggctgtgacagattgcgggtgcgagttgtgaagcaacattgcgtcatcatcagctcctggacagaaaagagctcagggaacgaggcaggtccgcgcccggggacaaggaaagcctttagccacgaggacgcagagggatcaaaggcggaggaggaggcggtggccgtgtcacgggagctggatcaaatggccagcaccactggaagtgcccccagcctgggacccccccagagcgggagtggtggctctggcacattggagggcacgctaagcaagtggacgaatgtgatgaagggctggcagtaccgcttcttcgttctggacgagaatgctggactgctgtcctattacacgtcgaaggataagatgataaagggcgtgaggcgcggttgtgttcgtttaaaggatgcgctaatcggaatcgacgaccaggaggacaacacattcacaatcactgtggaccataagaccttccactttcaggcgcgacacaacgaggagcgggagcagtgggtgcgccgcctggaggacaccattcgacgccacgcgaaccggtcgcgtctgtgggacagccaaagcgctttctacatcgccggtggctacacgaaggaaggggtctcatttcaggccatgctggatcacattaagcactcgattgtcagcctgcagattgccaaaaacatggcccacccaataaatggaatctacaacggtccaccggccacggcctccactagttcctcaaccagtggagttgccatgggcagttgtaacaacgtccaggcaggtggccttaaggtgccgctagaaggtcaagtaataggcaagggtgagctggtggacgacgaggaagactcggccactgagaacggtgagtgctcttggccaagcaactggtcatcgagccagggtcaagcggttcgaaatcaatgcgaaagctcaatttgcattacccccgataatctggcattaatcttggcagccaccaccgctcctttgggtttaattgtgccagcgacctcatactcgagcagcgagggcgaggaggacttctacgatgcctacgacgatcccttcaccagcattggcagctccccgattggctgcgcaacgcgcggctttgcggaaaccacatcgcctacccatgaaaaggcgccggatggatttgccaacgccgagccagtggctgtgggcgattcagttgccccccaaacgctgccagagatcgatgaaagtgttgccgatgcggacaccagcattaagacagcgaggaccgcagtaagttcccgaagtgccagctacgataacggaatagactacgacgccctgtacgaggaggaggaagagacggacctcagtatggaggcgcacggatcgatgattacgcacttgctgtcccaggttaaaatcggcatggacctcacgaaagtggtactgcccacgtttattctggagcgccgctcgctcctggaaatgtacgccgattactttgctcatcccgatctgtttataaaaatatcggatctggatgatccacgcgacagaatcgtccaggtctgccgctggtatatgagtgcttaccatgctgggcgcaagagtgcggtggccaagaagccgtacaatccaattttgggagaagtatttcagtgccattgggacattcctggcatatcccaagacgctcaggaggtacgcgacggtccagtgccttggtgcaggcgggatcaactcacctttttagctgagcaagtgtctcaccatccgccaatttctgccttctatgcggagcattataataaaaaaataacatttgcggcccatgtatggaccaagtcgaagttcttgggactctccattggagttcataacattggtgagggtgttgtgaccctggtggatcgcagcgaggagtacatagtgaccttccccaacggctacggcaggtctattcttacggtgccttggattgagctcggcggttcggtggagatcaagtgtccacagtctggatactatgccaacgtggagttcctcaccaagccattctatggcggcaaacggaacagggtctcggcagaggtctatgcgccgagcgaaaagaagcctttcgtctctattacgggcgagtggagtggtttgatggaggccaagtggcatgataaaaacaaaaccgaagtattcgtcgacgtaaatcgcatacccatatttaagaaacaagttcgaccaatcgttgagcaggatgagtacgaatcgcgacgcgtttggaaggaagtgacagcgggactcaagttcaatgacatcgagcgcgctacaactgccaaattcgttgtggagcaacagcagcgtgatcaagccaaggtgcgcaaggaatacgatctggcctgggagcacaagcactttaagcccgtgggcgacaactggatctacgccaagccgctgagtcagcgcatgtatctgcaggagaaggaggccaagagataa

SEQ ID NO: 1416 - protein, 764 aa, DROSOPHILA
MASTTGSAPSLGPPQSGSGGSGTLEGTLSKWTNVMKGWQYRFFVLDENAGLLSYYTSKDKMIKGVRRGCVRLKDALIGIDDQEDNTFTITVDHKTFHFQARHNEEREQWVRRLEDTIRRHANRSRLWDSQSAFYIAGGYTKEGVSFQAMLDHIKHSIVSLQIAKNMAHPINGIYNGPPATASTSSSTSGVAMGSCNNVQAGGLKVPLEGQVIGKGELVDDEEDSATENGECSWPSNWSSSQGQAVRNQCESSICITPDNLALILAATTAPLGLIVPATSYSSSEGEEDFYDAYDDPFTSIGSSPIGCATRGFAETTSPTHEKAPDGFANAEPVAVGDSVAPQTLPEIDESVADADTSIKTARTAVSSRSASYDNGIDYDALYEEEEETDLSMEAHGSMITHLLSQVKIGMDLTKVVLPTFILERRSLLEMYADYFAHPDLFIKISDLDDPRDRIVQVCRWYMSAYHAGRKSAVAKKPYNPILGEVFQCHWDIPGISQDAQEVRDGPVPWCRRDQLTFLAEQVSHHPPISAFYAEHYNKKITFAAHVWTKSKFLGLSIGVHNIGEGVVTLVDRSEEYIVTFPNGYGRSILTVPWIELGGSVEIKCPQSGYYANVEFLTKPFYGGKRNRVSAEVYAPSEKKPFVSITGEWSGLMEAKWHDKNKTEVFVDVNRIPIFKKQVRPIVEQDEYESRRVWKEVTAGLKFNDIERATTAKFVVEQQQRDQAKVRKEYDLAWEHKHFKPVGDNWIYAKPLSQRMYLQEKEAKR

SEQ ID NO: 1417 - DNA, 3814 bp, DROSOPHILA
ctgcgccgagagcagttccactctgttgggctgcgggtacaattgttgagcctccgccggctggcttttggtggccataacagtggactttgcctggtaatcaccactttttgaggaaacacttcccaaggcactcggagcacacagttacgatgtgtgcgtgttaacacggttagaacaattgttagcaattggtggtaaggcaggtaatcgggttccgaaacagtgttgtgcaacggacaccgagtgtggattcttagtttgcgatccccccagcagttcggaattctaaaccacaattgtttgtaaacggcgcaccgccagcagtgcacgcgggattgagttggaatcaaagcggtacggtgcggcagcgttggagtcgggagcgcgactgaatttccccagctgagcgatgttggtggagaaaaagctttcgccaagaacgaatcgccaccacaataacgctttgggtgccggcaacagataaggaataataaataagtcaagccgaagtaataatacccttgtatacaattcaacaagttttcatcaccaactaaacattttccagattgcatagaattttatattttagcatggtatttaacgaaatgtaactataaaagatttccagaactaaaaaaaaacactttaacacgatatttttaaaagtcccaaatatttcccaatagcaacagtttcataatatccaactcattgctagagtgtaaaaagcttcttgccgcttttgttgcaagaaatagccaaattaaactttttggtagcaaagaaatattggctaataaaaagaacacaataacatcaaaacagaaaatgtaataggagagtaaaaccttttatggactaacttgtttccttgttcagattgtaaaaattgggcagcgctccttcccgaataatttgaaaactgcgcgtgctgtatcgatagaaaagcaatcttttagttagtgatgcaaaatcttttgtgacaccgagcgccaaaaagggaaaatgaaatttgatgagattcttgttaaggctaaacaagtaaactgtctactttaatttatttcacagataccaaaaagatttgccggttaacagtatacatttttaaattcgtgaactaagcccttgcgtacgggaccatctctagtcgaaagtgccatctctacgccctcgaccagctgttcagctttttgttgacgttgtagttgaaaccgcagcgtctttaaccaccgtttaggtttagcattagttactaagaagattgatcgctatgtcggcggtggcctacgactcactgctgtcaacgacggcggtgatcagcaccgtcttccagttcctctccggcgcgtaagtcatccataaaccaatgcaactagcattgtccaaagtatcatcaactgtttaatttccttatacttgcagcatgatatgccgaaagtacatccagaagaaaagcacgggggactcttccggagttcccttcatatgcggattcttatcgtaagtagaaactgccgacttggcacaactgagataaattcgaattggtcgcgcttgacgggactactggttcttaaaataagaaattcatgcactagagtttagagacttaggattgaaccatagctaattattctaagttccaggtctctcaatgatattagatttacatgcatatattaggaaaaaagccattttcattccaaagttcacggatttggcatacaaaatcaattagatattatacagcatccatatttaaagacacacatcgtgtgaacttcgcctgcttggctggctaacacccctgtgttgttcggcttttaaccaacttaaataattgaaaatatttgtacaggtgcagcttttggttgcgctacggtgtcttaaccaacgagcagagcattgtgctggtcaacatcatcggatcgacgctctttctggtctacacgctgatctactatgtgtttaccgtcaacaaacgtgcctgtgtaaagcagtttgggtttgttctgactgttctggtggtggtcattgtctacaccaatcggctggaagatcagcgcgatcgaatgatacacgtcacaggtacgagcacgttttcgaatacacttcggcaatgtcaggtttgctaaattcctgaataaaatttcaggaattgtgtgctgcatcgtgaccgtgtgtttcttcgccgccccgctggctagcttgctgcatgtgatacgggcgaagaactccgagagccttcccctgcctctgatagccacgtccttcgtggtcagcctgcagtggcttatctacggtatactgatatcggactcatttatccaggtgaaccacttcccacgactcgccagccagacagcgaattacgacggcgtttgtttgttttgctttttcagattcccaactttctgggctgcatactgtcgctgctgcagttgggtctgttcgtcctctacccgccgcgaagctactccggccacggctacaagctggtcgaacaggcagtgccgttttaggcagctaatcggaccaagccacgcatttcgctttggcctccgagcgtgccgcacacagggtttatacatacatgctgcttgcttaggcgccaggcttatttactatagacatacgtaaaagtaagcctatatttattgtaaagtatttatttaatcccgaggatttgcctcgaatatgccgctacttacgttgccttgctgttcggtggcgcccatttaattgtaccctttagagcccgtattcctaataaacgaacacacgggaaacgattgagtaaccgaagtacttgttgatttcaactaatataagcacaaggcccgaattcgattcggcacggtctgtacagattgagtgcggatttctgactgggaattctaatgagtgaacccgatgcactttgctggtctgcggtcattggtatcgataagctgatatgctgatattccgggccataaactgttgaattaagcgaccgtatactgcctgttttgcacctctgatttaatgaaaatgttcgtgggcgcgggggtggggggtctgatcaatgaaatcggcttgtcttaattcaataatagtgcttatcgacctgcgtggaattagccagtaaacatgcaaccagatatggcggtaatctttatttggcgcccagcatcgataaggtggcatttttggggggcggaaatgattaggcgagatcataaatattttctcttacagattcaaatttgaagtggagagacggttatcactcgtgcgcttaccaatactggcttgatggttttatgggtatgtgcgccgtagtgagcaacggccacactgtcaaatccctgtgaatcattgttttgtgtttaaaactagaaaatatttgagccagaaacaaattacgagatgcaggaacaaagtcccgagctgtacgaggaggtgaagctcttccgtaacgcccgcgagcgcgagaagtacgacaacatggccgatctatacgcaatcatcaacaccatccagcagctggagaaggcctacatccgcgactgcattacgccgcaggaatacacggccgcctgctccaaatacctggtgcagtacaaggtggcctttaagcaggtgcagtgcgacgaattcccctcggtggagacgttcgttaagaaattccggctggactgccctgctgcgctggagcggatccgcgaggaccgacccatcaccatacgcgacgataagggcaacacctccaaatgcatcgccgagatcgtgtcgctgttcatcacaatcatggacaagctac

SEQ ID NO: 1418 - DNA, 1243 bp, DROSOPHILA
aaaaagggaaaatgaaatttgatgagattcttgttaaggctaaacaagtaaactgtctactttaatttatttcacagataccaaaaagatttgccggttaacagtatacatttttaaattcgtgaactaagcccttgcgtacgggaccatctctagtcgaaagtgccatctctacgccctcgaccagctgttcagctttttgttgacgttgtagttgaaaccgcagcgtctttaaccaccgtttaggtttagcattagttactaagaagattgatcgctatgtcggcggtggcctacgactcactgctgtcaacgacggcggtgatcagcaccgtcttccagttcctctccggcgccatgatatgccgaaagtacatccagaagaaaagcacgggggactcttccggagttcccttcatatgcggattcttatcgtgcagcttttggttgcgctacggtgtcttaaccaacgagcagagcattgtgctggtcaacatcatcggatcgacgctctttctggtctacacgctgatctactatgtgtttaccgtcaacaaacgtgcctgtgtaaagcagtttgggtttgttctgactgttctggtggtggtcattgtctacaccaatcggctggaagatcagcgcgatcgaatgatacacgtcacaggaattgtgtgctgcatcgtgaccgtgtgtttcttcgccgccccgctggctagcttgctgcatgtgatacgggcgaagaactccgagagccttcccctgcctctgatagccacgtccttcgtggtcagcctgcagtggcttatctacggtatactgatatcggactcatttatccagattcccaactttctgggctgcatactgtcgctgctgcagttgggtctgttcgtcctctacccgccgcgaagctactccggccacggctacaagctggtcgaacaggcagtgccgttttaggcagctaatcggaccaagccacgcatttcgctttggcctccgagcgtgccgcacacagggtttatacatacatgctgcttgcttaggcgccaggcttatttactatagacatacgtaaaagtaagcctatatttattgtaaagtatttatttaatcccgaggatttgcctcgaatatgccgctacttacgttgccttgctgttcggtggcgcccatttaattgtaccctttagagcccgtattcctaataaacgaacacacgggaaacgattgagtaaccgaa

SEQ ID NO: 1419 - protein, 226 aa, DROSOPHILA
MSAVAYDSLLSTTAVISTVFQFLSGAMICRKYIQKKSTGDSSGVPFICGFLSCSFWLRYGVLTNEQSIVLVNIIGSTLFLVYTLIYYVFTVNKRACVKQFGFVLTVLVVVIVYTNRLEDQRDRMIHVTGIVCCIVTVCFFAAPLASLLHVIRAKNSESLPLPLIATSFVVSLQWLIYGILISDSFIQIPNFLGCILSLLQLGLFVLYPPRSYSGHGYKLVEQAVPF

SEQ ID NO: 1420 - DNA, 3799 bp, DROSOPHILA
gagcgcgaggcgctacgcttcatgttgtgaattttgattgtgatacgatcggctccggctccgtctcgatgactactcatgggcggctattccggggcgctttaactcggtgtgtgctgcctgagaactttctggcaatttagttccggggattctgcgaagaattcgagatttgctttgtgaaagtacgggcgaaatgcaagaagacaagcggcggtcaggtaaaaagaaaatggcggcgccccgcaaacaaagaaaatcgcgttaggcggaaaaattctaaaatcagagcaattcagatcgtttttagagttcttaccacttccggcttttttggatgtttatttttaagtgctagtttactattaagtcgcggatattccacaaattcttcaatttcctccggctttgcaaattctgtatgcgtcgaaagttaactgcggtattcgataacgatacgtgtttgctatcgccattgatggtcccgttcatggtatcgagccatatttgtccattttatagccaaacgtttgattcatttttatataatgacatagttataatcatatataatttcaatgtagtttttaataggtttctatttctgtaatatatttcggcgaacttagatataacaataaaagtttttaagttttaagatcataaatctttaaaacacgcgagattaagacaacgcgatatacgttttgtaaaggatttttttatgaggtggagaactttaagttggcattactgttcaaaatcgcgaccgacttaacatttgccgtgttattgccgatatatgaccacaaatgttggaaaaagtcatcgaatataatacgtccagatgggacttcattcgagccagccgtggcgtcatagtccagaaatcatatataaaatgtactgtcgcaagactatctttctgataaataaaattcattttgatcgaataatccatcgttgtttaactgcaattgataaatgttagttgaagctgctttaatcgatatagtcgcgcagaactgtctcgatagacaactgaggcgggcaccgcatttaaaatcgtcaaggctgcaggtaaaaggaatcacaggtagaaaactcttagatacagtttaattctcggtacgccaccagatgcaggaaaatccaaatggcttattaagaaaaacgactagggtttacacaggctgcacatacgagaattccgggtataaagagtggcgcctgcgctgggtcgtgacattattctaacgaaagcactggcgaaatggttcatttagtgactgaaaagaagacgcaggaggtggcaaccaaagtccccaggctccttcaactcggcggccacgtggggttcgacaccctaccggaccagctggtcaacaagagcgtccagaatggctttagcttcaatatcctatgcatcggcgagaccgctctcgggaaatccactctcatggacacactgttcaataccagttttggatctacaccgagcccgcacaacctgcccaatgtgaagctgaaggcaaatacatacgagctgcaggagagcaacgtccgcctgaagctgaccgtctgtgacacgatcggatacggagatcaggttaataaagcggacagctacaaggctttggtggagtacgtggacagccagtttgaagcgtatttgcaggaagagctcaagatccagcgagcgatggccagtgctcatgatggacgcgttcacgcctgcctgtacttcatctgtcccacgggccatggtctgaaagctatggatttggtgtgcatgaagcagcttgacactagggtgaacatcattcccgtgatcgcgaaggccgacaccatctccaagtcggagctgtcggggtttaaggaacgcataatggacgaactacggcggaacaatgtgagcatataccagtttcccatggacgacgaaaccgtgtccgaaacaaatgctgcgatgaacggccatctaccctttgccgttgttggcagtacggagtttgtaaaggtggccggaaagcaggttcgtgcccgccaatatccatggggagcggtgcacatagaaaacgaggcgcactgcgactttgtgaagctgcgcgagatgctcattcgcactaacatggaggatctgcgcgaacagactcacacacgccactatgagctcttccgccagcggcgcctacaacaaatgggctttgtggacgtggacagcaacaaccagccggtctccttccaacagaccttcgagtcgaagcgatccgaccatctggcttgcctacaggccaaggaggaggaagtgcgccaaatgttcgttcagcgggtcaagcagaaggagaacgagctgaaggacaacgagaaggaattgcatactaagttcgaccggctaaaacgggagcatttggaggaaaaggcccaactggaagaggcccgtcggcagctggaagaggattgccaggagctacagcgtcgtaggctccagatggccaatggttcgcacactctcaccttgggcaggggcaagaaaaagtagttaagtttagaatgttttcgattttactaaaactgcctatgcgattaaatttctacaaaccttacctatgactccactcctataccaagaagtatactaattttgatattttatttctttttattttaacgatctatgatttccaattaaacagtttataaataaattatattgaaagaattttaatttaggttacgagttccagtaattttagttgtataattaaatacaataaaaatataaaaaacaatattgaatgcgaatatgtctagcatatgaaaaagagtatacatttttcagtaatttaaaaataccaaaatatagaacgtttacatatgtatgtatgtatgtacataatgaaggttatgtttggacagcgttctctataatccagccctaaatatcgtaattaccagactaaatatgaattaaatgggatacttttcgcggaactgttttatgacggtcataacgcatatgtctcttcgaaatttgatcgcttggaaaccctggattagtcgaaacagctgtaaacgaacttcaggtttttcagccctttccgctggccgcttcttctgtggatgtggacccggctgatagcgatagcaatagctagctctccgctgttctcgccgcctctcgctcgttctctggcacgccaagtggaaaaatgggaaacaaaattataaatatgccagcagcgcggatcggaacgcaatggttagtcattctgtgtgtagcgatggcagcgagcggtactaacttggacagtggaatatgcccggtggctggggactccggctgccgcggaaatcctccagaccaggcgcgctacgacaactaccgcatttacaacgtggagttcgagaaccaagagcagatagaacttttccagaagctggaggagcagagcgacagcctcacattcatcggccatgctcgcgaggttggccagaagttatccattctggtagcggcgcatcgcgtggcagatatcgctgatctgctgaagacctacaaggtcaagcatagagtgttggtgagtttctagaaatggtaaccaatgaattaaaaactaaacgattctttccttgtcagacctacaactttcaggagaagatcgaccgcaatctggccgaagttcaaccggaaagcattgatgcctctcagctcgactggcagcacttcttccacctgaagaccatctacgagtggctggacaaaatggtcgagaagtacccaaatcgagtgaccgta

SEQ ID NO: 1421 - DNA, 1739 bp, DROSOPHILA
ctttaatcgatatagtcgcgcagaactgtctcgatagacaactgaggcgggcaccgcatttaaaatcgtcaaggctgcagatgcaggaaaatccaaatggcttattaagaaaaacgactagggtttacacaggctgcacatacgagaattccgggtataaagagtggcgcctgcgctgggtcgtgacattattctaacgaaagcactggcgaaatggttcatttagtgactgaaaagaagacgcaggaggtggcaaccaaagtccccaggctccttcaactcggcggccacgtggggttcgacaccctaccggaccagctggtcaacaagagcgtccagaatggctttagcttcaatatcctatgcatcggcgagaccgctctcgggaaatccactctcatggacacactgttcaataccagttttggatctacaccgagcccgcacaacctgcccaatgtgaagctgaaggcaaatacatacgagctgcaggagagcaacgtccgcctgaagctgaccgtctgtgacacgatcggatacggagatcaggttaataaagcggacagctacaaggctttggtggagtacgtggacagccagtttgaagcgtatttgcaggaagagctcaagatccagcgagcgatggccagtgctcatgatggacgcgttcacgcctgcctgtacttcatctgtcccacgggccatggtctgaaagctatggatttggtgtgcatgaagcagcttgacactagggtgaacatcattcccgtgatcgcgaaggccgacaccatctccaagtcggagctgtcggggtttaaggaacgcataatggacgaactacggcggaacaatgtgagcatataccagtttcccatggacgacgaaaccgtgtccgaaacaaatgctgcgatgaacggccatctaccctttgccgttgttggcagtacggagtttgtaaaggtggccggaaagcaggttcgtgcccgccaatatccatggggagcggtgcacatagaaaacgaggcgcactgcgactttgtgaagctgcgcgagatgctcattcgcactaacatggaggatctgcgcgaacagactcacacacgccactatgagctcttccgccagcggcgcctacaacaaatgggctttgtggacgtggacagcaacaaccagccggtctccttccaacagaccttcgagtcgaagcgatccgaccatctggcttgcctacaggccaaggaggaggaagtgcgccaaatgttcgttcagcgggtcaagcagaaggagaacgagctgaaggacaacgagaaggaattgcatactaagttcgaccggctaaaacgggagcatttggaggaaaaggcccaactggaagaggcccgtcggcagctggaagaggattgccaggagctacagcgtcgtaggctccagatggccaatggttcgcacactctcaccttgggcaggggcaagaaaaagtagttaagtttagaatgttttcgattttactaaaactgcctatgcgattaaatttctacaaaccttacctatgactccactcctataccaagaagtatactaattttgatattttatttctttttattttaacgatctatgatttccaattaaacagtttataaataaattatattgaaagaattttaatttaggttacgagttccagtaattttagttgtataattaaatacaataaaaatataaaaaacaatattgaa

SEQ ID NO: 1422 - protein, 422 aa, DROSOPHILA
MVHLVTEKKTQEVATKVPRLLQLGGHVGFDTLPDQLVNKSVQNGFSFNILCIGETALGKSTLMDTLFNTSFGSTPSPHNLPNVKLKANTYELQESNVRLKLTVCDTIGYGDQVNKADSYKALVEYVDSQFEAYLQEELKIQRAMASAHDGRVHACLYFICPTGHGLKAMDLVCMKQLDTRVNIIPVIAKADTISKSELSGFKERIMDELRRNNVSIYQFPMDDETVSETNAAMNGHLPFAVVGSTEFVKVAGKQVRARQYPWGAVHIENEAHCDFVKLREMLIRTNMEDLREQTHTRHYELFRQRRLQQMGFVDVDSNNQPVSFQQTFESKRSDHLACLQAKEEEVRQMFVQRVKQKENELKDNEKELHTKFDRLKREHLEEKAQLEEARRQLEEDCQELQRRRLQMANGSHTLTLGRGKKK

SEQ ID NO: 1423 - DNA, 12028 bp, DROSOPHILA
ccatatcagggttgtttcgtttccatttttcatccgtgggcattgtggaaacaaagaagtatatcctattataatatattatgaaaataaaggatttaattgcaaggacatgtaaaaggaatcttagcgattagacatcattaagaaggttactttattttcagtaggctattttcattcgattattcatcagtcataatcaaaattttaagtttcaaattatcttatggccgccttttataaattacagctcttctaaattatctttatggtacgaaaagtcaagtaagtctataaaatttggtggagttttcaggctttcgagacctgtgccattttggggctcggtgcacagctgttgctctctccgcccgccttcccctctctcctcctccaaggaaccaatgtcaaaagaaagttctccggtgcgaccggcaaaaacagctttgcgctaggccaaagttcgttgatgttccagtctctttactgggtgacattggggtatatcagatccgtgctaagtgggtaacagctagatgaaagccttagtgatttccatacgaatttcatagtgtcattttaaacttagcctttcaatgtgttggattagaagtgaggcaaataaagatgcaattctgagattataatatataattaatatataaatatactttgtataactcaactatcctatggagatattaattgggtatagttagattttacgatttattacatgaaatgcccacaattcgttagccagatttgatatgttagctttggtagctaagaggtatcatagattcgatccgcccatttctatcgagaacaaatcattgccggcagggagcacgcgcagacatcgaaactgcgagaggagcctcacagattgggagagaacgttaatgttcccattgaaaccaccacgaccactctcccacggaactagtcgaaagtttcgagtttgtgcgctcgaccagtccgacggacagctttgaagtgaacggttcgcgagttcctgggcagaagagagaatcagagtgcagcagagcaaccgtttgcgaattcgcgctgttctacctacatagaccaaaaccaaaccaattccaagcaaaccaaaccaaacgcaaccccgagaccaaacgcaaaaaaaagaggccggcaagttgacaaaacctcgcgcacataggatacataggaaccgtgaatttgtatgtgctgagcgcggtacataagctaaagaaaccacgttgactcacgacccgtttgaaattgttttgtagtgctggagcagcgattacccactttgcgccaggacaacgacaataggcgcagagcgctccttcggaactttcgccatcaataagtaagtcgccggtcggtcggcggactgcgtctatcgatcaagtgcatagccatttaattgcataatttgtgctcaatttcttcttccactcggttcggctggtttctttccccagccctttctcgccgtccaaccattgtaatttgccatcgtcactctctggcagacatgtgttaattacattttattctattctattccataccatgccataccatgccataccgcaccataccatgtcgtagcgtagcatacccccatgcccccaaacacacacccgtgcgatagacaccatcccagagagggaaatgtggctgttttattttcggactcatcctacttgctgcccaatatttatgaccttcttatggtttcgccattggggaaacgtgtttgtcgcacatagatccataatctatacgtagtgtgcgcgattactcggaaattatctacatatcgtgtgcagtgtgatcagggattgcgaacgggggtgatccgaaatttaaccagtttatgggcacagtttgatttgtttgattgctattgattcgccgggaccgacaggccgtcacatatacttgtatggagagctggacccggactagtcaatgtcaaagcttcgtctctatcagcttttcgtttggcgtgataaggtctagagtctagacaggctgctcaagtaaatataaggttttcgaacgaatgtaagatctctgtaacttttgctggcaaagagagagttttgttaaaaaatagaagatcctgggcgacacgagttaatggccatagacttaattttctagcgaaaatataatataaaaaatagaagatcctgggcgttccatctccttatcaatcattgctatttatagtttttctttttagttcagaatgcggattatataacttcacatctggaactgaaatactgaatgcagtttaagaaaacaactagtaatcggaagtagaaaagtccatctattcttattctcacattttggcgacaaaatcaatgtacgacctacattcaaaagcgactttgaccttagcagcttgtcgttcaagatcatacgtttgtggagcaagaaaaataaataaaaataaaatcatagcacgcacattttcctgtgcaaaagttggtgaacaaaagcaaagcgttcaagtgactggggcattccagtactattagtgtgtagttagttggctatcatgttattattacataatcgcccattccgatgggcaaacacaatcgggcttcgggtgggttttggctgagttttggttgggttttcgtatgccgtgtcaacaacgttttcgtgtaattgcatgagattggccctgacagcgcccacttttctttcagaaaatatgaggcaacacacccagtcaacaagcaacaggataattgatagcctgcaaatattgccagaaatacagcacaaaaaaaggtgctgaagctatcccagaaatacctgaaataaaccctgatttgcatgcgaaaatacgtgttattttcacatcatgctaaccaattgtagacatgcattcttcactttattccgatgctaatgcgctttaatttttaaatacagcaggggagccagtgatccggtcttcaaatagtttaaattctaattgaaacgtaaatagatatagattctttatcgcagatcgatatttaaattatttattgaaaatccttttcattcttacgaaagcgataggagaaaagcttccgattataatttccgcttgcggctaagattagatttgccacgtttcacagataccagtttcaaaacttttattaacctaaaaataaagattatttctaaacaacagagtgctttctatcaactcacaacgacttcttactccccgtgtaacttttagagcaatgatgttataaagcttaaggaaacttatattctgatgttatcaggattgagtttcaaaacttcgagcagagtattttagggatgtggctatcttttatcattaatagcattcttaaggtctgcgtgtcgagtgcttcttccgctccataaggtgacattgggcttatctttccaataatactaccaatggggtttgagcaactttgttggatctagtaatttataacacaatcgtgaggtaatgcggtgcaaattaacagagttagcaaacaaaattgatgctaagagaggaatatttaattagagtggaccaaactaaagatttccatcacgtagcgactatttatagatcccaaacaggggggccatatagatgtgcactcccactgggaatgataatatttaccagagtccgacctctgatgtgttaataaagcgggcttatcgactggtcattatctgcacctgtgtcacacatcaaatacatatgtcaacatgggttctagattatctatgggctcctcggaccactgcgaccccctttcattggggcatgcacttcacgtgcggttgcgaggacccccacttaattgcaactactcatggtaaacactcccttttgctggccaaaaatagaggcgataggagaatggttatcaaaccgattatcgcggggtcaagattccaaaagatctcctttggatttcgttcacctgaccagttctcctctcttctgctttagtttccatcgcactttaagtaggtttctgtctggcatagaaagtggactttgccaactcgtttttgtgcaagcaaagacgagcccccacagaggtctacagactagaaagtactcactagttgagtccgatttgagtccggaatctgaattgcaaagccggtctctgacgcacccgtgcaccactaagcgtgtccgtatgtctctatatgtctgtctgtctgtttcatcgctgacgggggctacaaaacccatttgaatcgctgataatgagcaaaacaccctaaaagctaacagacataaaataaataaaatatgttatggcatgtgcggcataagcgaactgacaaccaacggacagtggatactcttcccttaaatttgttgctcaaaatatgtaatctttagtatgtactcattttttccgtcttaatatgactaagtatgtatgtactaatcaatataagctaacagctttaaacaataagaataagcttagaaaacttttacatatatctataaactacaagtgcacatatatactaatgaattgagatgtgtatatggataatgatctatctatgtctcttttattacctatccactgtttatccaaacggttagatccactgaaaatatccgatgaacttcaagtgcgaaaacgtgctgcagcagtagcaaatatttgttaatctattactaagctaatatacgtaatggttgtaaaataggcagtattaatacttcaattaggggaatttttcggagtttacaagcaaaacgcataagaaaacacaagctgaaaagctggcatttaattgtacaagtttgccgtgcatttttaaaacctgctttgaattttgatcacgtgagtcaactcatgttaatgagcagaccgattgttctgtttagtggaataacaccgaagtaccaagcggtggactttggtcagaagattataattgtacttaggccaacagatgcggtcggaattttagaaacccagattcccaagagggaaccactctttactttcaaacaaagtccagaataaaaaaatgtactctacctttttttatatggtattagcagtcgttgtaacccgtcgtgttcttaaatttccaattgcaataacttcaaaacgagaccttctagatccgcttgtttgtttgtttgttttttcgaaagtaatgtcgataaccttaaggcatttgtggcaatcgagctttcgaaattaacagataattaacgcgtttaatgcaatctctcaatcgtaaagcagagcgttcattatttcaaatattgccattgatgatttaaggtggttaagcggtggttggttgcgactgttatcaaatatttctatttcaaaatcaggttttagtgttacagttactggaattataacgtaatatgtttataaaccaaagcaccacatttccgaaaattaagcggtataaaagctaaaataatagctctgattataataaatctgttatgtatttttgcaatctttcagatacatttaagtcctaggcgggatcagcatgttcattccggccgcccagtccgcgtacaggacgctgcgcaagacccagccacgcgtccggctcaacgccatcttcaaaaatggctactccagcaaggtgagttacttagattagatcaatttaaacacgaaagaaaatgcacccaaactccacccacaggtggagtacaagcccatccggtcagtgctggtggctaaccgcggtgagatcgccatccgagtgttccgtgcctgcacagagttgggcatcaaatcggtggcggtctactcggagcaggataagatgcacatgcaccgacaaaaggccgacgagtcgtacatagtgggcaagggtctgcccccggtggaggcctacctcaacattccagagctaattagggtgtgcaaggagaacgatgtggatgccgtgcatcccggctacgggttcctttcagagcgcagtgacttcgcccaagcggtgattgatgctggactgcgcttcattggcccctcacccgaagtcgtccagaagatgggtgataaggtggcggctcgtgtggcggccattgaagcgggtgtgcccattgtgcccggcaccgacggtccagtgaccaccaaggaggaggcactggagttctgcaagaagcacggactgcccgttatcttcaaggccgcttacggaggcggaggtcgcggcatgcgcgtcgtccgcaaaatggaggatgtggaggagagcttccagcgagccagttccgaggccaaggccgcctttggcaatggtgcgatgttcattgagaagttcatcgagcgaccgcgtcacattgaggttcaactgctgggagacaaggccgggaatgtagtgcatctgtacgaacgtgactgctccgtgcagcgtcgccaccagaaggtggtggagatcgccccagcgccacgcctgcccatcgaaatccgggacaagatgacggaggcagcagtgcgcttggcccgccatgtgggctatgaaaacgccggaaccgtggagttcctttgcgacgagtccggcaacttctacttcatcgaagtgaacgcccgtctacaagtggagcacacggtcaccgaggagataacaggcatcgatttggtgcagtcgcaaatccgcgtggccgagggcatgaccctacccgaattgggctacacgcaggacaagatcgtgccgcgtggctatgccattcagtgccgtgtgaccaccgaagatccggccaacgattttcagcccaacaccggtcgcttggaggtcttccgatctggcgagggtatgggcattaggttggacagtgcgtccgcctacgccggagccatcatttcgccatactacgactccctgctggtcaaggtgatctcgcacgccagcgatctgcagagctccgcctccaagatgaaccgtgccctaagggaattccgcattcgcggcgtcaagaccaatatccccttcctcctaaacgtgctggagaaccagaagttcctccacggcgttctcgacacctacttcatcgacgagcacccgcaactgttcaagttcaagccctcgctcaatcgcgcccagaagctgctcaactatatgggtgaggtgctggtcaacggaccccagactcctctcgccaccactctgaagcctgccctcgtctcgccccacgttcccgaggttccgctgggtgagttctgcgcaccttatccactagaggatccccactttaatggcatgtgcttttcgggttcacgcttgcttatgtggctaccacttaagccaatcgcctctttccgaatgtttcagcggggtcctctctcgaagcattaaacatcccgactaagaaactatcttcaattgccaagttttaatttcgaggatttgctcaaatatcaaatgagattgtaacttatttaaacttaactatcattttctattcgtttttgctcaatggtaacaattttcgaaatatcattgcatgtattcaagttgtaatgtcaatccaggatttaaaagatttatgagtaatttaataatctctcatctaactcagtacattgcttcgtgttaggaccccagagatactaaatctattaaatggatatactactatcaaacttaatagatcctcaatgcacttcttttcaaaagtaatcaatgaaaaggcatgtttgttccacgcatctcctgtgaaatgttctttgcttttctgatatgctttaatcaaacctttatgtttttactctttcaactatcaatttttgttgcatctgttattaatcaaccaataccgaatcgaaaccgcgatcgcaatcgaatcggcatttgcaaaacaccaataccaatatcacacaccaatgtctgtaccgacaccaatcaacaacgattacaaatcgcacaacacaccaaacccacgaccacgaccacgaccacgcccactccgcctctaccacatgatcatacatagatctgtccccggaagctatagaacgcgaagaacgtggcgaggcaaaaggtacgttcacttctttatcccgaaatcacgcaggacatttgtacatacgagcatctatcatgtcggtttatgttgaagggtatctatcctaaggtactcctaacactttggaccaatcgttttgggattatcggaatatagagctaatatacatacaataaacatatgtgatgttgtggtgtttcaatttgattgcatatataatcattttgggtttaagctaatgttatttactatactgaaacaattgtatttttgcaattttttaattacgcagcttttggttttaccagcttttttgatgtttagcttttatgtattaaattggtattattgttgttgtattgaccttaaccgttgatgtcccaaatttaatgatataatcccgtaaaaatattgatatatttaaaccttataattgggaatatatcgactatacccaatcaaaaaactaacacgattttatggtatatacagttacggaaccaccgaagggactccgcgaggtcctggtgtgcgaaggtccggaggccttcgccaaggaggtgcgcaaccgtaaggaactgctactcatggacaccaccttccgcgatgcccaccagtcgctgctggccacccgcgtgcgttcccacgatctgctgaagatctccccctacgtgacgcacaagttcaacaacctgtattcgctggagaactggggcggagccaccttcgacgtggcgctgcgcttcctgcacgagtgcccgtgggagcgcctggaggagatgcgcaagcgcatcccgaacattcccttccagatgctgttgcgcggagccaacgccgtcggctacaccagctatccggacaacgtggtctacaagttctgtgagctggctgtgcagaccggcatggacatcttcagggtgttcgactcgctcaactacctgcccaacctgatcctcggcatggaagccgctggaaaggcgggcggcgtggtggaggctgccatctcctataccggagacgtcagcgatcccaagcgcaccaagtatgatctgaaatactacactaaccttgccgatgagctggtcaaggcgggcacccacgtgctctgcataaaggatatggctggtctgctcaagcccgaatccgccaggtgagtctgaaggggtttttaatttttttctgttgtgtactattttgtttccatcccctgaaaggcttctgatcacagccattcgtgacaagcaccccgacatcccaatccatatccacacccacgacacctctggagcgggagtggcctccatgctggcatgcgccaatgccggagccgatgtggtggacgtggccgtcgactccatgagcggcatgacttcccagccgagcatgggtgccgtagtggcctccctgcaaggcactccgctggacacgaacttggatctgcgcacggtgtcggagtactccgcctactgggagcagacccgcaccctgtacgctcccttcgagtgcaccacaacaatgcggtcgggcaacgccgatgtctacctcaacgagattcccggcggccagtacaccaacctgcagttccaggccttctcgctgggtctgggcgacttcttcgaggacgttaagaaggcctaccgtgaggccaacctgttgttgggtgacattatcaaggtgacgccctcgtcgaaggtggtaggtgatcttgcccagttcatggtgcagaatgacctgaccgccgatcaagtgctggagcgggccgaggagctgtcgttccccaagtcggtggtggagtacttgcagggctctattggcattccgcacggcggattccccgagccgctgcgttcgcgagtgctcaaggacatgccccgcatcgagggacgtccgggagccgaactgaaggacttggactttgacaagctgaagaaggaactgcaggagtctcacacctgcgtcaccaaccgtgatgtcatgtcagctgccctctacccgcaggtgacgaatgatttcctaaacttccgcgaaaagtacggacccgtcgacaagctggacactcgcatcttcctcacgggtcccaaggtgggcgaggagttcgacgtacctctggagcgcggtaagacgctgagcgtgaaagctctggctgtgtccgccgatctcaagcccaacggtatccgcgaggtattctttgagttgaatggccagctgcgcgcggtccacatcctggacaaggaagccgttaaggtaggttcagtcagcagtcatcggtgatctttaggcaatggaatcatttgcttgctcttcttccgcaggagatccatgtccatcccaaagcgaacaagtcgaacaagagcgaggtgggcgcccccatgcccggaactgtcatcgatatccgcgtgaaggttggcgacaaagtggagaagggtcagcctctggtcgtgctctcggccatgaagatggagatggtggtgcagtcgccattggcgggcgttgtcaagaagctggaaattgccaacggaacgaagctggagggcgaggacctcattatgattatcgaatagacagtgccaccggatcaaaatgtccattgtctaagctgccaccgcacacacccaatgtaaaattaagtgaaaacagtgataatcttagggactctgtcagttcgattgatcataaaactgtccaaagtcgcctgtgtctatttttatatgaatcaaaatcattcatgtttccgtgtttccaggatcaatcgaccatgagtaactggtcaaattttttagctgtccctgccaaaatatatcggattgcataagttcgtgcccaagtatatttgtaaatttgtcgtagggcttttcccgcaagtcatttgaatcaaatttgtacgattatggaatttttaattcgcaaacacctgtgtcgagattccccctctagtaaatacgtaagtggttattaatgttatattaactattgtgtaataaacgttatacaaaataaaaagtaacgccctggtttttgtagtgtgaaattggtgattaaacatctcgaaacaaatatgtaatgtatggttatctactttatttttttcctaaaattaattaaactgaattaagttaacaatcatgaatgaaacggctccgaagctaaagcctacatgcacttgacaatgaactctaggaaagccagatccttgttcagctcggtgacccgcttaaagtgtctctggacgtacggagtgagtacctcgaccatgttgccattgtagtagaacctcgccttgggatccagaagagcatctccgatcaagtacttgaggatcatgttgcccgcctgcgaatggcgcgagttggtggtccatgccttgacgtgctgcagcagcgcaacccgctggtcaacgttcaactggtcaaccaattgccggagaccgggctcatctcgcttgcggacaaagtggttgataatatcgaaactggctttgggcttgtccaggttcagagccaacacgaaggccttgtgaagctgcttctgggcgtgcagaagggaatgtagggtctgctcctgctccaatgcggcctgccgcttgtccagcgcttcgtttcgcgtcacctgagtgacatcaccgaagcgaatcagcttggagtccgcgccgccggtgtaaaagaaccgattgctcctggcggatacggccagcgcccaaaccctatcgttgtgctcgtccagggactgcagacatgtgttggtcttgatattccacagcttaagaaggccatccgaagcagcggagataatgaacttgccgtgatccaggaactcggctctcagtatggtgcactcctgatcgaaacgttttatgcacgaaaaattgctgatggaccagatgcggagagtacagtccgacgatgaggtgagcacgatctgatccaccggagagaagcgcacactccacacaccgcgggtgtgtccccgcaacactccttgcagcgtgttgga

SEQ ID NO: 1424 - DNA, 4369 bp, DROSOPHILA
tgaacggttcgcgagttcctgggcagaagagagaatcagagtgcagcagagcaaccgtttgcgaattcgcgctgttctacctacatagaccaaaaccaaaccaattccaagcaaaccaaaccaaacgcaaccccgagaccaaacgcaaaaaaaagaggccggcaagttgacaaaacctcgcgcacataggatacataggaaccgtgaatttgtatgtgctgagcgcggtacataagctaaagaaaccacgttgactcacgacccgtttgaaattgttttgtagtgctggagcagcgattacccactttgcgccaggacaacgacaataggcgcagagcgctccttcggaactttcgccatcaataaatacatttaagtcctaggcgggatcagcatgttcattccggccgcccagtccgcgtacaggacgctgcgcaagacccagccacgcgtccggctcaacgccatcttcaaaaatggctactccagcaaggtggagtacaagcccatccggtcagtgctggtggctaaccgcggtgagatcgccatccgagtgttccgtgcctgcacagagttgggcatcaaatcggtggcggtctactcggagcaggataagatgcacatgcaccgacaaaaggccgacgagtcgtacatagtgggcaagggtctgcccccggtggaggcctacctcaacattccagagctaattagggtgtgcaaggagaacgatgtggatgccgtgcatcccggctacgggttcctttcagagcgcagtgacttcgcccaagcggtgattgatgctggactgcgcttcattggcccctcacccgaagtcgtccagaagatgggtgataaggtggcggctcgtgtggcggccattgaagcgggtgtgcccattgtgcccggcaccgacggtccagtgaccaccaaggaggaggcactggagttctgcaagaagcacggactgcccgttatcttcaaggccgcttacggaggcggaggtcgcggcatgcgcgtcgtccgcaaaatggaggatgtggaggagagcttccagcgagccagttccgaggccaaggccgcctttggcaatggtgcgatgttcattgagaagttcatcgagcgaccgcgtcacattgaggttcaactgctgggagacaaggccgggaatgtagtgcatctgtacgaacgtgactgctccgtgcagcgtcgccaccagaaggtggtggagatcgccccagcgccacgcctgcccatcgaaatccgggacaagatgacggaggcagcagtgcgcttggcccgccatgtgggctatgaaaacgccggaaccgtggagttcctttgcgacgagtccggcaacttctacttcatcgaagtgaacgcccgtctacaagtggagcacacggtcaccgaggagataacaggcatcgatttggtgcagtcgcaaatccgcgtggccgagggcatgaccctacccgaattgggctacacgcaggacaagatcgtgccgcgtggctatgccattcagtgccgtgtgaccaccgaagatccggccaacgattttcagcccaacaccggtcgcttggaggtcttccgatctggcgagggtatgggcattaggttggacagtgcgtccgcctacgccggagccatcatttcgccatactacgactccctgctggtcaaggtgatctcgcacgccagcgatctgcagagctccgcctccaagatgaaccgtgccctaagggaattccgcattcgcggcgtcaagaccaatatccccttcctcctaaacgtgctggagaaccagaagttcctccacggcgttctcgacacctacttcatcgacgagcacccgcaactgttcaagttcaagccctcgctcaatcgcgcccagaagctgctcaactatatgggtgaggtgctggtcaacggaccccagactcctctcgccaccactctgaagcctgccctcgtctcgccccacgttcccgaggttccgctggttacggaaccaccgaagggactccgcgaggtcctggtgtgcgaaggtccggaggccttcgccaaggaggtgcgcaaccgtaaggaactgctactcatggacaccaccttccgcgatgcccaccagtcgctgctggccacccgcgtgcgttcccacgatctgctgaagatctccccctacgtgacgcacaagttcaacaacctgtattcgctggagaactggggcggagccaccttcgacgtggcgctgcgcttcctgcacgagtgcccgtgggagcgcctggaggagatgcgcaagcgcatcccgaacattcccttccagatgctgttgcgcggagccaacgccgtcggctacaccagctatccggacaacgtggtctacaagttctgtgagctggctgtgcagaccggcatggacatcttcagggtgttcgactcgctcaactacctgcccaacctgatcctcggcatggaagccgctggaaaggcgggcggcgtggtggaggctgccatctcctataccggagacgtcagcgatcccaagcgcaccaagtatgatctgaaatactacactaaccttgccgatgagctggtcaaggcgggcacccacgtgctctgcataaaggatatggctggtctgctcaagcccgaatccgccaggcttctgatcacagccattcgtgacaagcaccccgacatcccaatccatatccacacccacgacacctctggagcgggagtggcctccatgctggcatgcgccaatgccggagccgatgtggtggacgtggccgtcgactccatgagcggcatgacttcccagccgagcatgggtgccgtagtggcctccctgcaaggcactccgctggacacgaacttggatctgcgcacggtgtcggagtactccgcctactgggagcagacccgcaccctgtacgctcccttcgagtgcaccacaacaatgcggtcgggcaacgccgatgtctacctcaacgagattcccggcggccagtacaccaacctgcagttccaggccttctcgctgggtctgggcgacttcttcgaggacgttaagaaggcctaccgtgaggccaacctgttgttgggtgacattatcaaggtgacgccctcgtcgaaggtggtaggtgatcttgcccagttcatggtgcagaatgacctgaccgccgatcaagtgctggagcgggccgaggagctgtcgttccccaagtcggtggtggagtacttgcagggctctattggcattccgcacggcggattccccgagccgctgcgttcgcgagtgctcaaggacatgccccgcatcgagggacgtccgggagccgaactgaaggacttggactttgacaagctgaagaaggaactgcaggagtctcacacctgcgtcaccaaccgtgatgtcatgtcagctgccctctacccgcaggtgacgaatgatttcctaaacttccgcgaaaagtacggacccgtcgacaagctggacactcgcatcttcctcacgggtcccaaggtgggcgaggagttcgacgtacctctggagcgcggtaagacgctgagcgtgaaagctctggctgtgtccgccgatctcaagcccaacggtatccgcgaggtattctttgagttgaatggccagctgcgcgcggtccacatcctggacaaggaagccgttaaggagatccatgtccatcccaaagcgaacaagtcgaacaagagcgaggtgggcgcccccatgcccggaactgtcatcgatatccgcgtgaaggttggcgacaaagtggagaagggtcagcctctggtcgtgctctcggccatgaagatggagatggtggtgcagtcgccattggcgggcgttgtcaagaagctggaaattgccaacggaacgaagctggagggcgaggacctcattatgattatcgaatagacagtgccaccggatcaaaatgtccattgtctaagctgccaccgcacacacccaatgtaaaattaagtgaaaacagtgataatcttagggactctgtcagttcgattgatcataaaactgtccaaagtcgcctgtgtctatttttatatgaatcaaaatcattcatgtttccgtgtttccaggatcaatcgaccatgagtaactggtcaaattttttagctgtccctgccaaaatatatcggattgcataagttcgtgcccaagtatatttgtaaatttgtcgtagggcttttcccgcaagtcatttgaatcaaatttgtacgattatggaatttttaattcgcaaacacctgtgtcgagattccccctctagtaaatacgtaagtggttattaatgttatattaactattgtgtaataaacgttatac

SEQ ID NO: 1425 - protein, 1181 aa, DROSOPHILA
MFIPAAQSAYRTLRKTQPRVRLNAIFKNGYSSKVEYKPIRSVLVANRGEIAIRVFRACTELGIKSVAVYSEQDKMHMHRQKADESYIVGKGLPPVEAYLNIPELIRVCKENDVDAVHPGYGFLSERSDFAQAVIDAGLRFIGPSPEVVQKMGDKVAARVAAIEAGVPIVPGTDGPVTTKEEALEFCKKHGLPVIFKAAYGGGGRGMRVVRKMEDVEESFQRASSEAKAAFGNGAMFIEKFIERPRHIEVQLLGDKAGNVVHLYERDCSVQRRHQKVVEIAPAPRLPIEIRDKMTEAAVRLARHVGYENAGTVEFLCDESGNFYFIEVNARLQVEHTVTEEITGIDLVQSQIRVAEGMTLPELGYTQDKIVPRGYAIQCRVTTEDPANDFQPNTGRLEVFRSGEGMGIRLDSASAYAGAIISPYYDSLLVKVISHASDLQSSASKMNRALREFRIRGVKTNIPFLLNVLENQKFLHGVLDTYFIDEHPQLFKFKPSLNRAQKLLNYMGEVLVNGPQTPLATTLKPALVSPHVPEVPLVTEPPKGLREVLVCEGPEAFAKEVRNRKELLLMDTTFRDAHQSLLATRVRSHDLLKISPYVTHKFNNLYSLENWGGATFDVALRFLHECPWERLEEMRKRIPNIPFQMLLRGANAVGYTSYPDNVVYKFCELAVQTGMDIFRVFDSLNYLPNLILGMEAAGKAGGVVEAAISYTGDVSDPKRTKYDLKYYTNLADELVKAGTHVLCIKDMAGLLKPESARLLITAIRDKHPDIPIHIHTHDTSGAGVASMLACANAGADVVDVAVDSMSGMTSQPSMGAVVASLQGTPLDTNLDLRTVSEYSAYWEQTRTLYAPFECTTTMRSGNADVYLNEIPGGQYTNLQFQAFSLGLGDFFEDVKKAYREANLLLGDIIKVTPSSKVVGDLAQFMVQNDLTADQVLERAEELSFPKSVVEYLQGSIGIPHGGFPEPLRSRVLKDMPRIEGRPGAELKDLDFDKLKKELQESHTCVTNRDVMSAALYPQVTNDFLNFREKYGPVDKLDTRIFLTGPKVGEEFDVPLERGKTLSVKALAVSADLKPNGIREVFFELNGQLRAVHILDKEAVKEIHVHPKANKSNKSEVGAPMPGTVIDIRVKVGDKVEKGQPLVVLSAMKMEMVVQSPLAGVVKKLEIANGTKLEGEDLIMIIE

SEQ ID NO: 1426 - DNA, 2361 bp, DROSOPHILA
atgaagagtttaagtcgttaattcgtgtttgagggacacatgtcaagaaccgcgagcaagcgagatggagctaatggagcacttatctgggagcccgacgagtccggttcaagagacctatatttttgtattttctttattttgtttttggtgataagatagttgcgggaacaggatagttgtataatcggtatattgataagacgaccgacaatatattggccgaatcatttaatcaattaattgctgacaaaaacgaaccaaagttcgaaggtcagcagacggcattgcagaaatgtccgtgacattgacctcggcacctggaaaatgaaataccacccaaaaaaaaagaacatcatatctatgtcaccatttgacccagttaatcgaaaatcgtggaattaacgaaaaggaatcaaagaaatattatttcgttgggccgtgtgtgggaaagagaggtggcgcaaacaaggcgagagagagacggggcgaacacggcgttcaacaaacttgattaacggtttatcgatttgccatcgcactcgcacaagcacgtgctttgtttgtcgctcctattgatttttacggcattgcttggatatgaaataaccgcacatttctacttcttccttttgtgcactccttccaatttcataacgttgtttatttgcatgtgtgtatcgcatgtacaaatgtccattgttgtgtgtggttgagtccacgtgtgttgtttttgttaatgactgtgattttcatatgtaaaactctttgttattattattcgatggaaggaggaggaaaacgaaacagatgaacatggcgtaaagttgatgaaacaccgagaggaaatagaattcatagtcgttgcgttttgcacactcgcaagataaccaactaacgacatttactaacaataaacaaaaacataactttacacgagaacacaaaaaacacaaaaaaaaaacaggaaaacaaaaggcacacacagtcacacactcacatctcttccagacaacttttgtcgcggtaacagcgcgaactgaaagtttgctcctggcttcattgactcgcaatttcgaactgagtctgatgaacaagaacaacagtgcgccgtgtggaaagcggcattttccaccccctaaaaagcgggccagcaagtgatgctgctgctgtatattgcccacatcattgtgcacgcgatgtggaagtggaagatcgatccggataactcggccataccctacctgacggccttgggcgatctgctcggcagcagtctgctggcggtggcgtggctcttcaccatgtcggtgggcatgcagtacggatccggaatggagacactaaacgcacctaactaatgtagctaacgaaatagggagtacggagtaacgtagaacgataaacaaggcagccacacatacacacacaccatacaatataaagaactgttatgtacctaaaacaaatatacagaaaacatagaaattgtacgtatagccagcctcctccagccacccaaaaatcttaaatccaagacaaaaaaaaaaaacctcccaacaccaaacggaaacggaaacggaaaccgctataaaacgaactaacttttaatgatgcatgtcgaatgctcgaggcgagagatattaagagatatgatatcattttacattgtgtccttcttcacatggcttttgcttgtgttccttttgctctaccgagaaattatgtgcgattatggtatatatacaggctatatataggcatatgtagaattgcaggccgctgcgtcatattttttaaggcttttaggacaatattatacacatttaaagaaaagtatatacattgtatagggagaaaaagacgacgaagaattactaaaagaacatttacgccacgcaaattgttttctcccactttggttcttgattctttcgctcttgattaccttaaacagccaaataataattgcaaaacgtagacgtaaatagagcctacttaaatccttaatttacacttaaccaattatgtagtattagcgcagatttgatttttgcaagtctcgctttcgattttgtttttttttttaatattacttttctcattgtccccttccatccccctttccatttcccccccgcagagcgcgagcgataaaaagaaataggagaagcaataattaaaccgcgaattgcgatatatatgattgcaaattagttaggacgatggaaaggaagtgtgtatgcaggagtttgtgcgttctgctccgcatcaaaaagtgaacagggattaaaatgatgagaatgagagacgttctgaaaggaaatgtgatcgatatttagttataacaataataataat

SEQ ID NO: 1427 - DNA, 2877 bp, DROSOPHILA
ttgctggcccgctttttagggggtggaaaatgccgctttccacacggcgcactgttgttcttgttcatcagactcagttcgaaattgcgagtcaatgaagccaggagcaaactttcagttcgcgctgttaccgcgacaaaagttgtctggaagagatccatatcaacggtccggtgactaagctcaacctctcaacctcgacctcagcctcagtccttctacctactacctactacctactacctctcactatccccagtagtacgacatcctggcccccaaaaaccacggacattacgacgcacacatcctgcgacagacacacggcgccccaacatttcccacattttcaataaaatgtaaaccaaacgattctccggattctttcaattcttgttccgatttgtattcttcattcattccttaaacaaaaaaccgaaaaaaaaacgtaagcctacgtaatactgaacagcaatcaatgcactttccataattcttaacttattatatatattatttatcgaaaaataaaaccatcttgtgatatctttttttgtgtttagtcataggttgaaaaaaaaaatagaaagaaaaaaaccaaaacaaaaagtatgcaaaacccatagacaagtaattcttaaaaaaaaaaataaaacaaaaaactatatttattagagcacagtttataatttgtgttgaatgtttagtttccgttgattttaagccaatttatagtttcaaagcctagacactcaggatttagttcaaatattagtagtttagtcgatgagttgtatttgcgaatactcgcttgagagaagccaaatcaatgcgaaaatgtcgctgcccaacgaacagacaaacttgccgcacaatcccagccaaccagcatccgcagacacacagacaccagccacggcaacaggaaccacaacaccatccacaccaacaccatccacaagaaccacacaaccaaatgagctgaaacaccgcctgacgccactgaatgtgcgtcgtttatcgggctacgttaatccgcaagcgatcagcgataatgctggcgatgatcccccgcccaccaccattaacattggcctcttcaacaacaataacaataataatacaaataataataataataataacaacaacaacaacaacacagcatcaacaacgccaccatctgcatatgccacaccaccaatataccaacaacagttgtccacactgacagcaacaacaccgctagatgtggcaccggatgataaatacagattgtttaccattttcaatggaaacgatcccgacaatgagaaattgtcgggcctaccacattcgacaaccggttcactaagctcaatcatcacgacgtccatagcatcctccgaaccggatcctggagcggtgagcggcggcggcggcggcggcggcggcggcggcggcggcggcggaataggaggagcaggtggcggcggcggcggcggcggaggcaatggcggtatcggatcgggtgccctggtggcagcggatgcctccagcattgccggcatcaatggcagctccgaggagaagttggcgctcaatcgacccggcatcaagcaggagaagtggacaactatcctactgcaggtatccattccgttctttctggccgggattggtaccatcggagctggcattgtcctgggacgcgttgagaaatggtatgtcttcaagaacgtaagcgagctgttcatcctggtgccggcacttttgggtctcaagggcaacctggacatgtgcctggcatcgcgtctctccacgcaagtgaatctgggcaacatgaccagcagacagggcgtaatacggatgatagtggggaacatagcactggtgcaggtccaggcgacggtggcctcctttctggtggccatgtttgcggtgagcgtgggcgcggccatgaccggtgacttctatttcgagaacatgatgctgctgactgcctcggccatgttcacggccacctcgtcgtgctttgtgctggacttcgttttggtggctgtaatcctgttctcgcagaagtaccgcctcaatccggacaacctggccacaccgttggccgcctccattggtgacgtggtgtccatcagtttgctctcctttatcgcctcgctgctgtacgatcatatcaaaacgcacctgtggatcacattcatcgtggtcacctgctacctggtgctgttgcccatgtgggtgatgatcgtgctgaggaacgagtacacgcggccggtgctaaagagcggatgggttcccgtcctctcggccctctgcataagtggtctgggtggccttgtgttggatgccgccgtcgaggtgtttaatggattcgtagtgtttcaaccgatcatcaacggaatcggcggcaatctggtatcggtgcaggccagcaagatatccacaatgctgcaccagagctcaattatcgggattataccaccgcacacgcagatcttcgagtggccttggcgggcgctcttcaaaggagttccctatgcgaagacagcgaggatacttattgccatgtccatacccggcaatgttctgttcatctttgctgctgactatataaactatagcacctcgacggtcacctgggtgtttgtgctttcctatttgaccgccagtttggttcaggtgatgctgctgctgtatattgcccacatcattgtgcacgcgatgtggaagtggaagatcgatccggataactcggccataccctacctgacggccttgggcgatctgctcggcagcagtctgctggcggtggcgtggctcttcaccatgtcggtgggcatgcagtacggatccggaatggagacactaaacgcacctaactaa

SEQ ID NO: 1428 - protein, 679 aa, DROSOPHILA
MSLPNEQTNLPHNPSQPASADTQTPATATGTTTPSTPTPSTRTTQPNELKHRLTPLNVRRLSGYVNPQAISDNAGDDPPPTTINIGLFNNNNNNNTNNNNNNNNNNNNTASTTPPSAYATPPIYQQQLSTLTATTPLDVAPDDKYRLFTIFNGNDPDNEKLSGLPHSTTGSLSSIITTSIASSEPDPGAVSGGGGGGGGGGGGGGIGGAGGGGGGGGGNGGIGSGALVAADASSIAGINGSSEEKLALNRPGIKQEKWTTILLQVSIPFFLAGIGTIGAGIVLGRVEKWYVFKNVSELFILVPALLGLKGNLDMCLASRLSTQVNLGNMTSRQGVIRMIVGNIALVQVQATVASFLVAMFAVSVGAAMTGDFYFENMMLLTASAMFTATSSCFVLDFVLVAVILFSQKYRLNPDNLATPLAASIGDVVSISLLSFIASLLYDHIKTHLWITFIVVTCYLVLLPMWVMIVLRNEYTRPVLKSGWVPVLSALCISGLGGLVLDAAVEVFNGFVVFQPIINGIGGNLVSVQASKISTMLHQSSIIGIIPPHTQIFEWPWRALFKGVPYAKTARILIAMSIPGNVLFIFAADYINYSTSTVTWVFVLSYLTASLVQVMLLLYIAHIIVHAMWKWKIDPDNSAIPYLTALGDLLGSSLLAVAWLFTMSVGMQYGSGMETLNAPN

SEQ ID NO: 1429 - DNA, 2904 bp, DROSOPHILA
ggttgccaaacggagagcagcataccttccggatagctggcatcgatcacgattacttccaagcactgtagcagctcctggacctcacttagtggcccctgcagctttcgctttatctgacgcactggacgcactgcagccactactaccagtagattcacattggtggtgattatcttatcgggaaatcccaagccggaacgcacatccgccagcttaaggaccgcaccaagtggccttatgggctgatggagtaactgctggagaattgttatttggccaaagtcgtcattgtcgtggcgcaccacatagccggatccctcgttgaccaccagggcgcaggagaccgtcgcttggggctgataacgctgttctcccggagcagcaaacggtatggacatcactttagcgcccacaatgtctaccacatggccgatctgcagcatggccgcgtactcatccacacagtcccgctggccccagcacttgcaattggtcaggtgattgggggaatctcggatggtcaagctgagaacccctcgttcggtgccactcatcttgtcatagaagatgttcggcgaggatttggagacaatcagggcaacggtggagaaacgggtcattgtgggacgcatctctgccaaccgctggaacttaatacgccttgccattgaaattatttaagaaatcgcgaccagtcagattgcagtgcttaagaaaaccgttacattgccgttaccgccgattagtagttatcgatgtttgtagtgatggtacaccacaaatggccgtagattcagttagtaacagaaagtattgctaacaacttagtttgataaaaaccacaattaaaacatttacagaaagttgcgcttattaattgtaaccattggaatcgataataatcggatggcatccgaataccagacgtaccatccctaataagctgacacacactacgcatatgtgcacccgcgcacacacacacgcacacacagaggggaacggcacagatttactgcgttaaacaaactcacttgtcgcacttttccacgaatgccagtgcgctgaaagtgaaacccatccgccggagcatagtaggattagccaggacaaccgttcagctcagtgccccagaagcatttaattggaggagcaacagtcgagcaacccgcgacccgcagacccagtcttggcagcccacagccactcaaaatggtcaaactattcgcgttgagcatctttcacaagggcgccagcgaggcgcgtctcctgaagaccgcctcggacctgcagtccttctcctttttccaacgtggcaccgtcaacgagttcatgacgtgagtatgcatgtggatgccaaagaacggcgcaggctcaaagagtcatcaatgacgaacacccccctaaacaactcctcctcttgcagtttcgcttcgaagacgattgtggagcgcacacagccggccctgcggcaatcggtgaaacaggatgcctacatgtgtcatgtctatgtgcgggcggacaatctggccggtgtactgatcgccgatcatgagtatccgcatcgcgtggcgcacacgcttatcacaaagattctggatgactttacggccaaggtgtcggccgatcagtggcccaatggcacggaggccactatctcatttgacttgctgccagcgtttctagcacgctatcaaaatcccgtcgaagcagatccgctgacgaaaatgcaaaacgacctggacgaaacgaagatcatactgaagaataccatcgaggcggtgctggagcggggcgagaagctggacgacatggtcagcaagtcggagaaattgtcgctgcagagcaaggcgttctacaagacggcgaaaaagactaactcctgctgcagcttcacctagacgacagctgcacctctcatcaccccccaccacacgctaatcctctcaagcaacaaccacaacaggaaacaccagaaaatgcaaatcaaagacaacacaaaggataatggataacacgataacaccaacaaactacaaccaaacaaactccaagggagcggtgcgacttgggctttgatgattgctttttataaatgaattagttaattttatatactatatatatatattatattatatactgtatgaataggatggccagttgccagttacgatagtccgctaacccaatgtctacctgtctgtatatgtctacgctttggatatctaaatgttaattactaccaatacagattacgatctaaacccatgtgcttaacataatcttctcttcacttatgtgttggcacggcggtccaaaattggccctttgctagctattgatgttgtgggccttcttatcgcctccacggcggatctatgtataccaatcggatcggaaggctgcacctatgtatacacatgcagtcgcacttccgatccgggcaactggcggtcggaatgtgtgggcgtttcaataaagaagtattatgggaaatgtgaaccaagctcgttttcattgctcacatatacaaaccttatctttgtcaattttggcaaaatgtacaaactatttgtacgagctctgtacatagcacatgaacttatttttatttatgtaatacgtaccactttatcttaagtgcaaattccattcctcccaaaaaagcaaaatcaatttaaaagtgattttctgttggcgtttatttattatatagaagacacctatttcgcttcttgtaaagatttccgttacatttttcatatttatgcgttttccttacgttttcgtgtttaaccttttggattttggttatgtttaatgggttcggtttgtatagcctagtataagataggtaaatcgattacaatttagttttcgccccctctccatcgcaat

SEQ ID NO: 1430 - DNA, 815 bp, DROSOPHILA
gggaacggcacagatttactgcgttaaacaaactcacttgtcgcacttttccacgaatgccagtgcgctgaaagtgaaacccatccgccggagcatagtaggattagccaggacaaccgttcagctcagtgccccagaagcatttaattggaggagcaacagtcgagcaacccgcgacccgcagacccagtcttggcagcccacagccactcaaaatggtcaaactattcgcgttgagcatctttcacaagggcgccagcgaggcgcgtctcctgaagaccgcctcggacctgcagtccttctcctttttccaacgtggcaccgtcaacgagttcatgactttcgcttcgaagacgattgtggagcgcacacagccggccctgcggcaatcggtgaaacaggatgcctacatgtgtcatgtctatgtgcgggcggacaatctggccggtgtactgatcgccgatcatgagtatccgcatcgcgtggcgcacacgcttatcacaaagattctggatgactttacggccaaggtgtcggccgatcagtggcccaatggcacggaggccactatctcatttgacttgctgccagcgtttctagcacgctatcaaaatcccgtcgaagcagatccgctgacgaaaatgcaaaacgacctggacgaaacgaagatcatactgaagaataccatcgaggcggtgctggagcggggcgagaagctggacgacatggtcagcaagtcggagaaattgtcgctgcagagcaaggcgttctacaagacggcgaaaaagactaactcctgctgcagcttcacctag

SEQ ID NO: 1431 - protein, 199 aa, DROSOPHILA
MVKLFALSIFHKGASEARLLKTASDLQSFSFFQRGTVNEFMTFASKTIVERTQPALRQSVKQDAYMCHVYVRADNLAGVLIADHEYPHRVAHTLITKILDDFTAKVSADQWPNGTEATISFDLLPAFLARYQNPVEADPLTKMQNDLDETKIILKNTIEAVLERGEKLDDMVSKSEKLSLQSKAFYKTAKKTNSCCSFT

SEQ ID NO: 1432 - DNA, 6153 bp, DROSOPHILA
atatacacatacataacacatgcatttttaaaagcgtgttgatgttcgatttttcaccattcttgctgcactttacacacaaacaaacactcgccatcgttattatttaattacttttggcgcggcttcaattaaaaaaaaaacagcaacaacaacgctgcaagtaaatacacacacacacaatacatatgcaaatatctatgtatatattgcacataacaaagctgccactaaaaaaaatcaacgatttgaactagcaaatctcatacacgcaaataggaatgggcttgcccatgtattagtgagaacaatttcttaaatatttgacacgtgagtttttcattgttttaggtacaaatttttcttctatttaccagcagaagtcaacttgtatttactccgattcgcgttttttcggggatttggttctcgtttcgattgaaaatacatatatttcggatatgtgataactatcagtagtttttcagtggaaaccgtgattttcctgcccggcgattcatccgatgttttcttgtcatattttgttcgagatttttttaaaaggcaatgaaaacacgaagcagcggtgcttttatatgggaaatatatggcaatttaaacggctgtagctcgctctctctcgccctctctctcactcgctctcccgcaatgaaaacgaatttcgtggtgcacagtggtcgcaattgcatactagctgacaactttttaagattgtttacatttccttgatttatctgaaaattgttacatttttcttttttatttgtgcttacggttgctttggcgtagttgacatctttggtctaaacgtatttagacaacttttggtaactttctaaaaaataataatcgtaccccactgtgtggtggttgaaatgtgtttttcgctctctgctcactactcgtgctcgctcccacggagagtcgaaaacagctgggatataagcccaggaacagccggttatgaattgccgattcgaataccagccgtgcttttgatgactcactaatagtaactaatcataaatcgagaattaactgccgaataaaccgcaaatagcagccaaaagaagtggttaaaagggaaacaataaaacccgccagcggtcagagttgtcacccctattaccgatagaccggcgatagcacgcgataatcgatagcactctccgctctttgccacgaattgcaagtttgcgatcccgtcgcattcaagtttcagccattgttttgtgcaaaaagctaagtaatagtgcttcggtggggcaaaacaagtaatcctggacatccggaattcagtcaacaactcgcaccggtgacttagggactcttgcatcgaattaagcagcgccgaaaaaaagccggcaggcggaagagcaaggaaaatgacgctggacgtgggcggcgtcgccaggggactgctcacctgggacaaacaggagcacctggtcaagctggccattctcatcctggcagcggttttatgtgagtaaacagcgcttattcggcattagccgagtgggcgttgtgaaaaggtcaaacattcgcatctgctgcgagcttcttcgctatcgatagcttgatgtgccgccggcactttatggtgaaattacccagagcatataatggcttagttacgcaatgcagcactattattccttatttcctagcttataaattccttgatttgcatttgaacaaatgcatagctataaacatcttccgattgccatgttgtagaatatcaacttgccagccctgctagaatatcgatagcttgatacacgctggcatgtgccatcactagctgctggtcttcctcttgccatcgccgattaaacttccttttcctcttgcatttctggacagcatttgccacacgcttgttctctgtgctgcgattcgaaagcgtaatccatgagttcgatccgtacttcaactaccgcaccacgcggtttctggcggagcagggcttttacaagttccacaactggttcgatgaccgcgcctggtatcccctgggccgcatcatcggcggcaccatctatcccgggctgatgctcacctcggcggccctgtaccgcctgatgtggctgctcaatgtgaccatcgacatacggaacgtgtgcgtcttcctggcgcccttcttctcctcgctgaccacgctggtgacctacgccctcacaaaggagatacacgtaagccaccgtcccaccgttctttacttttttttttatatcctttcgaggttaaaattcgcacgtggttcttatgatccccctttacccctttttagagcactggagctggactggtggccgccgctttgatatccatcgttcccgggtatatctctcgatccgtggcgggatcgtacgacaatgaaggcatcgccattttctgcatgctcttcacctactatttgtggatcaaggcggtaaagacgggcacgatcttttggtcggctatgtcggcattggcctacttctatatggtctcctcgtggggtggctatgtcttcctgattaacctaatcccgctgcacgtgctggcgctgatgatcaccggacgtttctcgcacaggatctacatagcatacagcacgctatactgcgtcggcaccattctgtcgatgcagatctcgtttgtgggattccaacccatccagagctccgaacacatgctggtgagtgtaactactttgtgtaatgctgtgcagtgtagcgatgtgtgatctgttgtgatgaatacattttaaattcttgataggaagagtatgaaacataatgagtaccaaaaacctagctgaattggtcactaaaagaactctaattaaagaattactcgctatatcgaaaagaagggagtgtaaatcgtatttttctcttgcaggcactgggaacctttggcctgtgccagattcacgctttcgtcgactatctgcgctcgcgcattcccaaggatcacttcgatctgctcttcaagacgttggtttccagtgttttgactgtggtgttcgtcgtgggtaccctgctcacgcttaccgggaaagtctccccctggaccggcagattttactcgctactagatccatcctatgccaagaatcacattccaatcatcgcctccgtatcggagcatcagcctacatcctggtcgtctttctattttgatctgcaggtaggtaaaccactatcttcgtaggaatctgtagatgtgctctcaacttaacagtgtcgtcttatcatatctatttttgtttaataaatccttactacaacaaaattcggtttattttaaacctatcctaattacacatgttctgccgaggatgagaacttaacaacgatgcgaatgatatgcgccttaatgcattgagtgattaccttgcactttgatcgctgaggcagttaaataaacatgaccccttttcacataacaatccaatatatagttaattcattggctttttttcaaatttcttttgcagatcctggtcttcctctttcccgctggcctttatttctgcttttccaagctgacggactcgaacatctttattattttgtatggcgtcaccagtatttatttcgccggagtgatggtgcgtctaatgctggtcctggcgcccgtgatgtgtgtgctatccggaattgccatttcgcatctgctggccaagtatatcaagagcgttgatgccggaagctcatcgaagcagggagtagaaagcaagcggcagcacaagaagctggaacagcagacgggaggcgtgaagagcgaggtggccattggattcgtgggtgtcatcactctgatgcttatagtgtacacgctgcactgcacctgggtcacctcggaggcctactcctcgcccagtattgtgttgagtgccaggtcgcacgatggcggccgcatcattttcgatgacttccgcgaggcctactactggctgcagatgaacactccggaggtgaatatgaagttttgattgcccatttgtcgagtgctctgccgagttagccatagaaaatcagaaacagattgtcgtaatggaataattgtgggcttttaagatcggaattttcatctggctaagtcggcaacacaagagtttcgcatcttaatgatgactacattgtaaattcttgataggaagagtatgaaacataatgagtactaaaacaaccaagctgacaaaacagaatatcccttttagtttgcaaacttttgttaaatgctcgcactgaccgtttcgtaatgtatttttcaggacgctcgcataatgtcctggtgggactacggctaccagataacggccatggccaatcggacgatattggtggataacaatacttggaacaacacacatatatcgcgcgttggccaggcgatggcctcttcggaggagaaagcctacgagataatgagggaactggatgtggactacgttctcgtgattttcggagggctcactggctactcatcggacgatatcaacaagttcctgtggatggtgcgcattggcggcagcacggatcgtggtgcgcacatccgcgaaaaggactactatgcggccaacggagagttccgagtggacaaggagggctcacccacactgctcaattgtttgatgtacaagatgtgctactatcgctttgggcaaatgtacacggaaggtggcaaagcccagggctacgatcgagttcgtgccgccgagatcggcaacaaggactttgaactggatgtcatggaggaggcgtacaccacggagcactggctggtgcgcatctacaaggttaaggatctgccgaatcgtggagtctgagaaataagtgtcgcagtcattccgctctattctgtgttctgtacattagctaactctgcccgtctccctctatctcgaatatttggcaatctctctcgctctatgagcaccaattgctgcattctcctgctttgcccatcatgcatttagttctacactggcacaaaaccacaaaaaccaagtattttttttgtttttatatttttacaaatgtctcaagtgtaccagatgcgtctggcttcttaagcaagaaaggagcatgtaagcgaatcgaacgaaatatatatatgtggagaaaaactatcataatcattgaagttttattggcgttgcaagtggggagcacagttcacgtagtaacgaattcacatagtatctactcgtacaaaactaaataaaaataaatgcgataaaagtaattatataaacgaattgtaactttttgttaaaagagaattaaaagaaattaagagaattaaagaaattaaaagaaacttattgcattgccactggcttgaaggaatcatctcgagagctataagagctggtgatttggaatattagttaatttcaaactgttctgacatttttatgttaaatttctacttattgaagttgcaaatacttaccatagtacatgtagaattgtatacttacttgcatttataaactaatacaaaattctttcaaaagatgtctcctaaggataaccgaataatatattagtattttcgggaaagctaacaataaaatcttcagtggatagatattttccttgaacagcttataagaaagttaatatcttacacagatataaagattgtatatacagtataaaattcttttgcgtaataatgggttggttaatctataagtttttacaaataagctttttatggccaggagagaatgcgtcaggtagcaaattagataaattaaatacgaattaaaacgaaaatcccagagacctttagccctttaagcattttttaacttcgacgtttacagactatatgtatttataattaatttaattataaatatcaaaagtttaaaatacttttaatacaatcgttcagcaacgtaggatgtttcttcagttcagttctagccatatcataccattttggacatataaatacatatgtataacaaagcgtgaaatcgatactttgatactttaggataaaactttatttgatataatcaaaatgcatgcgggtataagttaaaaatgcgtaacatagtctgtaggtggttggatttttaggacacagatcaggaactggagaacgctccagtttagt

SEQ ID NO: 1433 - DNA, 2855 bp, DROSOPHILA
aataccagccgtgcttttgatgactcactaatagtaactaatcataaatcgagaattaactgccgaataaaccgcaaatagcagccaaaagaagtggttaaaagggaaacaataaaacccgccagcggtcagagttgtcacccctattaccgatagaccggcgatagcacgcgataatcgatagcactctccgctctttgccacgaattgcaagtttgcgatcccgtcgcattcaagtttcagccattgttttgtgcaaaaagctaagtaatagtgcttcggtggggcaaaacaagtaatcctggacatccggaattcagtcaacaactcgcaccggtgacttagggactcttgcatcgaattaagcagcgccgaaaaaaagccggcaggcggaagagcaaggaaaatgacgctggacgtgggcggcgtcgccaggggactgctcacctgggacaaacaggagcacctggtcaagctggccattctcatcctggcagcggttttatcatttgccacacgcttgttctctgtgctgcgattcgaaagcgtaatccatgagttcgatccgtacttcaactaccgcaccacgcggtttctggcggagcagggcttttacaagttccacaactggttcgatgaccgcgcctggtatcccctgggccgcatcatcggcggcaccatctatcccgggctgatgctcacctcggcggccctgtaccgcctgatgtggctgctcaatgtgaccatcgacatacggaacgtgtgcgtcttcctggcgcccttcttctcctcgctgaccacgctggtgacctacgccctcacaaaggagatacacagcactggagctggactggtggccgccgctttgatatccatcgttcccgggtatatctctcgatccgtggcgggatcgtacgacaatgaaggcatcgccattttctgcatgctcttcacctactatttgtggatcaaggcggtaaagacgggcacgatcttttggtcggctatgtcggcattggcctacttctatatggtctcctcgtggggtggctatgtcttcctgattaacctaatcccgctgcacgtgctggcgctgatgatcaccggacgtttctcgcacaggatctacatagcatacagcacgctatactgcgtcggcaccattctgtcgatgcagatctcgtttgtgggattccaacccatccagagctccgaacacatgctggcactgggaacctttggcctgtgccagattcacgctttcgtcgactatctgcgctcgcgcattcccaaggatcacttcgatctgctcttcaagacgttggtttccagtgttttgactgtggtgttcgtcgtgggtaccctgctcacgcttaccgggaaagtctccccctggaccggcagattttactcgctactagatccatcctatgccaagaatcacattccaatcatcgcctccgtatcggagcatcagcctacatcctggtcgtctttctattttgatctgcagatcctggtcttcctctttcccgctggcctttatttctgcttttccaagctgacggactcgaacatctttattattttgtatggcgtcaccagtatttatttcgccggagtgatggtgcgtctaatgctggtcctggcgcccgtgatgtgtgtgctatccggaattgccatttcgcatctgctggccaagtatatcaagagcgttgatgccggaagctcatcgaagcagggagtagaaagcaagcggcagcacaagaagctggaacagcagacgggaggcgtgaagagcgaggtggccattggattcgtgggtgtcatcactctgatgcttatagtgtacacgctgcactgcacctgggtcacctcggaggcctactcctcgcccagtattgtgttgagtgccaggtcgcacgatggcggccgcatcattttcgatgacttccgcgaggcctactactggctgcagatgaacactccggaggacgctcgcataatgtcctggtgggactacggctaccagataacggccatggccaatcggacgatattggtggataacaatacttggaacaacacacatatatcgcgcgttggccaggcgatggcctcttcggaggagaaagcctacgagataatgagggaactggatgtggactacgttctcgtgattttcggagggctcactggctactcatcggacgatatcaacaagttcctgtggatggtgcgcattggcggcagcacggatcgtggtgcgcacatccgcgaaaaggactactatgcggccaacggagagttccgagtggacaaggagggctcacccacactgctcaattgtttgatgtacaagatgtgctactatcgctttgggcaaatgtacacggaaggtggcaaagcccagggctacgatcgagttcgtgccgccgagatcggcaacaaggactttgaactggatgtcatggaggaggcgtacaccacggagcactggctggtgcgcatctacaaggttaaggatctgccgaatcgtggagtctgagaaataagtgtcgcagtcattccgctctattctgtgttctgtacattagctaactctgcccgtctccctctatctcgaatatttggcaatctctctcgctctatgagcaccaattgctgcattctcctgctttgcccatcatgcatttagttctacactggcacaaaaccacaaaaaccaagtattttttttgtttttatatttttacaaatgtctcaagtgtaccagatgcgtctggcttcttaagcaagaaaggagcatgtaagcgaatcgaacgaaatatatatatgtggagaaaaactatcat

SEQ ID NO: 1434 - protein, 713 aa, DROSOPHILA
MTLDVGGVARGLLTWDKQEHLVKLAILILAAVLSFATRLFSVLRFESVIHEFDPYFNYRTTRFLAEQGFYKFHNWFDDRAWYPLGRIIGGTIYPGLMLTSAALYRLMWLLNVTIDIRNVCVFLAPFFSSLTTLVTYALTKEIHSTGAGLVAAALISIVPGYISRSVAGSYDNEGIAIFCMLFTYYLWIKAVKTGTIFWSAMSALAYFYMVSSWGGYVFLINLIPLHVLALMITGRFSHRIYIAYSTLYCVGTILSMQISFVGFQPIQSSEHMLALGTFGLCQIHAFVDYLRSRIPKDHFDLLFKTLVSSVLTVVFVVGTLLTLTGKVSPWTGRFYSLLDPSYAKNHIPIIASVSEHQPTSWSSFYFDLQILVFLFPAGLYFCFSKLTDSNIFIILYGVTSIYFAGVMVRLMLVLAPVMCVLSGIAISHLLAKYIKSVDAGSSSKQGVESKRQHKKLEQQTGGVKSEVAIGFVGVITLMLIVYTLHCTWVTSEAYSSPSIVLSARSHDGGRIIFDDFREAYYWLQMNTPEDARIMSWWDYGYQITAMANRTILVDNNTWNNTHISRVGQAMASSEEKAYEIMRELDVDYVLVIFGGLTGYSSDDINKFLWMVRIGGSTDRGAHIREKDYYAANGEFRVDKEGSPTLLNCLMYKMCYYRFGQMYTEGGKAQGYDRVRAAEIGNKDFELDVMEEAYTTEHWLVRIYKVKDLPNRGV

SEQ ID NO: 1435 - DNA, 2331 bp, DROSOPHILA
gcatgtatgtgcgaaatatatagggtattgtatatacaaatgtgataaacatgaggttgcatataaaattaattatatacctccttccagttctgcatattttcatttaatttgtttacgtttttttttttgtaatttaaattgttgtttatgaaagagttcatattcagtcgtatgagaagagaaatcataatatcacatatttattccatggtatatagattttatagaatatattttgtagtttgtgtagtttcgtttcaaaatgtaggttgttttggggtgaaaagacattttatctttgctcttaagcggaaaatcgccctaaaatatttaatacccctgaagttgaggagctcagaatacataaaactatagtcaaatacttgttatttaaaaaccatattttgtaatatatagtaagtttctgtgttatatacataaacgttccgacgatgcggattataaaaccttttattcaaataaagtatattttttgaacagctaaaactgaaaagctgataacactttaggtttatatctattcttgatatattgtatatatgtacatagcttaggaaagttgaaagttgtgacgcttttttgtaattcagggcgattttttttagagtgcagtgagcttaaagtgcttagaatttgcaaaagactgatagatagatagttgacttatataaatccctaatcctggcaggacattggctaaatgtaaacttagacttatcattacattaaagaggacgaatcgactccaaataaatctgcctatatttcgggccttgctgatgcctaaggattcctaacgagtcgaaccttaagtggctaccataaaactgggtaatatctcgactgggcgagtcagtcccgggtaacacggtggtctgaccaccgaatatcgactcatcttcgactctacgcaactggagttgtgcggtagtttgtgtttaaggggctgaataaatggttatcttgagtggcttaccggcattcccgaatcgagttggccaaaccgcgtgctacgccaggactccaggatgaggaaacctgcatagattttacccactgacagtttgcccttgttgagctgatcgctgggcggcaccagcaggtttagcatcttcttcgcctgcaatggccagatgttcgtgatggtctcccgcagttccatgtccgcctggtccatctcctcagctcaagctaggcgatcgccgatggccattcatatacgaatgtccaggatgtaaatggccagcatcggcaccggtaagcgactcctgcgacggatgtctcgatgcatcctgcagctccagcatctagttggaaaatgattgtggaacgttttagtaagccaactccatggtcaccatgaatgctaccactcgaaatcagtccaaaaagattgagaagtagttcgggttacggggtttggggaaaacaggtgggtgatttcgattggggtaaacacttccagatggtcgaatcgattctaatttggtcagcatttcaaagtttttgtgtttttgtgtttttttttttttggtttgggactcctctagaccgatttcttgtggattcattcattgcaaggatacgtaagtttaggtatatctgtgtatttataaatttagaactatagttgtccaatgccccgtaatggagcgttggcaatagatatgtatatatgcttgaacttgtatataatgctacaaaataaatatacatagagacatgtatgcttactttgcgggatatagtatttaggggatatacggtatataaaagtaaacaaaagcaatcattactccactgcaacaaaatacatattcaaatgcgtttttaattgtactagtttgtatagaaaggttcttaaatgcgggattatattgattttgtatttgatagttaacctatttgagggcatgtaacatttaaggaattccatacactactcgggagtatacatatacatatatacttggtcactttctctagatataattgggttcctttggggttcttttattgtataatcgactggatgtctgcttatacttgaggtttttctgaaaatgatatgactgccatattgcgtttcttcttacgccaattgcttaacattcgactacgttattgattttggtttattgtcctatatttatggtaatataatgtggtacaaaagaagtgaaatgcaaaatacgaaggtacagctagtatcaatcgatctttgcatctggaatgtgaagatttagccagatttctctacacgatatatctacaagataaataggataaatagctactcatgcaagt

SEQ ID NO: 1436 - DNA, 6471 bp, DROSOPHILA
gttcaagtgcaataataacacggtggtaaagcgtggaatagctaataaataataataaaagacaacgattcaaaaagcgataaatacagcaaaggaataataataataaagtgtacaaaaaacagccgagccgaaatcaacgatcaagggattcaggacgaggacgcgagttaaggcagttaaggaatcgcagccggaatcctttagcctccagcctccatcctaaacaaccgccacatcctccagtaatcaccagcaacagccatcggactcgcgagctaaatgtccagttgccgctatcgttccatacggacggcgtgtcactcccgacaaatgcgtattgtggttgaccttgtttaatataattatggccgagcggtcgttacaaaagtatcagaaattggatacagtgacggtggttggaagcggctcaggaagtagtgcaagcagagcatcaacaggactccttaggcggggggcacttgggtcgaaagggagcccatcgcttagctgatagaatgggtggcccgaaaaaagaggaaaacccaccaggtggtggtccgacgtcattgtttattctaaccgaggataacccaattagaaagtacacacgattcatcatagaatggccgccctttgaatacgctgtgttattgacaatcatagccaactgtgttgtgttggcactagaggagcacttgccagggggcgacaagacagtattggctcaaaaattggaaaaaacggaggcctattttttatgcattttctgtgtagaagcgtcgctcaagatcctcgccttagggcttgttctgcataaacactcctatctcaggaatatttggaacatcatggattttttcgttgtagttacgggattcatgacacagtacccacaaatagggcccgaggtagacctaagaacacttagagccattcgtgtgctacggcccttaaaattagtgtctggaattcctagtttacaagtagttttaaaatctataatcaaggcgatggcacctttactgcaaatcggtctcttggtgttgtttgcaatcgtaatttttgcaatcattggactcgagttttattcgggcgcactgcataagacttgttatagcttagaagatccaaacaaactagtgaaggagggcgaatcagagacgccttgcaacacggacaacatcctggaaaaggccaccggctccttcgtatgcaataacaccacaagcatgtgtctggagaagtgggagggaccaaattcaggtatcacgagtttcgataatatcggatttgccatgttgaccgtattccaatgtatcacgatggagggctggacggcaatactgtattggaccaacgacgcattaggttcagcatttaattggatatatttcgtgcctcttatagttataggctcattttttatgctcaacttagttcttggtgtccttagtggtgaattcgcaaaagaacgagaaaaagtagaaaatagacaagagtttcttaaacttagaaggcagcagcaactagaaagagagttaaacggctatgttgaatggatttgtaaagctgaggaggtaatcctggccgaggagcgcaccacggaagaagagaaaatgcacataatggaggctcgaagacgaaacgctgccaaacggaaaaagctgaaaagcttgggaaaatcaaagtccacagatacagaggaagaggaagcggaggaagattatggagacgatggttacctcaaaacgcgctcgaaacctcaaggaagttgtaccggattttggcgggcggagaaaaggtttcgtttctggatccggcacacggtgaagacgcagtggttctactggttcgtgatcgtcctcgtctttctgaacacagtctgtgttgccgtcgagcattacggccagccatcgttcctcacggaatttctgtactatgctgaattcatcttcctgggactcttcatgtcggagatgttcatcaagatgtacgcgttggggccccgcatctactttgagtcgtcgttcaaccgatttgattgcgttgtcattagtggttcgatattcgaagtgatctggtccgaggtgaaaggcggttcgtttggtctgtctgtgctgcgtgccctgcgattgctgcgcatcttcaaagtcaccaagtactggtcgtcgctgcgcaatctagtcatctcactgttgaactcgatgagatcgatcatctcattgttgttcctgctcttcttgttcatcctaatattcgccttactgggcatgcagttgtttggcggccagttcaatctgcccggaggcacgcctgaaacaaattttaacactttcccgatagcactgttgactgtattccaaatcctcactggcgaagattggaacgaggtcatgtaccagggcatcatatctcagggtggtgcccagaaaggaatgatttactctatatactttatcgttttggtactcttcggaaattacacgctattgaatgtgttcttggctatcgccgttgataatttggcgaatgcccaagaactaacagcagccgaagaggaacaagtcgaagaggataaagagaaacaactgcaggagctcgagaaggagatggaggccctccaggcggatggagtccatgtggagaacggcgatggtgctgtcgcccccagcaagtccaagggcaagaagaaggaggaggagaaaaaggaggaggaggaagtgaccgagggtcccaagccgatgctgccctattcatcgatgtttatactatcaccaaccaatcccatacgacgcggcgcccattgggtggttaatttgccatattttgatttcttcattatggttgtcatctcaatgtcatcaatagcattagcagccgaagatcccgttcgtgagaactcgaggcgaaacaagatattgaattatttcgattatgcatttaccggcgtattcacgatagaaatgttgctgaaaattgtagacttgggtgttatcctgcaccctggcagctatttaagagaattctggaatattatggatgctgtggtcgttatatgcgctgctgttagtttcggtttcgatatgagcggtagcagcgctggacaaaatttatcgactattaaatcgcttcgggtattgcgtgtactacgcccattgaagaccattaagcgtgtaccgaaattgaaagccgtgttcgattgcgtcgtgaactcattgaaaaatgttgttaacattctaatcgtgtacatattgtttcaatttatattttctgttattggagtacaattgttcaatggaaaatttttttattgtacggacgaaagtaaacatacttccgcagagtgccagggctcgtacttcaagtacgaggaggacgaactgctgccaaaacaggagctacgggtatggaagcctcgggcctttcactacgacaatgttgccgctgcgatgttgaccctgttcgccgttcagaccggcgagggatggccacaggtcttgcaacactcaatggctgccacttatgaagataggggtccaatccaaaatttccggatcgaaatgtccatattttatattgtgtattttattgtatttccgttcttcttcgtcaacatattcgtggccttgattattattacgtttcaagagcaaggcgaagctgagttacaagatggcgaaattgacaaaaatcagaaatcctgcatcgattttactataggagcacgacctctcgaacgctatatgcccaaaaatcggaatacgttcaagtataaagtgtggcgaattgtggtgtcaacgccttttgagtacttcattatgatgttgatcgtattcaataccctattgctgatgatgaagtatcacaatcaaggagacatgtacgaaaagtcgctgaagtacattaacatgggattcaccggaatgtttagtgtagaaacggtgctgaagatcattggattcggtgttaagaacttcttcaaggacccgtggaacatattcgatttaatcaccgttttgggcagtattgtggatgcactttggatggaattcgggtcgaactcaatcaacgtcggcttcctgcgtttatttcgagcggcgcgacttatcaaattacttcgtcaaggatacacgattcgaattcttctatggacatttgtgcaatcctttaaggcacttccctatgtctgtttgctaatagcaatgctatttttcatatacgccattatcggcatgcaggtgttcgggaatatcaaactaggtacggtggaaaattccattactagacacaacaacttccaatcatttattcaaggcgtcatgttgctattcaggtgtgcaactggcgaggcctggcccaacataatgctggcatgtttgaagggcaaggcctgcgacgatgacgccgagaaggcacctggggagtactgcggatccacactggcctacgcctacttcgtatcgtttatattcttctgctccttcctgatgctcaatctgttcgtcgccgtcatcatggataatttcgattatctcaccagggactccagcatattgggtgcccatcacttagacgaatttgtgcgcatatgggcggaatatgatccaaatgcgactggaaaaatacactacacggaaatgtacgacatgctgaagaacatggatccaccgttgggttttggcaacaagtgtcccaaccgactggcatacaagaaactgattagaatgaatatgccattggacgatgaattgagagttcagttcacgacaacgttattcgctttgattcgtgagaatctcagcatcaaaatgagagcgcctgaggagatggaccaggcggacatggaactgcgggagaccatcacgaacatctggccattgcaggcgaagaagatgctaaacctgctggtgccgcccagcgatcagctcaacaagggcaaactgtcagtgggtaaaatctatgcaggtttcctcatcctggagtcctggcgtagcacgcggtttggccaactcgattcgggaatgccgatgctggagctgcaggatgcatcgagacatccgtcgcaggagtcgcttaccggtgccgatgctggccatttacatcctggacattcgtatatgaatggccatcggcgatcgcctagcttgaggcacaatggctctccactggccagatctccgagtcctcgacggcgtggccatcaatacatacatcatgatatcgggttctccgataccgtatctaatgttgtagagatggtcaaggagactcgtcatcctaggcatggcaacagtcatccgcggtatccaagaggttcatggtcagcatcgacaagtccggcccgttcgccttcgccttctcgatatggtggtcatttgtctcgcagtaaacgcactcaactgccttatcccacatatgggacaaccagtctatgtcaaagatcacgatcgccgagtcccgctagacttcaggagatgcgtgaacgagacagacttggttatgggattgatatgggtgtaacgcatgtacagcatagttacccaacactggcctcccgaagagccggaatcggaagacgccttcctccgactcccagtaaaccgtcaacactgcagctcaagccaaccaatatcaatttcccgaagctgaatgccagtcccacacatacacaccactcaacgccccacagtgttcactcgctaccacaccaccgcgacctgctgcgagatccaagggatatgtactatagtagtagagaacgcgagcgggatcgcgaacgccttagggatcgggatcgtgatagggatcgcgatcgcctgcacgagtacgacctgcggtacgagtaccgggatcgggaacgagagttgtacgaacgcgaaagagatcgcgagcgggaggtcgaaagagaaagactggaatatatagcaccgctgtcgtttgaacaagcgctggctatgggccgaacaggtcgtgtactgccatctccagttctaaacggttttaagccaaagagtggtctgaaccctcgacactccgattcggatgaggaggattggtgctagcaaaggctttgattgcgatcgcgtaatcgaaaggatcagatctgggtatagcatcaggccatttgctcctctttgtcagcaccaaacttagatcacaattttgatacgatacgacacagctatcagatacccgaacatctgcaaaaccttccatacctttgtccaccagtacaccaacaccaacaccaacaccaaacccaaacccaaaaccaacgacaacaccaagatcagcacctatatcaaaggtatggcacgaacgtatcgacaccgaaactaggaacaactatatctgatatcaaattggctggagttagcttacaggaattaagcccgaatcgacaaccgcaatcgcaacagaagcaggagcaacaattgcatcaggatggatggctcagatggtaccggc

SEQ ID NO: 1437 - protein, 1848 aa, DROSOPHILA
MGGPKKEENPPGGGPTSLFILTEDNPIRKYTRFIIEWPPFEYAVLLTIIANCVVLALEEHLPGGDKTVLAQKLEKTEAYFLCIFCVEASLKILALGLVLHKHSYLRNIWNIMDFFVVVTGFMTQYPQIGPEVDLRTLRAIRVLRPLKLVSGIPSLQVVLKSIIKAMAPLLQIGLLVLFAIVIFAIIGLEFYSGALHKTCYSLEDPNKLVKEGESETPCNTDNILEKATGSFVCNNTTSMCLEKWEGPNSGITSFDNIGFAMLTVFQCITMEGWTAILYWTNDALGSAFNWIYFVPLIVIGSFFMLNLVLGVLSGEFAKEREKVENRQEFLKLRRQQQLERELNGYVEWICKAEEVILAEERTTEEEKMHIMEARRRNAAKRKKLKSLGKSKSTDTEEEEAEEDYGDDGYLKTRSKPQGSCTGFWRAEKRFRFWIRHTVKTQWFYWFVIVLVFLNTVCVAVEHYGQPSFLTEFLYYAEFIFLGLFMSEMFIKMYALGPRIYFESSFNRFDCVVISGSIFEVIWSEVKGGSFGLSVLRALRLLRIFKVTKYWSSLRNLVISLLNSMRSIISLLFLLFLFILIFALLGMQLFGGQFNLPGGTPETNFNTFPIALLTVFQILTGEDWNEVMYQGIISQGGAQKGMIYSIYFIVLVLFGNYTLLNVFLAIAVDNLANAQELTAAEEEQVEEDKEKQLQELEKEMEALQADGVHVENGDGAVAPSKSKGKKKEEEKKEEEEVTEGPKPMLPYSSMFILSPTNPIRRGAHWVVNLPYFDFFIMVVISMSSIALAAEDPVRENSRRNKILNYFDYAFTGVFTIEMLLKIVDLGVILHPGSYLREFWNIMDAVVVICAAVSFGFDMSGSSAGQNLSTIKSLRVLRVLRPLKTIKRVPKLKAVFDCVVNSLKNVVNILIVYILFQFIFSVIGVQLFNGKFFYCTDESKHTSAECQGSYFKYEEDELLPKQELRVWKPRAFHYDNVAAAMLTLFAVQTGEGWPQVLQHSMAATYEDRGPIQNFRIEMSIFYIVYFIVFPFFFVNIFVALIIITFQEQGEAELQDGEIDKNQKSCIDFTIGARPLERYMPKNRNTFKYKVWRIVVSTPFEYFIMMLIVFNTLLLMMKYHNQGDMYEKSLKYINMGFTGMFSVETVLKIIGFGVKNFFKDPWNIFDLITVLGSIVDALWMEFGSNSINVGFLRLFRAARLIKLLRQGYTIRILLWTFVQSFKALPYVCLLIAMLFFIYAIIGMQVFGNIKLGTVENSITRHNNFQSFIQGVMLLFRCATGEAWPNIMLACLKGKACDDDAEKAPGEYCGSTLAYAYFVSFIFFCSFLMLNLFVAVIMDNFDYLTRDSSILGAHHLDEFVRIWAEYDPNATGKIHYTEMYDMLKNMDPPLGFGNKCPNRLAYKKLIRMNMPLDDELRVQFTTTLFALIRENLSIKMRAPEEMDQADMELRETITNIWPLQAKKMLNLLVPPSDQLNKGKLSVGKIYAGFLILESWRSTRFGQLDSGMPMLELQDASRHPSQESLTGADAGHLHPGHSYMNGHRRSPSLRHNGSPLARSPSPRRRGHQYIHHDIGFSDTVSNVVEMVKETRHPRHGNSHPRYPRGSWSASTSPARSPSPSRYGGHLSRSKRTQLPYPTYGTTSLCQRSRSPSPARLQEMRERDRLGYGIDMGVTHVQHSYPTLASRRAGIGRRLPPTPSKPSTLQLKPTNINFPKLNASPTHTHHSTPHSVHSLPHHRDLLRDPRDMYYSSRERERDRERLRDRDRDRDRDRLHEYDLRYEYRDRERELYERERDREREVERERLEYIAPLSFEQALAMGRTGRVLPSPVLNGFKPKSGLNPRHSDSDEEDWC

SEQ ID NO: 1438 - DNA, 2849 bp, DROSOPHILA
tcattgcgctccgtgctaagcatagccgaagccactagtttctgcaagtcgtgtggcagtagctcgatgttaccaatcacccgaatgcggatgccatgttcgtccagtcgagcagtctcctccagcaggcgggcaaacttctctctggccaaattgaacagaccctccacctcctcgttggaacgcttgaagttctcgatgctgaaggcaaaggtggtcacctcgcggacgccaacgtccaggcaccagcgcaggcagtccgcaagcttctcgaatccccgcgaatgaccctcgatcttatcaatctgctgtgagcgggcgaacctccgattaccgtccatcacgaaggcgacgtggtgcggaatgtagccacaggcgcgcagcgttcgcatcgctatccgctccgtccatgtgtacttgtagtcggagacccacgacatggtctttgaattcagctggattaagattggatgtcagtcaattaaataaataaatatttatttatttttttgcggtgtcttgtgattagaccgctgccaatcgactattacgctatcgatacttagaaccttttatatagaacgcagtgtgaccatatgcgatatttcggtatttagcatagactccaaccgacacgatgaaaatgtggccgttgtgagatataaatgtaataccattaagcagatacacgaaccaacatcgatagaagagtagcccagacatcaaccgtctacgaaaataagcgcagaaactgcagttattcggttttttttggaagtctttcctctggcgtggcttttaattataatataagtctatctgaaactaataaatgtttcataaaagtgctaaaccaattaaaagacgcacaaaaaagaatgcatttttaaatccacctggggtttgaagccccgacacactccctatcgataagctatcgccaaacatcgcaaaactcagcaaccctgtcattttgacagctacgtcaaccttcttttttgatatccggttaacgcaagtggttcgtctttaatttttccctcttaatttttgcgaaaaaaaacccgactttgagcccctaaacttaaaaaatgtgccttcctccagagtgttcagagcgtcgactgaaaatgacaaacaagctgcccggcagctaatttttttttacattttttgttttgtttgttcgcacgcatttgtttttatttgtgaaacacgtggtataaatgtggaaattcccttgctattcccgcagttgctgatcgacaaacaaacccagaatggcacccaggaaggctaaagttcagaaggaggaggttcaggtccagctgggaccccaagttcgcgacggcgagatcgtgttcggagtggctcacatctacgccagcttcaacgacaccttcgtccatgtcactgatctgtccggccgtgagaccatcgctcgtgtcaccggaggcatgaaggtgaaggccgatcgtgatgaggcttcgccctacgccgctatgttggccgctcaggtgagttgtgcgctctccggtccagttggagcccgtctaacggtttcaattccctccaggatgtggctgagaagtgcaagacactgggcattactgccctgcatattaagctgcgtgccaccggcggcaacaagaccaagacccccggacccggcgcccagtccgctctgcgtgctttggcccgttcgtccatgaagattggccgcatcgaggatgtgacgcccatcccatcggactccacccgcaggaagggcggtcgccgtggtcgtcgtctgtagatggcagtatctggaaagcagtagtctatgtttgcggtcgaaatacaatactgcatttgtgtatgcgataagaaagcttttctgttcgtgtgcataggtgcactgtaataaaccaggaaaatacgatgtaaatgactacaagacatttttgtgtgtgcattgggttcggtttggggtctgcaagtgctgcaatatttgatttataaggacattggcgaaatgtttacaaaaattgcacattacaagccgaagagttgccaccctggcgtgcccaacgcggtggtagcccgattgcgccatcaaagtaactatgcgtcgataactatcgcattaccagctgtgttgtttttgccttctttttttcgcatccggcgcacgcaattggttggttttctgctatttctccctttttttgttcaattttactgcaattgacttatttggcggcaaaagcgaaaagttgctgctaaatatgattcagtgatttagcataaaatgaaaaattttgcggacgccgtgaaagtggtggcgaattaatttgtttctcccccatttttttttgtgttgtttttttttttgtagtgatttgagccggcaaataaacatggtgtttttttctcttttagttgctgatcgacgaccagactctgcagaatggctccaagaaaggctaaagttcagaaggaggaggttcaggtccagctgggaccccaagttcgcgacggcgagatcgtgttcggagtggctcacatctacgccagcttcaacgacaccttcgtccatgtcacggatctgtccggccgtgagaccatcgctcgtgtcaccggaggcatgaaggtgaaggccgatcgtgatgaggcttcgccctacgccgctatgttggccgctcaggtgagttgtgcgctctccggtccagttggagcccgtctaacggtttcaattccctccaggatgtggctgagaagtgcaagacactgggcatcactgccctgcatattaagctgcgtgccaccggcggcaacaagaccaagacccccggacccggcgcccagtc

SEQ ID NO: 1439 - DNA, 556 bp, DROSOPHILA
gatatccggttaacgcaagtgttgctgatcgacaaacaaacccagaatggcacccaggaaggctaaagttcagaaggaggaggttcaggtccagctgggaccccaagttcgcgacggcgagatcgtgttcggagtggctcacatctacgccagcttcaacgacaccttcgtccatgtcactgatctgtccggccgtgagaccatcgctcgtgtcaccggaggcatgaaggtgaaggccgatcgtgatgaggcttcgccctacgccgctatgttggccgctcaggatgtggctgagaagtgcaagacactgggcattactgccctgcatattaagctgcgtgccaccggcggcaacaagaccaagacccccggacccggcgcccagtccgctctgcgtgctttggcccgttcgtccatgaagattggccgcatcgaggatgtgacgcccatcccatcggactccacccgcaggaagggcggtcgccgtggtcgtcgtctgtagatggcagtatctggaaagcagtagtctatgtttgcggtcgaaatacaatactgc

SEQ ID NO: 1440 - protein, 151 aa, DROSOPHILA
MAPRKAKVQKEEVQVQLGPQVRDGEIVFGVAHIYASFNDTFVHVTDLSGRETIARVTGGMKVKADRDEASPYAAMLAAQDVAEKCKTLGITALHIKLRATGGNKTKTPGPGAQSALRALARSSMKIGRIEDVTPIPSDSTRRKGGRRGRRL

SEQ ID NO: 1441 - DNA, 5560 bp, DROSOPHILA
caattttgggcaccaggcggattttcctcctggccggcgcttatcgcctggccataaattcatgctgtaggtgtctcgatcttttcggtttctttcttttttggctttttagcgttttggcggaggtcctcgcctcgtggacacgcaatgaagctgtttcttcgtgcgccggaatttccccgcggcatgcaaaatgcaattaacggcacttgcagtgcgccggaaattgacaattcaatataatgggttccttgttttcgctaattggtggtgcttatgcacgcataaattaagtaaacacaatacgaagtcgtatttaattggtcaaaacaaactagagctgacaaaaaagctggcgtccattttgttaacaggatcaacactcgattaaattaggaaaagtaatcggtacttaacggtcacgagatctatcgatcagaacttcccctccagcaaatcataaatgtactaatagcgtatattataaatataaacgaagttattatctaactaaaaattcatcgcattgatcagccttcgcaatcttcgtcacaattccggccaatgcccatttaaaaaacgaatcaaactaatggtaaaaaattatgaaaatgtaaataaaatttaaaacattattatattcatacaatttcttagcaatttcgttataaagttaacgtggagcaaattcaaagcttagctatttttccgcccattcataatcgataatctatcgataaatacaatcgaaccagtaagtgaatctcaactagttccttttcaatccagtgaagaaacaagaaattttaagaacaaaaaaaactaccagatctcggtgtcgagttaattgaaaactgaaagttataatgtgcagaatcggcgaatatatactgcctacaaaacgcagaaaaaaggttgtcttttaaagataagaacaacatcggagctatcgatacttaactggagttttcacatcgataacagatgaaccaactgggcaccgctgagtgacgtgtaagcgcagccagaaaaccatttcaattgttttacccacaatttaaccgaaagttgcaagacaatgggttcgttccgccgcgagaaagatgatgaggaggacggtaagtagcaagctagcacctggagccaagttgtccgccgaccagcgaagccaatcgaagacaacccagttgcttgaaggtgctccgctggcacagacacacactcacacacccactaacccgacaaagtcgagaaaaatcgaggtttccctaaattgactgagaacatgaactatttttcccttacctcgcacaaaaaacatcgcggccatccgtcagcaggaccgagcaatgcgtaccagaacctggaaaaaacctcggtgcttcaggagacgcgcaccttcaatgagacgccggtgaacccaaggaagtgcatccacatcctgaccaaaatcctgtacctgattaatcagggtgagcagcttgtggcccgcgaggccaccgactgcttttttgcgatgacgaagctcttccaatctaaggacgtggtgctgcgtcgtatggtatacctgggcatcaaggagctgagctccattgccgaggacgtcatcatcgtgactagctcgctaacgaaggatatgaccggcaaggaagacctgtacagggccgccgcaatccgggccttgtgcagcatcacggataacaccatgttgcaggccgtggagcgctacatgaagcagtgcattgttgacaaaaacgcggcagtttcttgtgctgcattggtcagttctttgagattggccaacactgccggcgacgtggtcaagaggtgggcaaacgaggcccaggaggctttgaacagcgacaacattatggtacagtaccacgcgttgggtctgctctaccatatccgcaagtcggatcggctggctgtctccaagttggtcaacaagctgaccagaggatctctaaagagtccctatgccgtttgcatgctggtaagtgaagtctgaacccaaacttttcttaatgaaatggatatgcacttattccctttaaagtgacatctgactaatttcgttttacatcccccagatacgcattgcctgtaagctgatcgaggaggaggacattccctctgaggagctttccgattcacccttgtttacgttcatcgagtcctgtctgcgccacaagagcgagatggtcatctacgaggcggcccacgccattgtcaacctcaagaacaccaatccgcgaatgctatcgccggcgttctccatcctccagcttttctgcagctcgccgaaggcaacgttgcgctttgcggctgtgcgcacgcttaacaaggtggcgatgacgcacccggctgcggtgaccacctgtaacttggacctggaaggtctcatcacggactccaatcgatcggtggccactctggccatcactacgctgctaaagaccggcgctgaatcctcggtagagcgtctgatgaagcagatctccacgtttgtggcggagatttccgatgaattcaaggtggtggtcgtgcaggccatttgcgctctgtgcaccaaatatccgcgcaagcacacagtgctgatgaacttcctcagcggtatgctgcgcgaggagggtggccttgaatacaagacctccatagttgacaccatcatcacgatcatcgaggagaatgcggacgccaaggagtccggtttgtcgcatctgtgcgagttcatcgaggattgtgaacacgtttcactggcggtgaggattcttcacctgctgggcaaggagggaccctttgcggccacaccctccaagtatatacgctttatctacaaccgcgtcatcttggagagccctattgtgcgagcagccgcggtcacggccatggcccagtttggagcatcttgcccagccttgttaagcaatatcctcgttctgctgggtcgttgccagatggacccggacgacgaggtgcgtgaccgtgccacctactaccttagcattcttaactcggaaaggccagagctgtacaagaactacatcatcgaaagggagaactgttctctggctctgctggagaagtcgctggtcgaacatctgaatggtgacgtggacacacgcttcgatatttccattgtgcccaaggcggccatagttaagccagttattgccaacgacgtaatgctagttaccagcagtgctccacggccgccgaagatcacgcgcgaggaggagagtgctgcacgtctggcacagctgccgggcatccaggtgctgggccccatccatcgcagcacagctcccatccagcttactgaaagtgaaacggagtacacggtgcagtgcatcaaacacatattcggccagcacgtggtcttccagttcgattgcttgaatacgctgtccgaccaaatccttgaaaatgtgcgggtggaactcacgctgccggaaggattcacaaccagggcggtcattccatgtcccaagctaccctacaacgatctgcaaaccacttttgtcatcgtagaattcccgcccgacgccgccaattccataggtaagtttataaataacataaattttgtattaaaatcatacaacttttttcaaaacgaactatttcctcatttcagccacctttggtgccactttacgatttgtggtcaaggactgcgaccccaacaccggcgagccggagtcagaggagggctatgacgacgagtacatgctagaggatttggagctgacggttgccgatcagatacagaaaaccagaaagaacaatttccaagtgtcctgggatgcggctgacagcgaaggtgccacagaaagataaatagggtctattcaatgattagtaatactctatatttgcagaatggctacaagccgaggatacctttgtgctgtcggcagtgaccaccttgcaggatgccgtcaacactatagtcaagatcctgggcttgggcgctgcaaacctctctgagaatgtgcccgagggtacgcacctgcatacgttgctctgttcaggtaggcatccttcgcttttagttctgagatcagtagtacagtttttccccctttacaggaaccttcagaggcggcgccgagattcttgtgcgggccaagctggcgctttcagaaggcgtcacgctcaatctgacggtgcgcagcacggaccaggacgtggcggagctgataacggcggccattggataagacagcgagccatgcaggaacctcctttggttcctgcgtgctgtgaacgtaatctgaactccctacgaaactacgaaacagaaagttacgcctaatcaaaatataatttgtacctttaagcgactgtctctgtaataatcttagagccctgtccacaatccggcatgtgcaacattgagtattgctactggccatttccgaaaagtttgtgtggcgatgcagccttcggtgtgcatcgcatatgtttattatccccatttagcctgtgcatttagcttaagtatggaaacaaaatattaaaaatacatgtatatgcaatgcaacccgacctgaaggcgtttatttggcaggtgcttttaaagtaggacattgaaatgattttaatgattgcaagctcgtggaaaccgcacctccaaagagaaattgcttcataactagaacttactttattttatatggtattttatttaattataaataacttatagttgcagtagcctagagtacttcttgttttcctatttttacaaatttcttttctcgtttgaatcgtttatgttcgctgcgtcctccacattcgtcttaaattacaaattaacctttctcacatgaattcataatttcttgtgcttttgttcgcaatcgattccttattatacattctccgattccgactatgctgaatatttttgtgtaaaatgtatcgacgatgcagttccatcaatcgttcgaaacgctcttccgtattaaatatttaaaatgtaaacgcacacaagtataaaaataatatagattcgtaataacaaataacacactcatgcagttcgcagcaatttcacaatgataatttcatttcgttacaactcctatactcatctccaaatgtgttgaatatgtcattagatatatgtttatatagttacgagtggttggttgtctgttgtgtttcatgcggatttctcgccaggcgagtggtattcgattggagatgtgcaccatcatcccgcctggcctgctcttcagatttatccattttcttttataatacaaactagagtgcttctcagctttcattccgtcttcttgttgcgacgttgtcctcttcgatcgcttcacatgcagacgctcacacacaaattacaattatattacaattaacatatttcgtttacacttttcgttaaggtttgccttgcttatttgtttcaggagcacgccgcgagttggccaggaagcccggagctcaaattcacaacactgctccggcactttagtggttcgcattctggctacggggcttagctgccgggatggggactggtgggtctctggat

SEQ ID NO: 1442 - DNA, 3052 bp, DROSOPHILA
ccgctgagtgacgtgtaagcgcagccagaaaaccatttcaattgttttacccacaatttaaccgaaagttgcaagacaatgggttcgttccgccgcgagaaagatgatgaggaggacgcaggaccgagcaatgcgtaccagaacctggaaaaaacctcggtgcttcaggagacgcgcaccttcaatgagacgccggtgaacccaaggaagtgcatccacatcctgaccaaaatcctgtacctgattaatcagggtgagcagcttgtggcccgcgaggccaccgactgcttttttgcgatgacgaagctcttccaatctaaggacgtggtgctgcgtcgtatggtatacctgggcatcaaggagctgagctccattgccgaggacgtcatcatcgtgactagctcgctaacgaaggatatgaccggcaaggaagacctgtacagggccgccgcaatccgggccttgtgcagcatcacggataacaccatgttgcaggccgtggagcgctacatgaagcagtgcattgttgacaaaaacgcggcagtttcttgtgctgcattggtcagttctttgagattggccaacactgccggcgacgtggtcaagaggtgggcaaacgaggcccaggaggctttgaacagcgacaacattatggtacagtaccacgcgttgggtctgctctaccatatccgcaagtcggatcggctggctgtctccaagttggtcaacaagctgaccagaggatctctaaagagtccctatgccgtttgcatgctgatacgcattgcctgtaagctgatcgaggaggaggacattccctctgaggagctttccgattcacccttgtttacgttcatcgagtcctgtctgcgccacaagagcgagatggtcatctacgaggcggcccacgccattgtcaacctcaagaacaccaatccgcgaatgctatcgccggcgttctccatcctccagcttttctgcagctcgccgaaggcaacgttgcgctttgcggctgtgcgcacgcttaacaaggtggcgatgacgcacccggctgcggtgaccacctgtaacttggacctggaaggtctcatcacggactccaatcgatcggtggccactctggccatcactacgctgctaaagaccggcgctgaatcctcggtagagcgtctgatgaagcagatctccacgtttgtggcggagatttccgatgaattcaaggtggtggtcgtgcaggccatttgcgctctgtgcaccaaatatccgcgcaagcacacagtgctgatgaacttcctcagcggtatgctgcgcgaggagggtggccttgaatacaagacctccatagttgacaccatcatcacgatcatcgaggagaatgcggacgccaaggagtccggtttgtcgcatctgtgcgagttcatcgaggattgtgaacacgtttcactggcggtgaggattcttcacctgctgggcaaggagggaccctttgcggccacaccctccaagtatatacgctttatctacaaccgcgtcatcttggagagccctattgtgcgagcagccgcggtcacggccatggcccagtttggagcatcttgcccagccttgttaagcaatatcctcgttctgctgggtcgttgccagatggacccggacgacgaggtgcgtgaccgtgccacctactaccttagcattcttaactcggaaaggccagagctgtacaagaactacatcatcgaaagggagaactgttctctggctctgctggagaagtcgctggtcgaacatctgaatggtgacgtggacacacgcttcgatatttccattgtgcccaaggcggccatagttaagccagttattgccaacgacgtaatgctagttaccagcagtgctccacggccgccgaagatcacgcgcgaggaggagagtgctgcacgtctggcacagctgccgggcatccaggtgctgggccccatccatcgcagcacagctcccatccagcttactgaaagtgaaacggagtacacggtgcagtgcatcaaacacatattcggccagcacgtggtcttccagttcgattgcttgaatacgctgtccgaccaaatccttgaaaatgtgcgggtggaactcacgctgccggaaggattcacaaccagggcggtcattccatgtcccaagctaccctacaacgatctgcaaaccacttttgtcatcgtagaattcccgcccgacgccgccaattccatagccacctttggtgccactttacgatttgtggtcaaggactgcgaccccaacaccggcgagccggagtcagaggagggctatgacgacgagtacatgctagaggatttggagctgacggttgccgatcagatacagaaaaccagaaagaacaatttccaagtgtcctgggatgcggctgacagcgaagaatggctacaagccgaggatacctttgtgctgtcggcagtgaccaccttgcaggatgccgtcaacactatagtcaagatcctgggcttgggcgctgcaaacctctctgagaatgtgcccgagggtacgcacctgcatacgttgctctgttcaggaaccttcagaggcggcgccgagattcttgtgcgggccaagctggcgctttcagaaggcgtcacgctcaatctgacggtgcgcagcacggaccaggacgtggcggagctgataacggcggccattggataagacagcgagccatgcaggaacctcctttggttcctgcgtgctgtgaacgtaatctgaactccctacgaaactacgaaacagaaagttacgcctaatcaaaatataatttgtacctttaagcgactgtctctgtaataatcttagagccctgtccacaatccggcatgtgcaacattgagtattgctactggccatttccgaaaagtttgtgtggcgatgcagccttcggtgtgcatcgcatatgtttattatccccatttagcctgtgcatttagcttaagtatggaaacaaaatattaaaaatacatgtatatgcaatgcaacccgacctgaa

SEQ ID NO: 1443 - protein, 879 aa, DROSOPHILA
MGSFRREKDDEEDAGPSNAYQNLEKTSVLQETRTFNETPVNPRKCIHILTKILYLINQGEQLVAREATDCFFAMTKLFQSKDVVLRRMVYLGIKELSSIAEDVIIVTSSLTKDMTGKEDLYRAAAIRALCSITDNTMLQAVERYMKQCIVDKNAAVSCAALVSSLRLANTAGDVVKRWANEAQEALNSDNIMVQYHALGLLYHIRKSDRLAVSKLVNKLTRGSLKSPYAVCMLIRIACKLIEEEDIPSEELSDSPLFTFIESCLRHKSEMVIYEAAHAIVNLKNTNPRMLSPAFSILQLFCSSPKATLRFAAVRTLNKVAMTHPAAVTTCNLDLEGLITDSNRSVATLAITTLLKTGAESSVERLMKQISTFVAEISDEFKVVVVQAICALCTKYPRKHTVLMNFLSGMLREEGGLEYKTSIVDTIITIIEENADAKESGLSHLCEFIEDCEHVSLAVRILHLLGKEGPFAATPSKYIRFIYNRVILESPIVRAAAVTAMAQFGASCPALLSNILVLLGRCQMDPDDEVRDRATYYLSILNSERPELYKNYIIERENCSLALLEKSLVEHLNGDVDTRFDISIVPKAAIVKPVIANDVMLVTSSAPRPPKITREEESAARLAQLPGIQVLGPIHRSTAPIQLTESETEYTVQCIKHIFGQHVVFQFDCLNTLSDQILENVRVELTLPEGFTTRAVIPCPKLPYNDLQTTFVIVEFPPDAANSIATFGATLRFVVKDCDPNTGEPESEEGYDDEYMLEDLELTVADQIQKTRKNNFQVSWDAADSEEWLQAEDTFVLSAVTTLQDAVNTIVKILGLGAANLSENVPEGTHLHTLLCSGTFRGGAEILVRAKLALSEGVTLNLTVRSTDQDVAELITAAIG

SEQ ID NO: 1444 - DNA, 9750 bp, DROSOPHILA
cctattgtggtcgaaaccggttgccagttaaaagcgctaagtaaacggcgaccaaagaggagtttaagccccggttttatggccattgtattgtccgtcgcggttccttggcactcttttgccctcgagggaaaaccagttttcaatcggtttgttttcttggctcttgatttgcccgcactaaatactaactacgatattcccccacttctcggtcacgcttagccagaacatccattccgccccccatgtttccagtactcttacaattgtcgtatgcaaatcactcggtttggctgcctttcctccatgtctaatgtcgatttcgtggcttttcgacgacttccgctcggcttgtttatgggccacaatttgttgacttatttatttgaaatctggcggagttgcacaacaatttcccaccgagaagtcgtttaagtgcagacaccaccgcggagaagtcttgccacagttgactgcccccgttcccccgcccactgcactgaaacaaaataacgttaatctacaaatcatacattctaatttttacaatattgcaacgttatttagagttgaaatatcggaaagcatttgctgaaccacaaatcaatatgattatgaataaaataatcattgaaattgagatttagagagcaaatgcaattaatggtcttagtttttgtcagtgtgcctaatttacattggcaaccctttgggccaactggctgagtgactcgacttaagttggcctgaaccgaactgagcgcctgactcactgactgactaactgactgaatgactgactgactggatgactgagtggctgactggctgagcgattgcagcctgtctttatgctggttcgaagcaaatgttgcacgactctcgcttggctttcgatgtggttgccgttgtctcgccttaattcggtggtcttgtggtgcggtggtctggtgtttcggcgtgtctctcttgccagtcagtcggtggtggaacgcagacccagtcccaagtcgcaaagtctccagccgaaagctgcaagtcgcctcagtgcattcataattggatttgccatattgcgcgcttcatattccgtgtttcgtattccgtatcgatcggacacctcctacgagctgcaaagataatagtccagaatggagagtgccctgccggtggccgagtttcagcagataaagctgcgtccggtgccaaaggtcaaacgccgagcccctcagccgccagtgagccttcgcctgaagcataaaaatgtgcgaaaagtagctttaagtgtcgcaaaaccccattttaccagacctgcaaagcattagtgaactttcgctctcatcggaaaagcgggaaactgaaaagtgaactgtgcaaaagtgaaaacaatggcttttagtcgaagcaaaagaagagcagaaacgtgggaagatttccctgcgattaggaagctaactaatctgatccgcacttgagatcttcggtggggaaaagaaactctataggcttctgaagcatttaattacattttaagtatatattttataagataatgtaatcctatttaatatttcattggaaaacttattagaaattcttctttcctgcttttccctaaaaatatttatattgtcctcttttcagacttctgccaccacaaagacaaccacgctcaccacccccgccaaactgtatggcaaggatctgagtgagtacgatgatgtggatgtggagagcctgctggcccagctctcccccgaggagataaccatactggccaaagaagtggatcccgatgtaagtaccctttttgtattggcgttgtatcctgataatttgaacattcctgtttctgcaggacaacttcctgccgccagaccagcgcaatagctatgagtgcaccaaggaagccaccgggcctctcaatcgcaagcagctgatcgagcacatcaataagcaggccatcgagaccccggatcagccggagttcgagccgttcgttcagggcaaggttcgtggaaagaagtgggtcccaccgccaagggatgcccgcgacatcgaggccgaagaacaaatcgccattgacatgggcgaggagtacgaacacgcccttaacgatgccacgcaggaggagatcatcgatctggccgccatcctcggcttccactcgatgatgaatcaggaccagtaccacgcctccttgctcaacaagggtcagcccgtgggcctgggatgggatggcattacgaaatccactcagcagaagctcttccctatggatccgcccaacaacacagatgtggaggaatccatcaagcgggtcaaggacgatgactccaagctgattgacctcaacttgaacaacattaaggttttgccctgaatgtttaatatgttcctgtatcctcattaacttattttcccttccctgtagaacatctcggacgagaaactcgagcaactgtttgccgcactgcctcagaacgaacatttggaagtcctctcgctaacaaatgtgggcctcaccgacaagacagccctcctgttagccgcggccatagagaagagcaaaaccctgagagtattaaatgtcgagaccaactttatcagtccgcccgtgattgttaagttggtgcaagccctgctcaagtgccacaccatcgaggagtttagggcctccaatcaggtgagtgggtccttcgattcatcgaaagtatagtagttgcaacatgatcttactttttaatttatcttcaccagcggtctgcggttctgggcaacaagatcgagatggaaatcaccgacctggtggagaagaactcgtcgctgctgcgccttggcttgcacctggagttcaacgacgcccgccaccgagtggccgctcacctgcagcgcaacatcgacagaagtaagttgaccctagggattgacagatgacccgggcggttactttcactcccggcgatctgcaggcgatcagcgttggtttcgcatatagttccactactgctcccttcgataggattaggtatatttcttattgactgagttgcctcactcgcgcgtttaggtgaattgcaacaaggtatgttagccagcggaatcaccaacatcgctttgccatcatccagcaatcaatcgtcactccatcacgaccattcagactcaaaggcggccaaggatatttcacccactaggttgaagagcctggctgccttcgagcagttcatcaaggcgcgcacctggaccgatccttcagatactgtaacccataacttgccacctgcagggcgtctagtgcgcaatctacaggcggaggcatctgcatccacatccggaagtggagccgagaagaagatttaatgagcgaccccacttggtaaccgagctctacgttctgttgttgcgtcttcccagccccactttagtctatcttattatctatttttctattgtgtctggtaaccaggtaatccgttcttggccttcattagcctcatcgtcactccagatctccagtcttaaccccatcgtcttacattctcatatcgtatcaccagccttcgttgcgttatcgttcacgtttcgttatcaagttatcgttcgtttcacctgtcgttatcgttctgggttaggggcacttcgtaagatattttaaaatctgattaagatggttgtcataggtaaattaatagcactgaagaattaaaagaatttctcatttaaaggcctgtcatactttaaaacctcctctatttagtgctaatattttaatataaatacatatttaattgtaagagggttcagtacgtatatcattcttccatatccacccgatgctaacccatgtgttacccctatagattagagccgggatctcgaaaggttgagatcgatccccctatgtaatattccgtgccaacccttgtttctctctcgtctccaaactcttgtaattaccatagattgtaaagtgacttccgccaagaagaacattaaccaattatccatttgtctgttgtaaatttgcaacactcctctcaaactcgaaacacccaaaatcgacacttcgacagtcttccgcgttcagaaactaaagcccaatctacccaagttgatcctgccgggcaacatggagattgagcgggatctggtcgcctataaccgatcggccacgccttctccgtcgccatctccgcagcctccagtggattatgaagtggaagaggacccggataacatggttatccggggtggcggcgatgccttcgatccggatgtcgatcccgacaacatggtggtgccgggcagtcgctccgtgacaccgaactacgacgatgagggtgtctatcaagcgcacacgtgagtgagaagtcgagcagccactgcagccgcaccgtcggagccactgaatgccacagaacacgactgaaaaccacagaaatccactgaatccacagctaccacaagttcgagcccatgtacagacagtcattcgatccactagcgcctttcccttttctgactcattggttatgtaatcctcgatgttgtcgttgtcgttgcccgaaaagtacactgaaacacctggactctggatgcagtccatcgatcttgctgaccaagaatttgtacataccccaaaatgaaaaccgcgctttaaaaagcccagcagaatagccatcggtattcattccttaacaaaatagcttatgaactatagcgaaagtattcttacatttattttccttttcgtttatgagtcttagcttcagattaaatgtaaaattatgtaaacgttaagcacaatgtgagctattttgtttagaaaaataccccatcgatggtacattttggtgatacttttgtactgtgcagaaaccggaaactgattccagcacagcccacttgtttatatctgtttccatgtcgtcgttgtcagccgctttatccattcgcagttgatccgtgtaaataatcccgtcacgatcctctctcattcagatcagatgcgtgctattaacccacacccgtgcacatccacatacacactctcatcgcaacactgtctgttttgttactatgtatctttctatatcccaaaaaacagacgaacccagagatatcagccaaagacgattcagaattcagttctcgagacagtccagaaacattattattacttctctttccttttgtgactcgtctatatcaccttttgcttatgtgttctgttctctctccctttttctgtttctcgttttcagtaagaaaagatcttgagttgcgactgcagttcagatttttcaataatctgcatagaaagtcgacaagaattcaataagcagaccagaaatcaagcaactaaaccatttttaaagcgttttgtaatctaaacccaaagaaccgaagaaaaacaagcacataacaacgaaagaacgtgtataatataatatatatatataacaagaagaaggaagcaggagcacaagtttaagctaaagataaagcagcccacgagcttgccaaaaaatctatatctatatactctagagactttaactaagcaaagcaaactgaaaccaaagaaacgaagtgaaatatcaaactaaaaacatataccacatatatcgataaagatcgcagatcgagcagactcgtgatccatggatatagcctaatacccatgtgccacgagtcatgttttaggtcgaggcctcttctaaaacccagcagaaaccgtttaggcgtcacgtgtataattttctctaacgcttaacacaggtatctatgaacacggattgtcctctcacgacttctgctaactcgcaagaattgccaaataaccaagccccaagtagcaaccagcattctgctatatatattgcctcgatatatatggtctataactagcttcagcagtttttcgattagagtgggacaccacactgcacttggctaaacaaagatctttttatactcttgcagacaataatcagaaaggtccagaaggtccgtgtatctgaaagtttataaaacttaggaaattatataaaaaaaagctgacatatcttgttagatcttccaacacataattataatttcaaaattacaaaaaaaaaaaaatatgagttacattgtatctgcaagagtatttatagcttcggttcttcgaagctggactttttcttttgattgcgcacatacccctagtcgatcagtcataaacactagcatccgtttatgttattgcctcattgtgtaaatgatttgttaattgtataagtttaaccatcctctgcatgtcttgcatgtcatcccctagccaatccatttgcatgttttgtgtaatcgaatcagcacactctccacacttcagacaacttttgcagtgggctaaattggcggctctaatgaagttctcttcgtataggaattaaactgcgatgtatgatctaagtgagtccccagatccgagtcaaagtaaagcgatagtagcagaaacccataacaaacctagatttgagacacttttatgattcagtaagaaccgccaactaacagcagaaaataaagcagcaccaccgacaagaagagccatgaaaaactacaaaaatatgaaacacgatgcagaatatctcgaacagacgaaaagttggtacccatctgtctaagtaattgttgtttgatctgcagccaaatgaaataccaactaatcccgattaataaccccgaaagcttccagctaattgaaagttaaaagttagtcttaaggacctctgcccgaataaagcccagaaaacttgggccaacttgaatgttgtacctgcaacttgattgactgtttgacgttcgaaactaacccaaaactaaatcgttgttgaatccttctctatattttatcactctttgttgccaccacttgactaatgccaatttatttgtttcttctctttcgtcccgcccacgcacacacacacacacactctcgttatcctgtatctgtgtttccagtacgtgtgaaacgcctgaaccagcgtaaataaaaagacaaatacgaaatatatagcagcaaccaaccaacaacaacatgccaccacccaagaacaacaatcaagcagaaagccatctatatgtgtgcgtgtttctttgtccgactcttgatttgataattaccaattaacaagcaaaacccagcaagaaaatcaaaccaaaccaacaacaccaccagcaaaccagaacaacagcaacatgagcaaccacggcaaccagaacaacagatctatgtctatgtccaaaactcccccaccaaccgacctctgtactctgctccccgacaaccaatccaaccaaccagctgtgaactaacaccgaagaatgatgtgcgacatgaagtacgtaaagtatcttatgggtaatagatgtaattgtagatagaagtagtatggatttcacaatttaaatgctatgtaatatatttacttttgttcaatttgaattctgttatattaagttttgtgcgatcttaaactatttcctactccttggagagtattgattcgatattatatttagaaaatgatagtgaagcatcagtagatatgccactgttaaagtgacatatacatatgatttcaccacatcaagtgaagcatcataagttagcaccttgaatcgcctggtgaccccatcagcaaaatagcgtaaattttaacgctccaagccgagatcggaacgaaaatataccctaaataggctggtcaatatttacggaagaggaaatctgattagcaactatgtatgtgattaggttagccttaagccaacaagggcaactttttttctgtggacactgtattataactatgcaactgttgtgcgtcatgcttcgttttgagagaacagtctttgtaaaggaaaatttctaatccgatttttcgaatattttccagttggacgtcagcgtcgcatgggccatctgaccaggaactacaccgttggcgtctggcagtaggattcatccgactgggacttgggagtctacacattttacaccgaaagaaatcaatagcctatcaatagtgttgtcacatgcttgttgttgctctcacgcagagaattgtttcatattgttttgttcagtgtttgttgcgttcttcagattgatgatttcggttcgagttgtgtttgtgtttggatcaccacctaagcataatcatttgtttgttacgagttaggcgaatgttcattgtcacacacgcagatccaggattaactttctatctggcagctctaagtagttatttccttaagcaaatcttcacatttacgctgcagctatacacacgtttattttattttattttatttacctaccattctgtcccttgattatttgtagcccctagacggggcgatatttcacaatttttagttttagtcgtgtttatatccacacatgcacacatgatacaaacacatacacataacatacataatacttacacactatatatatatgatacatatatagccatggtctctgaaaacaatttactgctattgaattatgaaatgcttaaacataaatttaacttatggttaaacacacaaaacaaatgaaaaacatacaattgtataatgtaatgatatcttactttatatgacataatgcaatgcttttaaaatacaatttttaaaaatcatgtaaaaactttaaaattaaataaaaaaaaaactacaaaaaatattttacgatcgatttgtgtgattgatttgggtgggccttcatttacatagacaataaagactagtttttataattattcatttcaattgcttaaactacagtatagatttgctgttgaaatgctcgaatggcgaacttttcatacgcaatacgctacattggctaaaaatagtcagacttcctttcctccgtacaatctttgttagctttataagataggaagggattatacagtagcgactagataatagatcagccatcaaaaaaccaccttgctgcactgtatctcaacactttcgattattaggcgatctttcaaccccaagatcttaccaaaacacaactgggtgtagatgggtaactgtgaagatcaatacttaagctgtgaataagtagtgcacacttgattatcgattcgccacagatccacgctagattaatggaaaaatttcgattatcaataggggacacttgtgccagttggctgaccgacaattccaagataaacactgagaaggggcggatgcagggggctttgatcattgtcaagaccgatttgtcgtctttatggaaccgctgtggatccaactgaaagatacaacctgtatcccgcttccacacacgacacgcgtcgagatctgggcaaacagcctccggagataagagcgcgtgacgcagccccttggatcatcaggttccggcggcgtgtcgtccaacccatcagtgcacgcacagatctcgcccagaatgtccacgctggagaacgaggtgaccttccgcaaacaggcggaggttaatcagaatctggaggcgcagttcgacagctcctccacggacttcattctaattaccgaccatcgcacttcgaagagtaagagcctggagcagttggaggcctccaaggagtcgaaaaaccccgagtcctgctgctcccgatatgcccggaatatcttccggaagaagactctcctgaagcgtttgccctttctcacctggct

SEQ ID NO: 1445 - DNA, 2509 bp, DROSOPHILA
acccagtcccaagtcgcaaagtctccagccgaaagctgcaagtcgcctcagtgcattcataattggatttgccatattgcgcgcttcatattccgtgtttcgtattccgtatcgatcggacacctcctacgagctgcaaagataatagtccagaatggagagtgccctgccggtggccgagtttcagcagataaagctgcgtccggtgccaaaggtcaaacgccgagcccctcagccgccagtgagccttcgcctgaagcataaaaatacttctgccaccacaaagacaaccacgctcaccacccccgccaaactgtatggcaaggatctgagtgagtacgatgatgtggatgtggagagcctgctggcccagctctcccccgaggagataaccatactggccaaagaagtggatcccgatgacaacttcctgccgccagaccagcgcaatagctatgagtgcaccaaggaagccaccgggcctctcaatcgcaagcagctgatcgagcacatcaataagcaggccatcgagaccccggatcagccggagttcgagccgttcgttcagggcaaggttcgtggaaagaagtgggtcccaccgccaagggatgcccgcgacatcgaggccgaagaacaaatcgccattgacatgggcgaggagtacgaacacgcccttaacgatgccacgcaggaggagatcatcgatctggccgccatcctcggcttccactcgatgatgaatcaggaccagtaccacgcctccttgctcaacaagggtcagcccgtgggcctgggatgggatggcattacgaaatccactcagcagaagctcttccctatggatccgcccaacaacacagatgtggaggaatccatcaagcgggtcaaggacgatgactccaagctgattgacctcaacttgaacaacattaagaacatctcggacgagaaactcgagcaactgtttgccgcactgcctcagaacgaacatttggaagtcctctcgctaacaaatgtgggcctcaccgacaagacagccctcctgttagccgcggccatagagaagagcaaaaccctgagagtattaaatgtcgagaccaactttatcagtccgcccgtgattgttaagttggtgcaagccctgctcaagtgccacaccatcgaggagtttagggcctccaatcagcggtctgcggttctgggcaacaagatcgagatggaaatcaccgacctggtggagaagaactcgtcgctgctgcgccttggcttgcacctggagttcaacgacgcccgccaccgagtggccgctcacctgcagcgcaacatcgacagaatacgtgtgaaacgcctgaaccagcgtaaataaaaagacaaatacgaaatatatagcagcaaccaaccaacaacaacatgccaccacccaagaacaacaatcaagcagaaagccatctatatgtgtgcgtgtttctttgtccgactcttgatttgataattaccaattaacaagcaaaacccagcaagaaaatcaaaccaaaccaacaacaccaccagcaaaccagaacaacagcaacatgagcaaccacggcaaccagaacaacagatctatgtctatgtccaaaactcccccaccaaccgacctctgtactctgctccccgacaaccaatccaaccaaccagctgtgaactaacaccgaagaatgatgtgcgacatgaattggacgtcagcgtcgcatgggccatctgaccaggaactacaccgttggcgtctggcagtaggattcatccgactgggacttgggagtctacacattttacaccgaaagaaatcaatagcctatcaatagtgttgtcacatgcttgttgttgctctcacgcagagaattgtttcatattgttttgttcagtgtttgttgcgttcttcagattgatgatttcggttcgagttgtgtttgtgtttggatcaccacctaagcataatcatttgtttgttacgagttaggcgaatgttcattgtcacacacgcagatccaggattaactttctatctggcagctctaagtagttatttccttaagcaaatcttcacatttacgctgcagctatacacacgtttattttattttattttatttacctaccattctgtcccttgattatttgtagcccctagacggggcgatatttcacaatttttagttttagtcgtgtttatatccacacatgcacacatgatacaaacacatacacataacatacataatacttacacactatatatatatgatacatatatagccatggtctctgaaaacaatttactgctattgaattatgaaatgcttaaacataaatttaacttatggttaaacacacaaaacaaatgaaaaacatacaattgtataatgtaatgatatcttactttatatgacataatgcaatgcttttaaaatacaatttttaaaaatcatgtaaaaactttaaaattaaataaaaaaaaaactacaaaaaa

SEQ ID NO: 1446 - protein, 403 aa, DROSOPHILA
MESALPVAEFQQIKLRPVPKVKRRAPQPPVSLRLKHKNTSATTKTTTLTTPAKLYGKDLSEYDDVDVESLLAQLSPEEITILAKEVDPDDNFLPPDQRNSYECTKEATGPLNRKQLIEHINKQAIETPDQPEFEPFVQGKVRGKKWVPPPRDARDIEAEEQIAIDMGEEYEHALNDATQEEIIDLAAILGFHSMMNQDQYHASLLNKGQPVGLGWDGITKSTQQKLFPMDPPNNTDVEESIKRVKDDDSKLIDLNLNNIKNISDEKLEQLFAALPQNEHLEVLSLTNVGLTDKTALLLAAAIEKSKTLRVLNVETNFISPPVIVKLVQALLKCHTIEEFRASNQRSAVLGNKIEMEITDLVEKNSSLLRLGLHLEFNDARHRVAAHLQRNIDRIRVKRLNQRK

SEQ ID NO: 1447 - DNA, 16859 bp, DROSOPHILA
tcgaaacatagtaactgccagcagtggattgaagaatttccaataatagcgtgcaatcccttgacgaattgctgtcacccaaaagtcagggtattgcacaaagttaagctgcttattcgcatattaaaaatggtttatttatgttccgttcttcgtgggttaacaagagccccacaaggtaatcgatttatgttctgctatttacactttttgatttatccccaccaccaccaacctcctccccgaaaaaaaacccactttctcgaagccttttgtgtaatgcgatgcggggagaaaaagtttgccaaaacatttgacaaatctgcatgtttgtaaatggatggccatggttgtgagtaagtgggtggtgcgtgagtgggtggtggttgaatgggtatgtgggtggtgcgtgtgcatgtggatgtgcgtgcgtgcgtgcaaggaagaaacttggtcaggtgttttcccttcaccttactttttccgctcagaattccttcaccagcggtgattagttgaaagggcgacctttaagaacattaccttaactcagctctatttataggcctaccaaaacccggccattattccctggccgaagtatcgccaaacttttccaccgacgcttacatttaatttgattgtattttcgcggggaaaagccgtgccaaaacaaggaaacacaaaggaaaatgatgaaaataaaagacggggctaagcaaactttttctggccaacacgcattaaaaactcggcaaattcaataaaattaagcatagtcgtgagtggcattagattgggaattacaatgaaaattactttcgaaagaagttttttttttatttttcgggcacgccgtcccaagtcgctgatataaaaatataatttaataaaactgcaaagtaaataaatagagagcaccacaatttcaatttggttgaaaatatggatatcaaacacttgcattacagctaaaaaataacattaaaaaacattagctagtaccaaaaattttataatatatttaagtctatccattaattgaaatattaaagaaaataaataaatagcggtgcaaataaaacttataggcaatgcgcttgcccataattcctgtatctgagaagaaaaaaaaaagtatcttaatctgaaatagaatacaaacttgccatcctcatcgaccattttatattctcgtacatattaaacttagaacttagattaaatggaaagctaatcgttttgagacgacctttgtgaaggacatgggagtcacctttctaaagtcgcgagactccctcgtttgcatacagttgcttatccttgagcggcacttcccgcagcgtcaggttctcatcctccggccgctcattgtgctctctatgctcctccagcggctggccatcgaatcgcaccttgaactccggcctggagcagctgacaaccgtatccgcagttgccgaggccatttgggtgcgccgcaaatcggtgctgatggcatggagtgtgttgtagcagcgccggaaactgggtcgctcccacggatccgttcgccagcaaagcaggagcagggagtaactggtggacaggattaatcaaagaattaatctctcagtaatgaatgaaaatgatgaaattgaaagcaacgatagacttacagcttctccgtacacatgggcggctgctggagccgtccgccctccttgacatgggccagcacctcgaagttgttcctcgccgcatacggctgctggcccagtgtgaggatctcccagcagagcactccaaaggcccacacatccgactgtgtggtgaacaacccgtcgacgagactctccggcgacatccagcgcaccggtagcaggccctcgccctcctttcggtagtagtcgctcttgtagatgtccctcgccaatccgaagtcaccaatcttcacggtgcgccgacgatccgtgctgcccgtcgattccgtgaccaaacagttccggcaggccaggtcgcgatgcacaaagtgcatgtcctccagataactgcagccgttggccacatcaatgcacatggccaggagctcggagagcgagagtccagcagtgggttgtggctcctagagggcataatctttagtaaacttaaactaataccacctataaaacttaacccacctgggtgctggtagccctggcggcacgtaggtagcttagcaagtcgcccgcttccatgtgctccataatcagagatatggactcggtgtcgaagcagattcccaccaggcacacaatgttctcgtgcttgaagttgctcatcagctgagcctcctgaagcagctcggcaaattcactggctcccttgcgcaggctctggaggatcgaaagcagttcaaaagttgccccttttccggctaccgaagactactcaccttgatggccactcgttgcggctcctcggagtcctccgtcttcaactgaccctcgtatacctcaccaaaagcaccgctgccaagaaatcggagcaacttcagttgactccaattaatttggggcagcagagcgatgtccgcatcactcagcgtggtggagaaggcgcgattcctgacggccatcagctgctgttgcgtctgcaaggtggacaggttgctccagatgctgggacggctctgctgaagcagtttcttggcacgcagtcgtcgcttttgaactgaacggatataatcaatacaatatgttgcctttcaagtcccaagcttctgacctaccttttcgaacgagcaccaatgccagaacgcagctggaaacgatggcagccggcgcaatgatggccaggaccagtgatcctctcttctccggcgaaacgaagggctccgccacccgttcgctctcctcgctgtaaggtccccatccgtgctccaagctccgcgcacgcacacggaagaggagcaacctgctcgaatgcagactcttcacaatgcagctcagctcggtggtgttgcagaagtccagccactgatcctccacgaccaccggttcctcagcccacggcaactgctctagtgatccaccgctattgcggcgccttcttctgcgcctccggcgaatgtcgctcctcgcctggagtgcctccagattgtagagagcaatgggtgctccattaccgcgggccgccgtccaggtgacacggaaaacctcctcagcgatgtgctccaattgtggcttgcccggctgactgggcgcatctcccagagtttcgtacacctctgcagtgccatggtacagtggagctcccggcgtcgccgcatagcccaggagcaggcgacactggtagcgggtgcgtggctgcaatggctccaccaccatcttagtgtgatttccggccacattgcgacgcagttgctcagccgacgatcggcattcgagctgcagcgatcccagtggatccggtgttcccgcccaggtgagactcagagaatagggtcccagttccaggagctgcaactcgggtaattcggcgaaactacgcacatgcagccgctcgctgctgttgctcttggtgggcgtggcatgggcctgaacccacaggctatacccagatcccggcttgattccagtcaatcgatgagtgcccgccgtctccagtcgccgctcatgtgcctcccattcccgccgatcctggacattttcaccatccagttcctgttgccagtggagcgtgtagtagacactttcgctacgcagctgctccggcggcaaccagctgacctccagttccctgggactaagcacacgaacactgaagttccttggaggcgagggcgtggcagaggcggtaaggagctccagtggtgccaacaccaaggtgggtaatgccaacttcttttggtaaaagctgctcaaaattccagacacgcgataacgggtgaagggcagcaggtctgtaagattcaacgattccccagcaccgagcagccactgtcccaggggctccatcccatgatcgtgctcctcggatcccggctccttggccaacgtaagattcagttggtatctaacgccaggaataggcagtggacaatcttcggaggctgtgatcatgggtaagtgtaataggcatctctgctcctcacaatcggtagctttcaaaagggatccgccggatgaaggaaggagcagacagttcttgggcggataggcctgatagttgtgtgcctggagcagacgcacctcttccggctccagttccaccgtatactccagctgctggcgccggcgaccataagcacgaatgctccagtttttcacggcgtaaaggtatcccgaatcctgggccaactgaccagcaatggagtcctcgcccagcaagttcagctgtgcccgcaaagcgctggccgtgcacagctgacgggccacatcgtagacacacagcttgccctggttgtccaccaggttcaaggtctccgatccgggctctaagcttccagcatgcagacggattagcggctgaaccgttgcccactccagctccgagccatcggttagatttctgccccggagcgaaccatttctcggagatccctgctcgtactccaaccagatcagagattgcgcctgtggcagggccaccagatccttcagcaaccgtcccctgggagtgctccacacccgctcgccctgcaggatcttcccttcaaagttgcacagatccaggcgatagattatcgccgcctgcggtgcagtagcatccagttccgcccagtagacgatacgctgtatccagtccacggccagtgccaagacctcggccctcattctggccagctttgctggagctgatcccgggacatgggtgagcagctccacgtgctcgttgacccacagcaatcgctgctctccctcgatccccaccagatgctcaaccggactggccgtgtgcaccagtcgcctgcgattccgtgtgtccaggtccagttcgccaataaactctgcattggcgtagagtacgcgtggcaccgcctgcacctccggtgccacatggagggcatgactagctgcgcccgctgccgctcccgtggcagccacacgtgcctccacctggaagtggtacgtctgatccggttgcaggtgctctacgcgggcctccagggcactctgattgaggcgcaactcctcgtgcagctctgagcccacccaacagctgatgtgatactccagcgcctgcatcggcgcctcctgaccctgttccggcgcatcccagcggagcacagcactcacattagcctcctgcagggcagtggccaagcgctccacgaacacgcgcagacgacgaggctgactaggagccaccggcggggtggtgagctgcacccgagtggtgtctccacttcgccacgcggttcgcggtgtgatgctgatctttagctgcaattgagcctgcggcaattgggtcagccgggcaaatggtgtgctcaaatccaaggtttgtagtctttggccaaactcgaggagcagacgataggagacgctgtgattgccaccggaagtggatggctgccagcgcacatggaagtcgtcccagtggccatcgtccagacgcacgctatccgggagcacggtcattggaataaccccctcatcccgcggaggcaatggttgtgggtccaataattgcaatgcggaggcaggagaggcctggtccggtgtcggtagctccatgacatccagaggagcagccaggcggaccaagcgagctctcctgccactccgctccagccaaagaagtgcgcccaagggccgcagaagctgcaaactgtccgggacagcctgaaagacgcctttaatctgctggatcatctgcagtgaatccccgccagctgtcaggggcgcacgatacaaacgcagtgcaccagagcctttaacaagccagaagagctgatcctgctgggtgtccagcacaaaggaggcgatgcttccctccagcccattaacacgataataagtgaccgcttcatcgggcgtggaaccatgtcgcgacagctgagagctggtggcatagtacaggtggccttgacgcggatccaatgccaggaagttggcctcgaagacgggcaacagttcccgactgcccgaccatggatccatgcgcaccacgcaattcctggccagatccgtccaataaactcttccgccccgccagtcgtaagtcaccgagcccacgtgctgcagtggctccgagattgggcatccccactggctgtgcaccagattgatgcagtgcagtagaccgtcgccagtgacgtagtagcccacgctttcattcaccatggtcatgggtccgggtagtcgctccaactgttcctgctgcacttccaagccctcgcccagctcgttggtatgaatgacgcttccctgccggctggcccatctcaagcgatgtggacccagtggccaggtgcgggcagccaacggttcagtccactcgcccggctctccatccacgtttattgccctaactcgcagttgatagagattatccggctgcaggcgctgcagtccaaagatgggtccacgaatattgcgaatgctaaaggcactttggctggccacatcaagcacttccagttcgtagctccagctgcgtgctgcatccgccgattggtagggattgcgttccggctccttccacgagatctttgccgcctgggctcccagcaaggccttcaagctgtgcggttttcctccagcgctggtcagtggttggctttccggcaccaggagtatcacggcccaacagtcgggcaagttctttagaggccatgaggcactgggactggctgcctgaccctgctgctcaaccaggatcagctgaccagaatcgggcaggagcagggagcgacccaacagggcaaagctttgccaatggctggatgcaggtccatttccagctccattcgaaggcggtggtagcggcagtggatgcttgaacccaccatcgtagcttatctctaggaatttaccctcctgtggaagcattagatggatgatgaagtgttgtggctgcaccaggaaccaaccgggctgcctgatcctcaacaggcgatggatcattcgaccatgcagatcctgacgccacagcgactcctcgttcctccagaaaatccagccattcagggcatccacttccaactgctcaacgggcagatcaaaggactcgcccactttctgcgttgattcacccagcaaatctgtgctgataatctgaaagctggattggtttcgctctggcgactccatagcgaagtacagtcgatgatgcagccagtcgaagctcaatctgcgaggaacccatcttccactggatatgtttcccagatccagcttgagctgctgcgctggactcaccatctggccggattcaaattttaagctgaaaagatttcatcggatttagctaaataatttgtctatatatctaatccttcgcacctgcgcaactctccatggacgttgagcagccacagttgttgctcccgctttgaccaggcgatatcagccaattcctcctgagattgatagatcatggagttctcaccagccggttccagcgattgccacatcacagcccttcgtccgacgagcaggacactttctgtcagatccttggcaggcttttcatttcgagcggagtgagtctgcacaaatcccttggccaccggaccctcaccctgtttgttgatcatgctcagcgccagggtatagttggtgccggcttgtagctgggaaaagatgtagctacctcgtccggccggaaccagctaatatatgtatatgtatatatgtttactacggataattgaaatgattgaatgaccatctctcacctgttcacttgtagcgtttccctccgaggaactcaaacgcaggcggtaaccctcgatgggtccattggtgaagcgaccgggatgccagtggacagccaggtggctgtcgtcgagacccatcagatgctcgatgaccggagccgagatgggcgcgccctcgggtggcgtttggtaggcgggcgtggccggagagtagaggacttcgtctctattctcgccgaaaggcaactcaaatcggaactgaagaaatgtatataaataaataaataatatattaaaaatgaaaatgatgcaaaacaaacataccctgtattgtgtgtagggtatcagggcctccagtatctcgcacacataatactcgtcacagtcgtaatcggctaagttaaaccaggcactggaacccgtctctccggatgcatcctggtcttcctgctcgagatccagctcctcgccgtggtgatccacaaactggtactgaatgttgaagggtctgctggccaggtagtgttccggaaagtgcatcgcccagcggatggtcagtggcgtggactgtccgtccgcccgaggagctcgctccagctgcggctgcgtccgctccaccaggtggctgatggccagtcgctggaggtgccagtagtcccgctgggccatctcgcaggcaccgatgcagggcatgtcgtacgggtagaactggagggacagctgcggacgggccaaaaggggagacaacaacgaaaggggtcaaactggatctgaatatggattgtgtaatgggagctgggtacttagttctgggtgggatgattggtgatgagctaaaacttacgcaggcctcctggcaggactccagctccttgagggcgcgataccactgggcacagcccttggtgcactgcaaaaaaaaaaagggcgaaaaatggttaaggaaaccgggtagaacatatcagaatagaatatctgtcaatttggcagcatttaaatatatttttgtatctttaaaacacccgctgcgcaaaaattcccgttcttagttactttgcagtcaaaaccactcattgatggtcaagtgtaaattaccacagaaggaaaggaaagggaaaggaatgggaaaggagcccaggacgacaagatcgaaaacaagcaagagggagctcatgaagatcctcttcgatggcttcctcagttgcttggagaaggagaacgactggcagaggattatgcactttgagttcgtgtccaattgatctggtaactggagtggttaatccagagcgcgaacaatggtatcggattacccgacttaacgatcctatcccatttcaatgccggctccccaatgtcttcgacttactcgtgttttgtagcacttctcgccattgtccgccttttcgcactgtattccaaattcgtccagaaacagatcctcctggaaaaggggaaaggaaataattacaatgaaaatgtgaaagcatttagtattttattttggtcacttgggaacggaagttgcggtgagtttgcgtgggaaaaagctgaagtcgtcacacatatatatgtgcatatataaaacaatatagcaatggccatataaacgcgatttctgtgccaatgccgatggttcaattatttcgatcaattatcattgtggagcagggagagagacctcgagcatctcgctaataaaatgaacacaaatatgttatatactctcgattaagttcgctttgttaacacacacacataatgtattccttcgttttatttttgcattgaaattaggtttccgagaaccaatgatgctgcataaatttggtcgaaactcgttttggccacgtgagccatgaagatctaccgagtttagaagccatttgcatagactagactttttgagccatcaagggctaccggcttaaaacggggtcatccatgcaaaactcgatgcttgtggcttaaatacaaaacaaacccatttgccagatgctaataaaaagtatctttaaagagggctagcagtcataaaaagttatgtatagatattaacaaactgtaactgagattcgattgtaagctaaagaaaactttaaccttttttacgagtaaatcttcaagttgtacataaatttaagcaaaatcccacgggtcattaaatatttcttttaaacttcacatgagctcaagtcaaatctctacttccgtttgtatctcgcaaatccgcaatcctttgagttcctttacccaaaaaaaaaaaaaaaaaatggaaagccagtacttaaaatccaatttggcactctttgagttgccccctgcgccatttggaaactccttaaagtggccaactttgttaattgtgtggctccagcttgctaaatggacaagtaattacaaggggatttcccgccgtggatttggatttcctcacactcaaacacgagtgtgtgtacttttctggtgcttgcactttccattttgttctttatttttgttttttttttttttgtgattcgcacacgcgtcaatttaatttagagttctacgtaatattttattaatttagcttgattggctttttcacaaacagaaatagctcttcacacagcgaaagagagctcctcccttcgccaagcggaaaaacgaggaaaaaaatccatgaagctggtgaagctggtgaagaaccccccgggagacgaaagattgagcctggggcccgagactaattggcgttgggggttttcatgtcgtcattgctcatcttttgttgtacaatttctattacattaactcggaaaccgacccacacacacaggcacacccatacacacacacacacacacacaggcacacattagaaagggggcggggccggagggaaggccgccagactgggttggtgtgttattgacaccattattgtcccattgttgttgctgccgtcaggctctggaaaagcgagccaaagaaaatacacttgtgtgcttacgaacgcacagcagcgcccaaattaatagtactttaattgcaaatacaattaattatgaaacctataaaagagtttttaagccttagtactgtattctatcgcaaattgataggctttatgtctctttaatattttaaactaaccttaatcatgagccacccaacttccgcgagtgcgaatgaagtacatacatatttgttaattttgggttaacaatatatttttttatttcaacagcactgctattaactgcaccgcaattatagcactgcctacacgtacccgtacacttaaattgactaaacattttgctcactctcgattccaacaaggcaaaacatcttaataaaatttcttttgttcgcctcgcctttctaggctatgcgaaattcagttactggttggaaaatgaaggtttggtttggtctagtttattcctggagctaaatcatcaccagctcaagcgattagaaaagagtgataggaagaactgaaatgcgtaatcaaggtatcgattaaaatggcaattgtgtacagcatgagagctgaactaaatagttaaacgacacaaattataatttaagagtgaatatataatttaacatgacatatgagcgaacaactgatttttgatggatacaccaatgctctctctgtctctctctttctctctgatcattaaattcaatccactcgccttctgaacgccagatggcgctcgcttatcattaattttaattggcgcaatggggctttgtgtaactggagtgtcgaattgtggattactgaattggcgctttcctaatgaatgaagtacccgccaagtcactgatttacatgcggcccactccgattacacactctgcgataatatagtaattacagtccgcaaatttgtactgcaaaagatgtatgtacacatgtgtgtacttatgtgccagctgaagtgatgactatatagcatgtgtatgtagttgagcattttagcaggtaaattgcattgttgaggggaaatactgggcatcttggagtaattacctccataagaaacattaatctcatcaatttcattaatacaaattagtattttaaacttaatatgtattaacattccccagattgttgtaattgtaaatcaatatgtttagcagtttccaaagctttgacaccatatctcaatgtatatgcccttatctatattttataattaattaaaggcacactttttcatcacccctttgacgcatttcacagctcgcattacaaaaacctctgcactcacttagccgcaattaaagcattaacaaagtgcagcaaataaaacaagtcaatcggttgcctaattaaaagcatttttaattaagctcaccaggacatgaaactagtgggggaattaatgaaaaatatacgtgcgtaaataaaaatgtatgaaataaacatataacacactatgggtgccatggtgatgattttctgtgcaaagcatgtgacatgtgacatgtgacatgtctatatggcacaaaagccagataaaacacacacccactcagtatgcaaattgcaataaagccgagccgagacgaggaggtaacccaaataatgagcaagattctaatcccgatctgtttgttctgtttcagcaaattgaaatgtcacttcatccagcccacatgcatacatatgtatgtacatatgtttaatcaccgacttaactcgacgatcttcaattacacatataatttaattagccgagtgcgagtgagcgattaatggccactggaatggttggaaaattcattcaactcaataagctagtcagctaaatgtctgagaaataaaaaccaagccaaaaaaaaaataaataaataatcgttggaatatataacttggtctacgtgatgagttagcaagctcgagttgcacttgtttagattgttttttgattatatcgttgacacaagcaaaactggaaaaataaacatttcgcacccgaatgtcgctttacccttttttttctttgctttgccctggggaaagtcatgttttatgcatgttttatgcatgttttatgctcttttgacaccatcacgaaatgtgcattatcacaatgtatgtaaatacaatataaaacttaggtaatgttagaaatctagaactcacctcaacaatgcagcgctgcacacaatccctggtcacgcgttccaggaccattcgctcgtcgacgccatgctgttcctccgaaggatcacgatcccgatctcgatcatctggatgatgggccatcgttgactgtggcctgctgctgatggcgatgccctcgacaatgcttggcggagctgcggcggcgtgcttgtgccagatggccaccttctcgaccacatcgctgtccagcttgggacgcagcaggcgcatttggtctttggagacgggttcgggactctggtgcaccgtatagttgtgcgatcggcagacatcgcagcagatcgagagtagaatgagcaggagaagattgatgatcagtatggtggatatgccgccatggccatcctggccactggccaattggcggcctaagcgagccaattgctgacgtagatcgaaggagctgctctgctggcggaccacaatcttgctgggtgaggcattctgggagttcgacgaggaggaggaggtgccaggtgcctgctgattgatgtgggtggtggtcatcttggtattcacattcaccgcgatcttcacattgaagctgatgttcaatctctttgtgggcgccgcacccttcgcctgtttgtcctgctcatccgactggtggtctacattttgttgccaaaacatagtcatcgaggcactcgatcttcaccccgagttcgcgatttgtggcgttcgattcctatttcactcgataatcgttgtttgctttggctgaattaacattttagtgccgcatttgactgaaaacgaaactgaaacacacaacacagtgaccaccgcagtgtaaatcaaaagagaaatagaaagagaggggtgaatttgaacaacgcacaaataaaaatcagatttcaaatagcagagtcaaaaaaccaattcaattggaaattttaagtacacaaactaatttccattttatgcaaattcgagaagcagcaaacgaggcagttacaaaaaattaaatgcaagtgatattttacggataccctttactcaacattatgtcatataatgttaaaatatatgaatacatttttatataatttatttagcgaatttgagaaatgagtctcgttaactttccattaaacagaatgacttatttcttgtacttcaattcattgcagttgcaatttaaaggcataaaaaaagctgctaaaaggcccgaacctagtaatttacaaatatttgcagtatatcagcaagccaagttttgtctaattaatagatactccaatcactgtatttacaaagtggcagttctgcccttgcaaaatgctatattactatcatttttgtcaaaccgtcaattatcatgagttttccggattattactcaatttagtgtaacaagcataaacaatttacatgtatagttgattaatagctgtaccaatagcattaaatgatatttgcatatttgaaaatttgatgtatataatatatttgatatatttgatatatatttgatatatttggaaaataattaataaaaataagtaggcaagtgaatataccccaagaaaaagcttaactacattgcattctacttatttcagatgcagctcaaaggttcaacgcacattgccggcgagataaacagggtaaacacaaacacacacacacacaatctaagtccggatcgataagccaaaatcccaatgatctccgtaactggtttggccagcttccaccgcccaactcatccaaatgtcgccgggatttcgattagaggacatggatggtccatgctctcatggtccatggtccaattaatatggcgtctgcataatcagctagccaagcgacaagtttcaattaacatggcgtaatgcatggccaataagtcacgcccccttcgaccgaccacagcaaaaacaacaacaacaacaacaacaacaacaacaatagcgaacgggaagtggccataacaaatttatcctcattaagatgcaaacacattcgacggacggagaataatcgagcggagtcgcactttcaaaaacggaaatcccttttgtccgcaagttcagcaaaaccatagatatacatatatatatgtatatatatatatatgtatatataatagttaattgcactttaatttcatatttaccagcaacaacaacagcacagcagcacggaaaatgttaattaaatcgcccgatgagcagactagaccgaacaaatatatatatgtataaacaaaatgaaacagaaaaaccgaaaataaattgaaattcaaattgaataaaccgcgcgaaatagtgaaaacacgaaagatcacagcgggattaattgcattaaagttattcagagaatattatgcaaaagctgccggccagcgttttgcattaattagtcgaaggtatgtatgctatagtatatatatatacatatttgtacaatcagaaagtcaaaaccgatggagccttaaactctcacccacatttcgctcgaatcgccgctgttgaagttgttaagcgctgttcacgcgctttaattcaatttattgttgatttgagcggcttaattgcattttattgttgcagttgcggccccaactgaaaagcaactccacacacacacacataggaacacttagtgcacgcgaaaaaaaaagggtattaaaagagccgaaattcatgcaaacacacacatacgcgcacggatgtatcttgtatctttgagaacgcaactcactcgacaaaatgtcacagatatctggatgtggatctgaatctggatctggatgtgcgattcccgaagcgttacgtagtgcgcagtggcgcgatcgcagcagaactgatttgccggcgagcggcggctttttaaccaagccccaagctccaagtccaagtccaaccccccagctggagaacttgagcacggaactgaaaccgaaccgaagcgatgcgatgcgatacgataccatacgataccatacgataccatacgatgcgatgaacgatgagtgacgaagcgcaccgcaaccgaaccgaactgaaccgaaccgatcttaaatgaccattgatcttctttttcgttgacgcagcaactatgacgtcattggcagggcaacccctaaactggatatcatgggtagatagcccaccgcgctcctctttccatgggtcaaagctcaactcaatcggttgatcgcagatcgcaagcaggccgccagatatttaagttcttatagatacatagatagatagatgtattttccatctcaagaaaccaatgccacctcaagagtatctatctaaaatataatcttaataaaaacatgatcttaacattgtgcatctagttgatttgatgattttcggtttttaataagcttccgacttacatagtaacatctttgtatcattaaaattaaggtaatgggccgaggctatgtaaaatgtatataattattaaattatagtacttatttttgagctagacttattaagactaaatatattgaaaagcttacatccaaagagggttaaatttcaacttcttgcaatggaaaaaaactttattcgtttacaaatgttaacagaaataatttaaaatacaactcaatttactctaaacatcgtcacatgaatagcgcaaatcaacgcgctttttcgccaacaaataaacgtggcagaaaatttgtttaaatcgtttagctgactcactctttacatttagctaagcattaacagcacacctaaattgattattaaactaattgatcgcaagcagcagtaaacgcttgaaaataattgaattcaatagggaactagcccacacaatcagaaaataaag

SEQ ID NO: 1448 - DNA, 8758 bp, DROSOPHILA
agttctgctgcgatcgcgccactgcgcactacgtaacgcttcgggaatcgcacatccagatccagattcagatccacatccagatatctgtgacattttgtcgagtgagttgcgttctcaaagatacaagatacatccgtgcgcgtatgtgtgtgtttgcatgaatttcggctcttttaataccctttttttttcgcgtgcactaagtgttcctatgtgtgtgtgtgtggagttgcttttcagttggggccgcaactgcaacaataaaatgcaattaagccgctcaaatcaacaataaattgaattaaagcgcgtgaacagcgcttaacaacttcaacagcggcgattcgagcgaaatgtgggtgagagtttaaggctccatcggttttgactttctgattgtacaaatatgtatatatatatactatagcatacataccttcgactaattaatgcaaaacgctggccggcagcttttgcataatattctctgaataactttaatgcaattaatcccgctgtgatctttcgtgttttcactatttcgcgcggtttattcaatttgaatttcaatttattttcggtttttctgtttcattttgtttatacatatatatatttgttcggtctagtctgctcatcgggcgatttaattaacattttccgtgctgctgtgctgttgttgttgctgtttcgttttcagtcaaatgcggcactaaaatgttaattcagccaaagcaaacaacgattatcgagtgaaataggaatcgaacgccacaaatcgcgaactcggggtgaagatcgagtgcctcgatgactatgttttggcaacaaaatgtagaccaccagtcggatgagcaggacaaacaggcgaagggtgcggcgcccacaaagagattgaacatcagcttcaatgtgaagatcgcggtgaatgtgaataccaagatgaccaccacccacatcaatcagcaggcacctggcacctcctcctcctcgtcgaactcccagaatgcctcacccagcaagattgtggtccgccagcagagcagctccttcgatctacgtcagcaattggctcgcttaggccgccaattggccagtggccaggatggccatggcggcatatccaccatactgatcatcaatcttctcctgctcattctactctcgatctgctgcgatgtctgccgatcgcacaactatacggtgcaccagagtcccgaacccgtctccaaagaccaaatgcgcctgctgcgtcccaagctggacagcgatgtggtcgagaaggtggccatctggcacaagcacgccgccgcagctccgccaagcattgtcgagggcatcgccatcagcagcaggccacagtcaacgatggcccatcatccagatgatcgagatcgggatcgtgatccttcggaggaacagcatggcgtcgacgagcgaatggtcctggaacgcgtgaccagggattgtgtgcagcgctgcattgttgaggaggatctgtttctggacgaatttggaatacagtgcgaaaaggcggacaatggcgagaagtgctacaaaacacgatgcaccaagggctgtgcccagtggtatcgcgccctcaaggagctggagtcctgccaggaggcctgcctgtccctccagttctacccgtacgacatgccctgcatcggtgcctgcgagatggcccagcgggactactggcacctccagcgactggccatcagccacctggtggagcggacgcagccgcagctggagcgagctcctcgggcggacggacagtccacgccactgaccatccgctgggcgatgcactttccggaacactacctggccagcagacccttcaacattcagtaccagtttgtggatcaccacggcgaggagctggatctcgagcaggaagaccaggatgcatccggagagacgggttccagtgcctggtttaacttagccgattacgactgtgacgagtattatgtgtgcgagatactggaggccctgataccctacacacaatacaggttccgatttgagttgcctttcggcgagaatagagacgaagtcctctactctccggccacgcccgcctaccaaacgccacccgagggcgcgcccatctcggctccggtcatcgagcatctgatgggtctcgacgacagccacctggctgtccactggcatcccggtcgcttcaccaatggacccatcgagggttaccgcctgcgtttgagttcctcggagggaaacgctacaagtgaacagctggttccggccggacgaggtagctacatcttttcccagctacaagccggcaccaactataccctggcgctgagcatgatcaacaaacagggtgagggtccggtggccaagggatttgtgcagactcactccgctcgaaatgaaaagcctgccaaggatctgacagaaagtgtcctgctcgtcggacgaagggctgtgatgtggcaatcgctggaaccggctggtgagaactccatgatctatcaatctcaggaggaattggctgatatcgcctggtcaaagcgggagcaacaactgtggctgctcaacgtccatggagagttgcgcagcttaaaatttgaatccggccagatggtgagtccagcgcagcagctcaagctggatctgggaaacatatccagtggaagatgggttcctcgcagattgagcttcgactggctgcatcatcgactgtacttcgctatggagtcgccagagcgaaaccaatccagctttcagattatcagcacagatttgctgggtgaatcaacgcagaaagtgggcgagtcctttgatctgcccgttgagcagttggaagtggatgccctgaatggctggattttctggaggaacgaggagtcgctgtggcgtcaggatctgcatggtcgaatgatccatcgcctgttgaggatcaggcagcccggttggttcctggtgcagccacaacacttcatcatccatctaatgcttccacaggagggtaaattcctagagataagctacgatggtgggttcaagcatccactgccgctaccaccgccttcgaatggagctggaaatggacctgcatccagccattggcaaagctttgccctgttgggtcgctccctgctcctgcccgattctggtcagctgatcctggttgagcagcagggtcaggcagccagtcccagtgcctcatggcctctaaagaacttgcccgactgttgggccgtgatactcctggtgccggaaagccaaccactgaccagcgctggaggaaaaccgcacagcttgaaggccttgctgggagcccaggcggcaaagatctcgtggaaggagccggaacgcaatccctaccaatcggcggatgcagcacgcagctggagctacgaactggaagtgcttgatgtggccagccaaagtgcctttagcattcgcaatattcgtggacccatctttggactgcagcgcctgcagccggataatctctatcaactgcgagttagggcaataaacgtggatggagagccgggcgagtggactgaaccgttggctgcccgcacctggccactgggtccacatcgcttgagatgggccagccggcagggaagcgtcattcataccaacgagctgggcgagggcttggaagtgcagcaggaacagttggagcgactacccggacccatgaccatggtgaatgaaagcgtgggctactacgtcactggcgacggtctactgcactgcatcaatctggtgcacagccagtggggatgcccaatctcggagccactgcagcacgtgggctcggtgacttacgactggcggggcggaagagtttattggacggatctggccaggaattgcgtggtgcgcatggatccatggtcgggcagtcgggaactgttgcccgtcttcgaggccaacttcctggcattggatccgcgtcaaggccacctgtactatgccaccagctctcagctgtcgcgacatggttccacgcccgatgaagcggtcacttattatcgtgttaatgggctggagggaagcatcgcctcctttgtgctggacacccagcaggatcagctcttctggcttgttaaaggctctggtgcactgcgtttgtatcgtgcgcccctgacagctggcggggattcactgcagatgatccagcagattaaaggcgtctttcaggctgtcccggacagtttgcagcttctgcggcccttgggcgcacttctttggctggagcggagtggcaggagagctcgcttggtccgcctggctgctcctctggatgtcatggagctaccgacaccggaccaggcctctcctgcctccgcattgcaattattggacccacaaccattgcctccgcgggatgagggggttattccaatgaccgtgctcccggatagcgtgcgtctggacgatggccactgggacgacttccatgtgcgctggcagccatccacttccggtggcaatcacagcgtctcctatcgtctgctcctcgagtttggccaaagactacaaaccttggatttgagcacaccatttgcccggctgacccaattgccgcaggctcaattgcagctaaagatcagcatcacaccgcgaaccgcgtggcgaagtggagacaccactcgggtgcagctcaccaccccgccggtggctcctagtcagcctcgtcgtctgcgcgtgttcgtggagcgcttggccactgccctgcaggaggctaatgtgagtgctgtgctccgctgggatgcgccggaacagggtcaggaggcgccgatgcaggcgctggagtatcacatcagctgttgggtgggctcagagctgcacgaggagttgcgcctcaatcagagtgccctggaggcccgcgtagagcacctgcaaccggatcagacgtaccacttccaggtggaggcacgtgtggctgccacgggagcggcagcgggcgcagctagtcatgccctccatgtggcaccggaggtgcaggcggtgccacgcgtactctacgccaatgcagagtttattggcgaactggacctggacacacggaatcgcaggcgactggtgcacacggccagtccggttgagcatctggtggggatcgagggagagcagcgattgctgtgggtcaacgagcacgtggagctgctcacccatgtcccgggatcagctccagcaaagctggccagaatgagggccgaggtcttggcactggccgtggactggatacagcgtatcgtctactgggcggaactggatgctactgcaccgcaggcggcgataatctatcgcctggatctgtgcaactttgaagggaagatcctgcagggcgagcgggtgtggagcactcccaggggacggttgctgaaggatctggtggccctgccacaggcgcaatctctgatctggttggagtacgagcagggatctccgagaaatggttcgctccggggcagaaatctaaccgatggctcggagctggagtgggcaacggttcagccgctaatccgtctgcatgctggaagcttagagcccggatcggagaccttgaacctggtggacaaccagggcaagctgtgtgtctacgatgtggcccgtcagctgtgcacggccagcgctttgcgggcacagctgaacttgctgggcgaggactccattgctggtcagttggcccaggattcgggatacctttacgccgtgaaaaactggagcattcgtgcttatggtcgccggcgccagcagctggagtatacggtggaactggagccggaagaggtgcgtctgctccaggcacacaactatcaggcctatccgcccaagaactgtctgctccttccttcatccggcggatcccttttgaaagctaccgattgtgaggagcagagatgcctattacacttacccatgatcacagcctccgaagattgtccactgcctattcctggcgttagataccaactgaatcttacgttggccaaggagccgggatccgaggagcacgatcatgggatggagcccctgggacagtggctgctcggtgctggggaatcgttgaatcttacagacctgctgcccttcacccgttatcgcgtgtctggaattttgagcagcttttaccaaaagaagttggcattacccaccttggtgttggcaccactggagctccttaccgcctctgccacgccctcgcctccaaggaacttcagtgttcgtgtgcttagtcccagggaactggaggtcagctggttgccgccggagcagctgcgtagcgaaagtgtctactacacgctccactggcaacaggaactggatggtgaaaatgtccaggatcggcgggaatgggaggcacatgagcggcgactggagacggcgggcactcatcgattgactggaatcaagccgggatctgggtatagcctgtgggttcaggcccatgccacgcccaccaagagcaacagcagcgagcggctgcatgtgcgtagtttcgccgaattacccgagttgcagctcctggaactgggaccctattctctgagtctcacctgggcgggaacaccggatccactgggatcgctgcagctcgaatgccgatcgtcggctgagcaactgcgtcgcaatgtggccggaaatcacactaagatggtggtggagccattgcagccacgcacccgctaccagtgtcgcctgctcctgggctatgcggcgacgccgggagctccactgtaccatggcactgcagaggtgtacgaaactctgggagatgcgcccagtcagccgggcaagccacaattggagcacatcgctgaggaggttttccgtgtcacctggacggcggcccgcggtaatggagcacccattgctctctacaatctggaggcactccaggcgaggagcgacattcgccggaggcgcagaagaaggcgccgcaatagcggtggatcactagagcagttgccgtgggctgaggaaccggtggtcgtggaggatcagtggctggacttctgcaacaccaccgagctgagctgcattgtgaagagtctgcattcgagcaggttgctcctcttccgtgtgcgtgcgcggagcttggagcacggatggggaccttacagcgaggagagcgaacgggtggcggagcccttcgtttcgccggagaagagaggatcactggtcctggccatcattgcgccggctgccatcgtttccagctgcgttctggcattggtgctcgttcgaaaagttcaaaagcgacgactgcgtgccaagaaactgcttcagcagagccgtcccagcatctggagcaacctgtccaccttgcagacgcaacagcagctgatggccgtcaggaatcgcgccttctccaccacgctgagtgatgcggacatcgctctgctgccccaaattaattggagtcaactgaagttgctccgatttcttggcagcggtgcttttggtgaggtatacgagggtcagttgaagacggaggactccgaggagccgcaacgagtggccatcaagagcctgcgcaagggagccagtgaatttgccgagctgcttcaggaggctcagctgatgagcaacttcaagcacgagaacattgtgtgcctggtgggaatctgcttcgacaccgagtccatatctctgattatggagcacatggaagcgggcgacttgctaagctacctacgtgccgccagggctaccagcacccaggagccacaacccactgctggactctcgctctccgagctcctggccatgtgcattgatgtggccaacggctgcagttatctggaggacatgcactttgtgcatcgcgacctggcctgccggaactgtttggtcacggaatcgacgggcagcacggatcgtcggcgcaccgtgaagattggtgacttcggattggcgagggacatctacaagagcgactactaccgaaaggagggcgagggcctgctaccggtgcgctggatgtcgccggagagtctcgtcgacgggttgttcaccacacagtcggatgtgtgggcctttggagtgctctgctgggagatcctcacactgggccagcagccgtatgcggcgaggaacaacttcgaggtgctggcccatgtcaaggagggcggacggctccagcagccgcccatgtgtacggagaagctttactccctgctcctgctttgctggcgaacggatccgtgggagcgacccagtttccggcgctgctacaacacactccatgccatcagcaccgatttgcggcgcacccaaatggcctcggcaactgcggatacggttgtcagctgctccaggccggagttcaaggtgcgattcgatggccagccgctggaggagcatagagagcacaatgagcggccggaggatgagaacctgacgctgcgggaagtgccgctcaaggataagcaactgtatgcaaacgagggagtctcgcgactttagaaaggtgactcccatgtccttcacaaaggtcgtctcaaaacgattagctttccatttaatctaagttctaagtttaatatgtacgagaatataaaatggtcgatgaggatggcaagtttgtattctatttcagattaagatacttttttttttcttctcagatacaggaattatgggcaagcgcattgcctataagttttatttgcaccgctatttatttattttctttaatatttcaattaatggatagacttaaatatattataaaatttttggtact

SEQ ID NO: 1449 - protein, 2510 aa, DROSOPHILA
MTTTHINQQAPGTSSSSSNSQNASPSKIVVRQQSSSFDLRQQLARLGRQLASGQDGHGGISTILIINLLLLILLSICCDVCRSHNYTVHQSPEPVSKDQMRLLRPKLDSDVVEKVAIWHKHAAAAPPSIVEGIAISSRPQSTMAHHPDDRDRDRDPSEEQHGVDERMVLERVTRDCVQRCIVEEDLFLDEFGIQCEKADNGEKCYKTRCTKGCAQWYRALKELESCQEACLSLQFYPYDMPCIGACEMAQRDYWHLQRLAISHLVERTQPQLERAPRADGQSTPLTIRWAMHFPEHYLASRPFNIQYQFVDHHGEELDLEQEDQDASGETGSSAWFNLADYDCDEYYVCEILEALIPYTQYRFRFELPFGENRDEVLYSPATPAYQTPPEGAPISAPVIEHLMGLDDSHLAVHWHPGRFTNGPIEGYRLRLSSSEGNATSEQLVPAGRGSYIFSQLQAGTNYTLALSMINKQGEGPVAKGFVQTHSARNEKPAKDLTESVLLVGRRAVMWQSLEPAGENSMIYQSQEELADIAWSKREQQLWLLNVHGELRSLKFESGQMVSPAQQLKLDLGNISSGRWVPRRLSFDWLHHRLYFAMESPERNQSSFQIISTDLLGESTQKVGESFDLPVEQLEVDALNGWIFWRNEESLWRQDLHGRMIHRLLRIRQPGWFLVQPQHFIIHLMLPQEGKFLEISYDGGFKHPLPLPPPSNGAGNGPASSHWQSFALLGRSLLLPDSGQLILVEQQGQAASPSASWPLKNLPDCWAVILLVPESQPLTSAGGKPHSLKALLGAQAAKISWKEPERNPYQSADAARSWSYELEVLDVASQSAFSIRNIRGPIFGLQRLQPDNLYQLRVRAINVDGEPGEWTEPLAARTWPLGPHRLRWASRQGSVIHTNELGEGLEVQQEQLERLPGPMTMVNESVGYYVTGDGLLHCINLVHSQWGCPISEPLQHVGSVTYDWRGGRVYWTDLARNCVVRMDPWSGSRELLPVFEANFLALDPRQGHLYYATSSQLSRHGSTPDEAVTYYRVNGLEGSIASFVLDTQQDQLFWLVKGSGALRLYRAPLTAGGDSLQMIQQIKGVFQAVPDSLQLLRPLGALLWLERSGRRARLVRLAAPLDVMELPTPDQASPASALQLLDPQPLPPRDEGVIPMTVLPDSVRLDDGHWDDFHVRWQPSTSGGNHSVSYRLLLEFGQRLQTLDLSTPFARLTQLPQAQLQLKISITPRTAWRSGDTTRVQLTTPPVAPSQPRRLRVFVERLATALQEANVSAVLRWDAPEQGQEAPMQALEYHISCWVGSELHEELRLNQSALEARVEHLQPDQTYHFQVEARVAATGAAAGAASHALHVAPEVQAVPRVLYANAEFIGELDLDTRNRRRLVHTASPVEHLVGIEGEQRLLWVNEHVELLTHVPGSAPAKLARMRAEVLALAVDWIQRIVYWAELDATAPQAAIIYRLDLCNFEGKILQGERVWSTPRGRLLKDLVALPQAQSLIWLEYEQGSPRNGSLRGRNLTDGSELEWATVQPLIRLHAGSLEPGSETLNLVDNQGKLCVYDVARQLCTASALRAQLNLLGEDSIAGQLAQDSGYLYAVKNWSIRAYGRRRQQLEYTVELEPEEVRLLQAHNYQAYPPKNCLLLPSSGGSLLKATDCEEQRCLLHLPMITASEDCPLPIPGVRYQLNLTLAKEPGSEEHDHGMEPLGQWLLGAGESLNLTDLLPFTRYRVSGILSSFYQKKLALPTLVLAPLELLTASATPSPPRNFSVRVLSPRELEVSWLPPEQLRSESVYYTLHWQQELDGENVQDRREWEAHERRLETAGTHRLTGIKPGSGYSLWVQAHATPTKSNSSERLHVRSFAELPELQLLELGPYSLSLTWAGTPDPLGSLQLECRSSAEQLRRNVAGNHTKMVVEPLQPRTRYQCRLLLGYAATPGAPLYHGTAEVYETLGDAPSQPGKPQLEHIAEEVFRVTWTAARGNGAPIALYNLEALQARSDIRRRRRRRRRNSGGSLEQLPWAEEPVVVEDQWLDFCNTTELSCIVKSLHSSRLLLFRVRARSLEHGWGPYSEESERVAEPFVSPEKRGSLVLAIIAPAAIVSSCVLALVLVRKVQKRRLRAKKLLQQSRPSIWSNLSTLQTQQQLMAVRNRAFSTTLSDADIALLPQINWSQLKLLRFLGSGAFGEVYEGQLKTEDSEEPQRVAIKSLRKGASEFAELLQEAQLMSNFKHENIVCLVGICFDTESISLIMEHMEAGDLLSYLRAARATSTQEPQPTAGLSLSELLAMCIDVANGCSYLEDMHFVHRDLACRNCLVTESTGSTDRRRTVKIGDFGLARDIYKSDYYRKEGEGLLPVRWMSPESLVDGLFTTQSDVWAFGVLCWEILTLGQQPYAARNNFEVLAHVKEGGRLQQPPMCTEKLYSLLLLCWRTDPWERPSFRRCYNTLHAISTDLRRTQMASATADTVVSCSRPEFKVRFDGQPLEEHREHNERPEDENLTLREVPLKDKQLYANEGVSRL

SEQ ID NO: 1450 - DNA, 8512 bp, DROSOPHILA
acatcgcacaaaactctttagacatgcgtacacacattaatcaaaaatctgatccacataaatttctcgctctgacaagcttattgggtttattagtttcaaaaatgtcacgacaacatacatatacgtaatcgtggtttaaatacaaacacacagaagaaaaatgactacaagtttgcattaaatgcgctcgaactaaaagaaaatacttatgcgttactaggtcatcaatcgattgggtgtaactgaatgaatagacagctttagcggacccatgggtgcccgaggaagccttgtggtcaacataatttgaatacatgcctattggacttagccacacttacattacatttgttaataattatttcaacaagtagtgaattattactgagcaaacttgtaaatttagtttatggttaattgcgggcaaatctattagtttaaatattgtatttgaataattctcagctgtggctttattaatagcagtcacagatttcttttcgtttgatccttccctttgttgtagatttataaaatatattcactataataaatttctatcgctcagtttacagtttttcagttcgcttaaaggtgaatctctaatttttcacaaactcctcttatattttggtgttctcaagtttttggcacagtagtctgaacggggtttgcaaaactcacccacatattgaagaaacactcggtgtgtattattcatatttaattgagcagctttatggatatgcaaatgtgatttggaacaaacgaaaacgggtaattgctgataaaatttctcaatttgtgattatcctttagtagattttgtttttgttaagcgcgtacaattaaattaaagaggtatgaaaattcactaacagtatttacagggatttatctaacgataaaccaaaatgccaaagcacaaattaaattattgcttatttttggaatagtgtctgcctgcccctatcgcatcgtgtcattcgtagttcccttagtcccactccccttcgttgtccgaggactcggtttcgtcctcatccgagtggatggcgtttccacgcgccgccagcgctcgacgcagtgcatcggccaatgcgtcagtgcctgctccactgtcgctgtttcgctgactgcccagctcccgttccttggccggcttcaaaacagtgccctgacggatatccttcattaaatcgctgcgtgagtcgccacttccagtgctgagagcagtcgtgtccactttctgttcggataaggttaaatacatgaacaaaaacaaacaaaaattaaactttcgttcattcaccttcagctgggttcccttgcgtatggcgtccatcagtgcattgcgtggatctggagccgccggagctgctggccgggctgcttgagtcggtgcgtgcgtggtcgtaatgacggggatctctcccactggcatgggcgggggcggtggtggcggcaccgctgctggtggtggcggtggtggaggtggcggctgtaacgaaatttaaattataacttgtccattttaatcgggcattgatgacttaccgccacaacaggcgcactgactggtggcggtggtggagcggtgctaatgggtggtggtctgttaggtggtggaggagctcgtgcggcgcccggcacagtaacgggaactgcgggcggtggttgtcttgccggcggcagcggaggagcagttctttggttgccattctgaattgagagattcgattttggttaaggaaagaagcatgtttaaaatggctaagcgaaaacttacagatggatgacgggttggcaccggtggtggcatgggagccgctgtttccgtaggggattctacactgtattgcttcaccgaagccaggacattgttgctctgtatgaagtcgtagatgaaggcgcgggtgtcccgatcttttagctccacttccgagacacctgccttcacgaagaactcgttcagcacttcgtcgttctcgttgcccgccagatcaaatcccttctgcgcatcccagcccacgtggctgaggtgtacaaagtttgtcggccggctgatgtccgccttggtcaccttgcgcttcttgtccttcgcattgttgcccagaccaaagctactggataggaaattcttcgactgcgctggcgctggtgcaggcgtcagtgtcaccgagttgatcttgttgttcctcagctgaacgccgtccgtggaggacaacccaccttgcatgggtggtggcctggccggctcccgctgcacctgaggcaatggagcattgggcgcctgttggcttttctgccggttgcgtttctcttgtcgtttgcggttacgcgtctctatggtggcgtccacaatgcggaagaaggagtcgcactcctcctcggacacgaagtttagtcccacatgaccatcctgaaaggatttacatatcaatatcgttaggttagatacctaaactgaacgaggatcagaaaggttactcacactgccctcgaaggtaagcagaaagggtcgcgacttgaccacctccatgccatcgtagatctcgtgctcccagattagctcgttcttgatcaggcagtaggcgcgcatgaaataggatcggatggcgctatccttgacgaagcacaccaccccggtgtgtcgcttcttccagtgggcatgggcgctgccctccgtcttgtagatctgcaccacggcggtgttgagtgtctgaaagtggagcaagcagagattgcgttacacaaagttatgacaatcgatagaaagatagaaaggcccggggcgattatccaatacgggcgaacaaaagcttccaacaccttcagtttgcgcctcatttaaatgcaactatcaatccgacgaccacgaactcaatgaactgtcgcgctcgagctgaaaaactcatctgactttcggtttcgctagtttctggccatcaagtcgagtcgatggcccccagtgagtgttgactcttttgaataccgattagcctggccagctcttgcagcaactgcaactggtagttgaatgggcaatccagccgtttggcatgaggagcacgtatccccggttgatggagggcctaagtctagtccgtggacattagtctagtggagaactttccgtggatcagtgcatattgctgcaacagtgcaacggagacccataatgtgcacaggcaaaaattaagtatcatccattgatttaaaatgaaattgtgtttcccctaagatagatgtatagatagtacctacgtataaattcaaattgttctctgtgtcttttgtgtgacggaggactttgtttatgacccagacaggaaatggtggcgacactccaagaagtgcatcctgcactaccactaaattgccgcagcagaatagttgccaaaaccattatgtgcaagaagctctgccgccagaaaagtcaaggcaagcgcttatttatttatcggaaactttgtgcaaggacacaccagcctcttttaggctcgacaaaagtgagtgtgtgagttggtggccctaacatttggctttcgcctgaggccacagaatgaccctcaacccgaatcgttgctaattgattcaacttgccgcccctgggcgatgatccaaaatgttacgtgctggcaattgaaacactgcagccgaacagcaatccagcattatcaattaatggacacattagagatggatggatgtggatggatggttggttagtggatatgggcaatggccatgcagaagcatttgcagctgacctttggctcaaataaaagagaaagaggcattgacgagccactggattttatgtagcttcggatgtggaagatgctttccagcccacacaacacagcgcaacacagcacagcacacagcttgtatctctggcaaagtgcgaaattgtgaacacatttgaatttttattgatgcttagctctggctttttttactcgcgccaactgtgagcggacataagtagcattgtaaaaatgatgtcttgccttctacgtacaagctggtgtttcttttgaaaagcattaaaatcgatggaaaacaagcgacagcaaaaagtggtcattgccaccgagcgtgtggctcgatggagcggggaatgggtgcggtcctagcggtacaagtcaacccaaatgggccaagcggtaaaatgctcatacgccctgtggccaacatattatgtcagattataaataaacatttatacggatatctatagataccactttaatcgcaatgtatttagagaatgtcattgctatttaaagatgcgtaaaaatactagaaatgagtcagctacttcctttgtttattaaaattctttcgaaagtaatcaaagctagctaattattcagagagcaaaatctggggctcaaagtgtacactatccaaacataaacatcaattagaaagtttggcctgtgcagaaaaatgcgttaaataagtgtatacaaataaatgcgagcaagagttgcgacaagcgacaagcgactgccaaaccacaataacaacatcgggtttgctaagctgcagctttgtgtgttatcacacgatatcgcacaaagacgggcagcattcgatacggtgaaaacaagatatggtttggtgattgattgaatattttccaccaggtaatctctttctttatctcagagagcagagcagggcaaacgaaagatgtgggattaatgacataatttacaaatccccgaacgttttcattgacttgcccaatacccgtagcttcagtgaatcaaaagcagagactaaaaatatgagaaatggattggtagtgcctttctgagtgtcttcaaaaggggccaactgccttaaccagcccactggttgcattactttggcagagttcaaatgcatttggaaatgttttgtcaatggaaagttgcgaattagcaaagcgtgaattgcgaatcgaaattagcgattttcccatgttgtgcacaccataattatccgcacaacggccgccgttaaatgaccacattccaagtttccactccaatttcagggcattcttatcgcacttggcattggccggtgattcgcattgggcgggcggattgataagataaggttcgtctgtatttcgcctcaaatactatatgtacccccactcttatcacgacccaatgggccaaactaatggtttctctttcgtttcgcaccacaatcggctttggcaccccaatactacgaaggaatagagttggaaataaaaaactaatcaagaagtgcaaacaactgcgcttgtggcctatcaatgccggctcaagccgtttgctgatagaggctctaagaaatgctaggtaaatattagtaatgttaacaaagtctaacaaattgctctagtaacactggccagcacattcggactctgatctgaatgaatattatttattccttatatactcctaatttcttaatgagcatttaatacgagaatagtgcccaataagttgtaacctacatatgtatgtatgggcaccataaaacatctgtgtaacaatgattcatcttgttttttttttgtatagtacagagaacattaatctaaatggttatctgcactgactcaagtagactttccagcaaaagagtatgtctttcaatcaaaaccaaagctaataatgtgtacgatactcccatgcaagttttatagctgaccaactaactatagtgcatagaactctaattttgttcacagtttagcttccggtgccatctttaaatgggcaaagaaaccattcaactatgttgggcagtgtgcaagtgaaatttggtaaatatgacaggcagctgcccgtagaccgtagaatgatattatgatatagggttactgtgcttcgagtgaaattcgcacacgatgggcgacacttgagccgcaggaagtgcttcatcaagccgtgggatttgctcggcgaaggcggaggaacacaaaccatgtcattgcttaattattaatcacccgattgggggcattatgcatcatcagtactcgactcacctggcacttcttgcccagcagcttgaagacggcctcattctcctcctgggtgagcagcgtactggcggcattgaccttcgcccgtggaccgtcctgcgacctcattccgctgctcatctggccggtttcgttggatctgggtctggtgctggatatggggatctgggctggtttccctgcacaatacggacacaatacgcattttattgtgtggcgaaaacaatacgcaaatgaacaaaagctaaatgtattaatttaatatcacaaaacgctggggaccccgaaaaagtaaaaagttcataacaataaaggcacacggagtaacagttgaacttcgatagagtgaacaaaagtttgggatcgtagggttgacgatacaatatgaaaagtttgagctcccataaatatactaaagagttcagaaactgtataatatttaacgtttaaatgaattattgcagtcaacgccttcgaatataaaaagataactacacttggataggctgcctatttttttgtacagtgtacagcttgtaaaaactccgatctacagagagtttgagcaacggagtccgaagtgtgttgcgaataacccgatttgggatcgaagaattatggttttgggactgctgaatcgattgacagtattgtctttacggttttgaatggttttcagcccgaattacggccaagagcgcgagcgagagagaccgagacctgcgctggctatgacgatgtagctggttatggtgtcggcggggctgcgagcggatcgcctggtctgagtcacggtgcccgagagtcggaaatcagaagcagaaacagaaacagtcagccagcaagccagccagctgcgtttgaatgtgggcaaaagccaggccagtggcaaactcttcgaaaagagcccttatctttggcgaaaagcactgattaggtgtgcgcatgtatctatgtgtgatacatgcacagtggtctgggttactcaacattcggcactcgccacaagccaccagccaatccaccccactgtgcgccactccgtagctccaagatttgtgacaacacctgtccgtcgtcgcgccaggtggggtgaaaatgcaaatgtaaatagacagacgctgctgcggattgggagtaagttcatgggttgggttggttcggcttggatgggatgggatgatgtgctgccctactcaaggtctcgaatttcccttgtgagctgctctgctgggggggtcgcccattgattttttgcgtttattttcgtgcactgctcttcactctttcgtttttttcccacacacaacacaacacaccacaaaatctgtgtagtctctggccttgcggattccgggactcttatcgggaggctctactgtgcgcgcgtccgcgtcatcgagtgcatggcgttgaaaacgagtgttcctcggttgattattcgtctgttcccggacgcaatgctagtttgtttattcatttattttttttcactccaattcaattgctgccagtgtgaccgaccgaaaaaggcgataggctaaaaatactatcctttcgataatttcctaaaatatgcatcaagctctgccaaggccctgtgcagaccatgctcgagacttttcaattttgcccatcactagttccgcttaaaagtttatcaaaaagtttcaggcaattccgttaagaaatcgcgagtggagagctgtgggaatagtatattttttcatttatgttatcttttccgttaaatttgattttgtttaccacgcccgtaaattcgaataaatatttgttcatctggctttcaaaatatgttttattttgatataaattataatcgagtaaattcacattggtttaattttttgctgacaaaaagcatatttcgatttattcatattgaaaatggttaatcgcattgaatcggtaaaaactaagtcgcaaatgatgagcttaatgcataagctgtttcctaaaacagttacccttaacttgctaaattatataaaagaatacttaaaaagcagtgactaaaaaatgtgaatttcttctctcttcagatatttggtgtttgcataaggaagccaggggcatattttaaacttagagtatattctcaataaagatgtgcaactatatgattgtaattgatttcagtagctcaccagttggaggacagctcatctaactaagtgttaaaaaagttaaatcagaacagacattcgacttggtaaacctttcctagttaatgcgacaatcgaatatatagcatttatatatatgccagtatacattttgtatatattgggtagttgtacacatgttgaaaggcctgattttgtgtatatatatgcaatacatttggctacacacgatcgggagcatcgggagcttccttctctgactgtgatttggataagttgaagttactaggagtttgcgctaactctatgctaaact

SEQ ID NO: 1451 - DNA, 1787 bp, DROSOPHILA
cattgcgtccgggaacagacgaataatcaaccgaggaacactcgttttcaacgccatgcactcgatgacgcggacgcgcgcacagtagagcctcccgataagagtcccggaatccgcaaggccagagactacacagattttgtgggaaaccagcccagatccccatatccagcaccagacccagatccaacgaaaccggccagatgagcagcggaatgaggtcgcaggacggtccacgggcgaaggtcaatgccgccagtacgctgctcacccaggaggagaatgaggccgtcttcaagctgctgggcaagaagtgccagacactcaacaccgccgtggtgcagatctacaagacggagggcagcgcccatgcccactggaagaagcgacacaccggggtggtgtgcttcgtcaaggatagcgccatccgatcctatttcatgcgcgcctactgcctgatcaagaacgagctaatctgggagcacgagatctacgatggcatggaggtggtcaagtcgcgaccctttctgcttaccttcgagggcagtgatggtcatgtgggactaaacttcgtgtccgaggaggagtgcgactccttcttccgcattgtggacgccaccatagagacgcgtaaccgcaaacgacaagagaaacgcaaccggcagaaaagccaacaggcgcccaatgctccattgcctcaggtgcagcgggagccggccaggccaccacccatgcaaggtgggttgtcctccacggacggcgttcagctgaggaacaacaagatcaactcggtgacactgacgcctgcaccagcgccagcgcagtcgaagaatttcctatccagtagctttggtctgggcaacaatgcgaaggacaagaagcgcaaggtgaccaaggcggacatcagccggccgacaaactttgtacacctcagccacgtgggctgggatgcgcagaagggatttgatctggcgggcaacgagaacgacgaagtgctgaacgagttcttcgtgaaggcaggtgtctcggaagtggagctaaaagatcgggacacccgcgccttcatctacgacttcatacagagcaacaatgtcctggcttcggtgaagcaatacagtgtagaatcccctacggaaacagcggctcccatgccaccaccggtgccaacccgtcatccatctaatggcaaccaaagaactgctcctccgctgccgccggcaagacaaccaccgcccgcagttcccgttactgtgccgggcgccgcacgagctcctccaccacctaacagaccaccacccattagcaccgctccaccaccgccaccagtcagtgcgcctgttgtggcgccgccacctccaccaccgccaccaccagcagcggtgccgccaccaccgcccccgcccatgccagtgggagagatccccgtcattacgaccacgcacgcaccgactcaagcagcccggccagcagctccggcggctccagatccacgcaatgcactgatggacgccatacgcaagggaacccagctgaagaaagtggacacgactgctctcagcactggaagtggcgactcacgcagcgatttaatgaaggatatccgtcagggcactgttttgaagccggccaaggaacgggagctgggcagtcagcgaaacagcgacagtggagcaggcactgacgcattggccgatgcactgcgtcgagcgctggcggcgcgtggaaacgccatccactcggatgaggacgaaaccgagtcctcggacaacgaaggggagtgggactaa

SEQ ID NO: 1452 - protein, 527 aa, DROSOPHILA
MSSGMRSQDGPRAKVNAASTLLTQEENEAVFKLLGKKCQTLNTAVVQIYKTEGSAHAHWKKRHTGVVCFVKDSAIRSYFMRAYCLIKNELIWEHEIYDGMEVVKSRPFLLTFEGSDGHVGLNFVSEEECDSFFRIVDATIETRNRKRQEKRNRQKSQQAPNAPLPQVQREPARPPPMQGGLSSTDGVQLRNNKINSVTLTPAPAPAQSKNFLSSSFGLGNNAKDKKRKVTKADISRPTNFVHLSHVGWDAQKGFDLAGNENDEVLNEFFVKAGVSEVELKDRDTRAFIYDFIQSNNVLASVKQYSVESPTETAAPMPPPVPTRHPSNGNQRTAPPLPPARQPPPAVPVTVPGAARAPPPPNRPPPISTAPPPPPVSAPVVAPPPPPPPPPAAVPPPPPPPMPVGEIPVITTTHAPTQAARPAAPAAPDPRNALMDAIRKGTQLKKVDTTALSTGSGDSRSDLMKDIRQGTVLKPAKERELGSQRNSDSGAGTDALADALRRALAARGNAIHSDEDETESSDNEGEWD

SEQ ID NO: 1453 - DNA, 3090 bp, DROSOPHILA
tcaagccggtgacttgcgacaggtgacctcgcatcttgtgcacaagtgtcttcgtctcgtagttccaggcatagacagtgttatccgaacctccggcgtagatctctttgcgcagcacattgggatgaaagacgaggagccaagcgggaccagggaaatccttgagggcacccagacagctgttgttcgagtagtcccacagcctcagtgtggcatctgcaccgccgctggtgcagataagcctgccgcagggactaaactcaactcggatgactggtcccttgtgctgcgccttccacagcttcaccagcttcccagtgtccagctgccacagcctaagcaggccacttcgatgggcagtaaccagatgctcctgtgacagcccgaagcaagtaatcgtatcctcctccacatcgatattgtccagctccgccggcctcttgttatccgccgacggggaagacaagccgtagctatttaggatttgggaggtctgcacatccacctggtttacagctgagccattgaggcagtaaagatgatggccattcgggctccaggcgatgtcgccgccggcgtagaagttcgtgtagcgggcctccgccgcatagctggattttaaaattgttgtagtcttgcaatcatcaggtaattattaagtttatgttaccttttctcgctgatacccgccagcatgattttcgttgtttataaatacaaaaaccgcgtgcgccgcggatcagaacatgaacggaactagttcgaaatgttactttacagagcatgtaaggggatattcgaaatgtataagtagaaaagaaaagaatgatattaacttcaactgtgctaaataaataaagtaccatgaattggtgatttatttttaatcattcgaattttatctgaaaaaatcgcgattggtatacgattggtttttattgacgatagtcgttccgaaactatcgaacctccttgaccgataggcccctttgttttgtccaccactagccaagtaaaagccgtcaaatcatcgtcgcattcgacccaaggaattaaactaatttttgcgtttgaattgtttaaattttcacaaagtcttcgctatgagtactattggcactggagtaagtggtcagcgaactacatatctgcagatccctaacgtcaccctctcgcttccagtacgacttgtcggcctcgcagttttcgcctgatggccgcgttttccagatcgactacgcctcaaaggcggtggagaagagcggcaccgtaatcgggattcggggcaaggacgccgtggtgctggccgtggagaagatcatcaccagtaaactgtacgaaccagacgccggcggacgcatcttcaccatcgaaaagaacatcggaatggcggtggccggcttggtggccgatggaaactttgtggctgacattgcgcgtcaggaggcagccaactacagacagcaatttgagcaggctatcccgcttaaacacctgtgccaccgagtcgccggctacgttcacgcctacactctgtacagtgccgtccgccccttcggactttccatcattctcgcctcctgggacgaagtagaggggccacagctctacaagatcgagccgtccggctcctccttcggttacttcgcctgcgccagcggcaaggccaagcagctggccaagactgagatggagaagctcaagatggatatgaggaccgacgaattggtggagagcgctggtgaaatgtacgtttacagcaaaaaaaagggactgtttcaaaaatcgggcgggctttatcctagttccgagtggaaacttacttgctctgacaataggaagcatttttgggacatctattgcacttagaatctaggtttttattcataattaacatatctatcctatgtcttagcatctacaaagtccatgacgagttgaaggacaaggacttccgcttcgaaatgggtttggtgggcagggtaaccggtggcctacatctcataaatccctcagaactgacggagaaggcgaggaaagccggcgatgcggccaacaaggacgaagacagcgacaatgagacgcactagttcgtttgtgtgccagtgaatctaattctgggcctcatacataatgttaattttatatttccctaaagcgcaaaatgaataaacaaaatcgggtgaaatttaaggtttttatatttttatactctcattctttaatagttatcgttcgatataaatatattggctcgctggttatcggatctggttccttttgaatgtgcctgcagctattaaacctcgattgctacaaagaaaaaccttatcgctcacagctgatgcatttcgcgccatttgttgtactttattttggttttaacgacgcacgactggaatttcagtctattgttaataactacaatgactaccttaatagaacagttaattacgaaaatgggcctaagggaggagccaaacgtgctagagtaagcgataaataaatagttttaaaggtttacccagtaagatcgaatcctttcaggaaaaccaccgaactagtacgcctcctggaactgcgctccacgaatgtccctctgcagatcaacgagtacggaaagatagtgctgtgtgcggatctcgcttcctgcatgattgggatcgctttcgacaaggagcaggcactgaaattgtcaggattgcgaaagagccaatacctcaacaacaagcggatgttcgagaagctactggacctaaacaaactggctagcgtgaatgacatctgtgtccagctgggtctcaacgaagttgcccgcaaggcggaagagctaatgactctcttcaagggcgtagcggccaccgaggacatgggtaccgacaccagccatcctcagtacgccaccatggccgtgttccaggcctgccgcctgctcaaaaagaaggtttcgaaatcaaagctcatgcccttcagtaatttgcgaccctcccagtttcaactgctcgagcagcagtgggaacgcatgatagctaagcaccacaaggagagcaaagtaccatctagcaccgatatggagggtaaacttaagga

SEQ ID NO: 1454 - DNA, 865 bp, DROSOPHILA
accactagccaagtaaaagccgtcaaatcatcgtcgcattcgacccaaggaattaaactaatttttgcgtttgaattgtttaaattttcacaaagtcttcgctatgagtactattggcactggatacgacttgtcggcctcgcagttttcgcctgatggccgcgttttccagatcgactacgcctcaaaggcggtggagaagagcggcaccgtaatcgggattcggggcaaggacgccgtggtgctggccgtggagaagatcatcaccagtaaactgtacgaaccagacgccggcggacgcatcttcaccatcgaaaagaacatcggaatggcggtggccggcttggtggccgatggaaactttgtggctgacattgcgcgtcaggaggcagccaactacagacagcaatttgagcaggctatcccgcttaaacacctgtgccaccgagtcgccggctacgttcacgcctacactctgtacagtgccgtccgccccttcggactttccatcattctcgcctcctgggacgaagtagaggggccacagctctacaagatcgagccgtccggctcctccttcggttacttcgcctgcgccagcggcaaggccaagcagctggccaagactgagatggagaagctcaagatggatatgaggaccgacgaattggtggagagcgctggtgaaatcatctacaaagtccatgacgagttgaaggacaaggacttccgcttcgaaatgggtttggtgggcagggtaaccggtggcctacatctcataaatccctcagaactgacggagaaggcgaggaaagccggcgatgcggccaacaaggacgaagacagcgacaatgagacgcactag

SEQ ID NO: 1455 - protein, 253 aa, DROSOPHILA
MSTIGTGYDLSASQFSPDGRVFQIDYASKAVEKSGTVIGIRGKDAVVLAVEKIITSKLYEPDAGGRIFTIEKNIGMAVAGLVADGNFVADIARQEAANYRQQFEQAIPLKHLCHRVAGYVHAYTLYSAVRPFGLSIILASWDEVEGPQLYKIEPSGSSFGYFACASGKAKQLAKTEMEKLKMDMRTDELVESAGEIIYKVHDELKDKDFRFEMGLVGRVTGGLHLINPSELTEKARKAGDAANKDEDSDNETH

SEQ ID NO: 1456 - DNA, 3175 bp, DROSOPHILA
tcagccgtaatacttggtcatatttggaaaacaattatttgtttttcatatattatatatatatatatatatattattatattattatttttagatttgttgtttaattcacgttaagaatccgttttaaggtctctaaagttgcttttcgatccgttcatttaaattgtgtaattttcaggcgggttttatttataaatagagagggaccagatattgaaaggatgaaataaactgtaataccggaaacatcttactagatgcattcttcgcattgggaaatgttaatatccaccctaatttatgactaagattaaaaatgcattgcgatttctaataatattaatgtagtattaatattttcgatatacaagcttatagaattttttaaagcctataagctggattggtaacgatatcgataagagtgatcgatcaacggcagcgcaacaggtgtcgccctctggtaacactggcggtgcgtgtgcatcacagcaggaaaatttaagaggcggaaaaaagaactggatttccacgtagaacgttgcctttaacgcgcacgattcgtggcgatgttcaccacatttacggacctcgcgcgcctgtgcaggatttgcctgcgtcatctgcgcgaccgcgacacccactgtcccgatccgcgactcatcgcgattctgcaaaagttgctggacatcgacatattgaagcagccgcatggatttcccactgagatctgcaacctgtgccacaacgcggtggtctactttgacgagctgcgccaagtggcaagggaatccagccagaagcttatcggatggcagccagtggacatcgcggtcgacagggtggatatatatgtccttttcggcttgttaaacctggattaatactttcttagttctttcctaggtgaaggaggagccgccggacgaaggactcaaggaaaaccatgaggaaaatgagcatgaactggaggaagagcatgaaaagcaggcggatgggcagcaggtagatctgtcgaagaagcaggaggatcagaagaagattcttgacgaccgggaggatgaggagtatccagatgagtacgagaacagccagcaacagcttagccaaggcactggtagtaaacgacgcgctggcttggcctgcgatcagtgcggcaagcaggtgtacaagctaccgtacttggaggcccacatccgcagcgtccatcagggctactcgaaacccttcttgtgccgcagctgcgacaagtccttcactcgatatgagcagctgcgctcccacatgcgcaacgcccatccacagctggagcaactgcagcaggagctgcgcgacctaatctgcgagctgtgcaaccggcagtacagcacaaagaatgccttgggcgagcatttaaagcgtcatgcccagcgcaaggagcacgtgtgcgagcactgtggagtggccaaggtgacccgaacggagctactgacccacctgcgcacccacaatcccacctgggagcgcttcaagtgcgagcagtgtccgcagctctttcgccacaagagcgccattagccggcatgttcgggtggtccacgagggtcagcggcggttccagtgcggtcattgcgagaaaaagtttggcacgcatgcctcgcaggtgcggcacgagcggctgcacacggaatccacgggctcgggagaggcagccgaggaatggccctttgcctgtattcactgccagaagccttgcgtttcgcgacaaacccttgagttgcacctacgaaggcaccgcgcgagaaagacgcacagaaaacgaagggagcacagtcgggagagtcaggagcaggagcaggagcacgaccgcgatcaggagcagggcgctcgggaagctcaacaggatcagctccgcaagggggaaaagctacggcagagagatctctccagggaaagccaccgaaatgaggtgaccatgcagacaagccagcggccaaatgagtgtcaacaaggtcaagagtcctacgatccggaaccggatccgctggaggcaagtcagtgcaagctagagcaggaagatgcactcgatccggaatggcagcacaaaatagagcaggacgcagaatcgcaagactcggcgcgactggaagggcatttccatgactacaaacctatcccttcgaaagccttatgatcaactataacctatccatatacgtccggttacatacatcaggttagcgccccttgagcaaaaatctttgatttgagatatttagaaaactgttaaagctagagttttgaaaattgcttttcattcaaacgttgaacaattctataaatgtaaaatttatataggatgcagtttcttgtttatagatttttatttaagtaaaaaaaaaatccataaatgggttaattaaaattgggttatcaggataacgccccctaagataatttaagttggttcgattcatttcgaaagaaattgggatgattaacacttaaatatttaaattagaatatttttaaaggaaattatggacttcacacattcgtctggaaagggaatcatatattttttttgtaggtaatccaaagtaatcgcagaccaatcgagttttattccggtgaacgattcgttttgagtggcatattgtttaccaccctcgtataccttcctagccaaccatacccacacgttatctattatatagtagtagtatggtggtagtagtatggaatccatgtttttgccaaacgtgcagtgtggattgagacactgtcaatttgaaaatgtcattctaaatttccaaaaacgtttctaaagtagggaaatgcagttttgaattataatcttttgcgttcatttttggtgtttaaaactgcaatttacctataacccgactgtgacagcgatccaaaatgtacgcaaatcataatagtaatgaaaaaagccgtctggtttctccagattaaatttcttcttgtccgaaaatacgacgccactccttagaccaagtcaaatgagctcgagcaaaactcagacccgctttttttcgcaacttattgagaggtggttttattttcagtttttcgtgttttatgtttagctgtcttaatcaccatttgaatcaaagatttgatctggttttcaacactttttctcgaattttggcggagaagtcgtggga

SEQ ID NO: 1457 - DNA, 1539 bp, DROSOPHILA
atgttcaccacatttacggacctcgcgcgcctgtgcaggatttgcctgcgtcatctgcgcgaccgcgacacccactgtcccgatccgcgactcatcgcgattctgcaaaagttgctggacatcgacatattgaagcagccgcatggatttcccactgagatctgcaacctgtgccacaacgcggtggtctactttgacgagctgcgccaagtggcaagggaatccagccagaagcttatcggatggcagccagtggacatcgcggtcgacagggtgaaggaggagccgccggacgaaggactcaaggaaaaccatgaggaaaatgagcatgaactggaggaagagcatgaaaagcaggcggatgggcagcaggtagatctgtcgaagaagcaggaggatcagaagaagattcttgacgaccgggaggatgaggagtatccagatgagtacgagaacagccagcaacagcttagccaaggcactggtagtaaacgacgcgctggcttggcctgcgatcagtgcggcaagcaggtgtacaagctaccgtacttggaggcccacatccgcagcgtccatcagggctactcgaaacccttcttgtgccgcagctgcgacaagtccttcactcgatatgagcagctgcgctcccacatgcgcaacgcccatccacagctggagcaactgcagcaggagctgcgcgacctaatctgcgagctgtgcaaccggcagtacagcacaaagaatgccttgggcgagcatttaaagcgtcatgcccagcgcaaggagcacgtgtgcgagcactgtggagtggccaaggtgacccgaacggagctactgacccacctgcgcacccacaatcccacctgggagcgcttcaagtgcgagcagtgtccgcagctctttcgccacaagagcgccattagccggcatgttcgggtggtccacgagggtcagcggcggttccagtgcggtcattgcgagaaaaagtttggcacgcatgcctcgcaggtgcggcacgagcggctgcacacggaatccacgggctcgggagaggcagccgaggaatggccctttgcctgtattcactgccagaagccttgcgtttcgcgacaaacccttgagttgcacctacgaaggcaccgcgcgagaaagacgcacagaaaacgaagggagcacagtcgggagagtcaggagcaggagcaggagcacgaccgcgatcaggagcagggcgctcgggaagctcaacaggatcagctccgcaagggggaaaagctacggcagagagatctctccagggaaagccaccgaaatgaggtgaccatgcagacaagccagcggccaaatgagtgtcaacaaggtcaagagtcctacgatccggaaccggatccgctggaggcaagtcagtgcaagctagagcaggaagatgcactcgatccggaatggcagcacaaaatagagcaggacgcagaatcgcaagactcggcgcgactggaagggcatttccatgactacaaacctatcccttcgaaagccttatga

SEQ ID NO: 1458 - protein, 512 aa, DROSOPHILA
MFTTFTDLARLCRICLRHLRDRDTHCPDPRLIAILQKLLDIDILKQPHGFPTEICNLCHNAVVYFDELRQVARESSQKLIGWQPVDIAVDRVKEEPPDEGLKENHEENEHELEEEHEKQADGQQVDLSKKQEDQKKILDDREDEEYPDEYENSQQQLSQGTGSKRRAGLACDQCGKQVYKLPYLEAHIRSVHQGYSKPFLCRSCDKSFTRYEQLRSHMRNAHPQLEQLQQELRDLICELCNRQYSTKNALGEHLKRHAQRKEHVCEHCGVAKVTRTELLTHLRTHNPTWERFKCEQCPQLFRHKSAISRHVRVVHEGQRRFQCGHCEKKFGTHASQVRHERLHTESTGSGEAAEEWPFACIHCQKPCVSRQTLELHLRRHRARKTHRKRREHSRESQEQEQEHDRDQEQGAREAQQDQLRKGEKLRQRDLSRESHRNEVTMQTSQRPNECQQGQESYDPEPDPLEASQCKLEQEDALDPEWQHKIEQDAESQDSARLEGHFHDYKPIPSKAL

SEQ ID NO: 1459 - DNA, 2624 bp, DROSOPHILA
gtccggccgtgagaccatcgctcgtgtcaccggaggcatgaaggtgaaggccgatcgtgatgaggcttcgccctacgccgctatgttggccgctcaggtgagttgtgcgctctccggtccagttggagcccgtctaacggtttcaattccctccaggatgtggctgagaagtgcaagacactgggcattactgccctgcatattaagctgcgtgccaccggcggcaacaagaccaagacccccggacccggcgcccagtccgctctgcgtgctttggcccgttcgtccatgaagattggccgcatcgaggatgtgacgcccatcccatcggactccacccgcaggaagggcggtcgccgtggtcgtcgtctgtagatggcagtatctggaaagcagtagtctatgtttgcggtcgaaatacaatactgcatttgtgtatgcgataagaaagcttttctgttcgtgtgcataggtgcactgtaataaaccaggaaaatacgatgtaaatgactacaagacatttttgtgtgtgcattgggttcggtttggggtctgcaagtgctgcaatatttgatttataaggacattggcgaaatgtttacaaaaattgcacattacaagccgaagagttgccaccctggcgtgcccaacgcggtggtagcccgattgcgccatcaaagtaactatgcgtcgataactatcgcattaccagctgtgttgtttttgccttctttttttcgcatccggcgcacgcaattggttggttttctgctatttctccctttttttgttcaattttactgcaattgacttatttggcggcaaaagcgaaaagttgctgctaaatatgattcagtgatttagcataaaatgaaaaattttgcggacgccgtgaaagtggtggcgaattaatttgtttctcccccatttttttttgtgttgtttttttttttgtagtgatttgagccggcaaataaacatggtgtttttttctcttttagttgctgatcgacgaccagactctgcagaatggctccaagaaaggctaaagttcagaaggaggaggttcaggtccagctgggaccccaagttcgcgacggcgagatcgtgttcggagtggctcacatctacgccagcttcaacgacaccttcgtccatgtcacggatctgtccggccgtgagaccatcgctcgtgtcaccggaggcatgaaggtgaaggccgatcgtgatgaggcttcgccctacgccgctatgttggccgctcaggtgagttgtgcgctctccggtccagttggagcccgtctaacggtttcaattccctccaggatgtggctgagaagtgcaagacactgggcatcactgccctgcatattaagctgcgtgccaccggcggcaacaagaccaagacccccggacccggcgcccagtccgctctgcgtgcgttggcccgttcgtccatgaagattggccgcatcgaggatgtgacccctatcccatcggactctacccgcaggaagggcggtcgccgaggtcgtcgtctgtagaaatggatcgtgccacccgcttttgacgctgctttatattcttatactattaaatacatgcataaatgcagtggcaagggcatgttttttgggctcatgtgtttcattgtggccagtggcaacgcgtcgttaggtggtgctatcgataggtgatggttgggaccaccaatggtatgtgcaggtgtagagcggtcacactggatgaaattcaagacctatcgatatcctgatatacacgccaacgaagaccgtgtgtggattcgtggagcaaatcgaagttggcaggattaaaggcattcgcgaacgcagaggcagcagctaaagggccacccatgcaccaaagaaacaaactagctggcccagcggttcatttatctgcgactaacaagctaaaatcggcgtaattggcaagttcaatgcacgactaatatatttggccacacttgccagtgtatgtttgttcgtgtgcgtgcctgtttgtgtggtgtcgtctccgtacgtgtttgtgtgtgtgtccgcgacgagtatgtgtgcgcacatattcgtatatctgcaagactcgcggatgaaacagcgtgaaaagtgagcaaaatatcggggaaaaacggcacggtacggccacagaacggaacggtacggtgcgatacgatatcgagaaaaggccatcagccagagtactcctcgatccggaaacggataatggggatatagatgatacagccaatagctccccgaaagccacagcacacaataggtcggtcggtcggtcggttggttgggcgacgtcgccgagagttaaacatcaaaaatcaaacccaggaaccgacggagctaagtgtcaagtgtttggtgttgtgaaatttttcgtttccagctctccgttcagcgttcagccaatttgccaaccttttcccctctttaatttgttatccccggacaccacaagagtttcgatcaaaattttcaattgaacgcaacatcgccataaacaaaaacataaaggtaaaattcggccactacccaaacaacaaaaaaataaaatcataagaaaaaatcacgcagtaacgtagaagaagcagc

SEQ ID NO: 1460 - DNA, 565 bp, DROSOPHILA
gttgctgatcgacgaccagactctgcagaatggctccaagaaaggctaaagttcagaaggaggaggttcaggtccagctgggaccccaagttcgcgacggcgagatcgtgttcggagtggctcacatctacgccagcttcaacgacaccttcgtccatgtcacggatctgtccggccgtgagaccatcgctcgtgtcaccggaggcatgaaggtgaaggccgatcgtgatgaggcttcgccctacgccgctatgttggccgctcaggatgtggctgagaagtgcaagacactgggcatcactgccctgcatattaagctgcgtgccaccggcggcaacaagaccaagacccccggacccggcgcccagtccgctctgcgtgcgttggcccgttcgtccatgaagattggccgcatcgaggatgtgacccctatcccatcggactctacccgcaggaagggcggtcgccgaggtcgtcgtctgtagaaatggatcgtgccacccgcttttgacgctgctttatattcttatactattaaatacatgcataaatgcagtggcaaggg

SEQ ID NO: 1461 - protein, 151 aa, DROSOPHILA; identical to SEQ ID NO: 1440

SEQ ID NO: 1462 - DNA, 8803 bp, DROSOPHILA
ttggctttttcgggaagcttcactctcttctctgtgctccaaatttaccaacctatttgtttatgcccattcgtgggaccgttacctatatttctctctgttgacaatggtctctggcagatttgtgattcacttccattacagttaatcatactcatgacgcggccattttgtgaaaagctgaatgggctgtaaagcctaaacatgtatgtgtgtgatgcgaaattgatgagagcacgcttccggtttaattatagacaatgacccattaccgaccattaataggcatttccgatgaagctttagagttatgaatatcagccgcccgtaaaaaagcctactgatggatttcattaggacatgaaagtgtcatggtcctcattaatgaagaaatcaagtgcagagtggggaactccaaattaataaaatcaaagcgttttgaggatcaacttgtgtgactaaaagggtattataaaacaataatgcagataaacattgctataataaaaatcgaaggataagatatatttttatagtggttattgttaggggaaaattggtgttgaaaatgtaccccatatatcttttaaacaaacgacagcataattatgtataaaatatatatataaatataaaaatgtttttaactatggtacagttcatttcaatatattcctgagcatatgtatgactaatttaatggatacaactcttccctctctcaaaggcaatccattattggccaacgaacctgttgcattatcagctttagttaactgataagaaactattttgaaattcattatcatctcatacatgtgtttaacaagcgctctgttaattaacagcgatcatatcacaccaccagcccaaaagtaggcactacttttcggagggatttgttctctcccggtttatttcccagcttatcagcaatttagtttatttggaatatgggggtcccggcttcaaacaaaagtgaattgcccttagttctgggtcgaacggcggcgagaagagaccgcgatttcgctgcgaacttatcaggtgatccggcatacacgcctcgtttttaatccatcagcatgctgcgttatctggcgctttcggaggcgggaatcgcaaaactgccacgcccacaatcgcggtgctatcacagcgaaaagggcgtttggggctataagccgattgcccagcgtgaatttcaaggtacggttgtaaacaagtgtgttgccaagacttcaataaaaacctcatccgtcgagataaccatcgcatcgataagagtctttcgggatcaaacattcatatgaatgggcagtggaaatctacccaagcaaaaagaaaaaccgacgaagtgacattgtgtgcgtgtgtgtgcgttcgtgtcggattttccagccggctatttatcagcggaattcaagcagctgacccacaacaatccccgcagaaactgcaataaaacaacagcctgaacaagagatcaagtgcaaattgctgtgggtgaattcgaaaaccagtttaaagaagatatatcatttgtataccctgtaatcggagggtatatacgggaatacgtatggatacctaggattattttcactaacttcaggtttaacttaatttcgcaaaatattttttaaattgaagttcattgtttatgcctctcatactatcgagaaagaacagctcctgttgactggtggaatattttttatggttttaatgttaccgtctttcctgttacctacccaagctaatctccacgttctcagcttatcacatgttttcactctgaaatctgataaacccgaaatatatggcgctacacccagtaccccgaatttataattagaatgaggagattgtggcagaccccccgtgcagtgcactaattaagtgaagagaggcggatgtccagtgcagagatactatatcttttcccaaaacgcacggcagggagtccaaaaaggacccggctaaatatcaaagcccggcaaacaaaggaccccaaaacgggagcttctttgtgcttgtcctgcatccgttgcgtacacaattggggcttatcgacaccatggccaacagacaccagtcaccagttggtagttggtagttggatagtctgccaggagcctttgactgggcaccagaggaaagccttcaacgcttgaccatgtgacatcaggcgcctaggatgatgcacatagagaaaatcaagtctaggatttactcaggctttggaaaagtatgttagatattctaaagcaaacccaattgaccagtattttgaattatggtaaagcgtactaaaactgactttaagcgttagttttgcctcagtgtagtatcggtataattcgccttgtttgccgttcgtcctttggctgcatttctgtcagggcaatcattatccttggcaaaggacgcgccgctgtgctccaataatatttacacgctcaagctgaaatgttgtcaccgcaaatacaattcatcatacaccctgtgctcctgtccaagcgacctactctttaacattaaattgatttatggccgaaatgccgtcgagaaattgcataaatttctgaggacgacttggggtcggtctaactggcaaatgccagctgtcccacggatttcgaattttcagggtactgtaatcgagtgatatgcgtcatcgcatataaatcctgtaagcaggataacactttaacacgtaaacacctaagcagccaacgagttgtcaatggctcaaccagggaataaaatatcccaacaaaggcaataaaaacaacaatcgtaatttctcatatgtagcacgaattgcttgccatcgggaagcacaaacgtcgtggtacactctatagttttaaattcgatgtaaatctgctaactggaataactaacgatatatgtatatgataagaatatatgttctgcacgcaatctcaataagccccatttaaatctttagccaactcctttcgacattttccactcgaattcatatcgaatgccaaatatttgccgggtaaatacgattcaaaagtgcacatacctggcagctagtccatcaaagtgaagcaaagcgtaaaaagcaaagaataaatatcataaaagtaaaaggccaataaattcaaaaggccgaacaacgtggcaacggggcgatgtgcacgtgaatccttttttaaataatttataacgtggggcgaaatttatattgtttacgcgtgtgtttcagtggccgaggatgtgcgggcctcaaggaactcgcaggccaacgtctatcgctttgtggaggcctttcgccagcatgggcacaaattggcagccgtaaatcccatcagcatcaggacgaggtaggaggctccagcacccagtacccagctcccagctcccattttcccatacccctcccgaaatcgtcctggcaaatgtcatattttattctccctttctggctgctttgtaatatcgccccggctgcgtgtatttgtcttgtgaattttcgtggctactggacacagccagcaggagctgcaggaattaagtcccgcattttatggactgcagacacaggagccggtgcgcaccgatggccttttaagtggtccgcaggtggcccacaacgtcgcccagctggagcagctgctcaaggacatttactgcggccgctcaaccagcgccgagttctcctacgtcgaggtaggtgtcccgtcctatcgcatctcatcccattccaccgcatcccataaacattgcgtgctgatcccgctgcctcattttcgcaggacatcgaggagcgtgagtggctggcccggaactttgagacgctggaccagcagcagctgggaaaaagcgagcgctgcgaaatcgccgagctgttaattaagtcgcaggcctgggacaatttcatggcactcaagtttcccacagtcaagcgatacggaggcgaaggagccgagtccatgctagccttcttctggcaactgctccgtgacagtgtccaaggtgagtttcccacgcaatgccatcatgaagttatttggatgcatcactccgttgaacatcgatttggcaaagcaacattcataaacttctacgattaagtccattttattccaaatttcaaagtttcatcccatatttatgacatgatttatacggtctcgtgcgtgtggaccgctccttaaacgcgattagcaaaacgcggaatcgcgcacccatttcaagacgccgaactttgtctcgtgacagtccgcagagatggtgaatctgctcctcggaatttgagctagcccacctgaactctagccagcattccaaacttccttcccacaggcatgctcacatatcatcgcacgcttacttaaccctaatctgctttctcaaaacttttccctctcgcatgctaccccgaaaaacaacggaaacgacgacaacgataaaaaaaaattatacaatggaatgacagcgaacatcgagcacgtggtcctggcgatgccccatcgaggaaggactccgctgcaggcggcgctcctcaacatgcggccggcgaaagttttccgcaaactcagcggcgcatccgagttttccgaagacatcgaggccatgtccgacgtcataagtcatttccgtaagtgaaactttgccggggcgttcggtgggcttacaggtatagtagggtattctggtatattcgtttattacacggacaagaaggatctgaagttgaattgaccgtaaaatagaaacaggagaaaaaatgtaacatataacttatttatagtcaattatttatcccaaagtatttagtactaggtatggattttaatatcctgggtatttcatagtcttcatttgaactaaaatcccttcatcccatccttttcgtgtgcgccaagcagtcttagccttgctggcctaagcacacacggcgtatgcttaatttaataaaacctgaaccgaatcgcacacagatgtttccgagcagctgaaaatactgggcaagaagctgagcttcagcatggtgcggaatccctcccatctggaggtaagccgacacacgtcaaactttgaaatttgatttctaatttaagcatcgtgttcctcctttatcccacttctaggcggccaatcctgtggccatgggaaaaacgcgatcgaaacagcaagccagaggagagggtgccttcggggatggcagtcagccctttggagagcacgtgctcaacgtaatccttcatggtgatgctgcgttcgccggccagggaatcaaccaggagtgcctcaacatggcctatgtgcctcacttcgaggtgggcggaagtctgcacctgattgtcaacaaccaggtgggattcaccacgcccggagatcgaggacgatccactgcctacacctcagacttggccaagtctattcaggctcctgtgttccatgtcaacggcgatgatcccgaggctttggccagggtcacaagcttggcctttaggtaccagagggaattccgcaaagacatctttattgatctgaactgcttcagaagggtggggtcacaacgagctggatgaccccaccttcaccaatcccttggtctacaagattgttcaccagcgggaatcggttccggacttgtatgcccagcagttggccaaggagcaggttctatcagaatcgaaggccaaggagatgagggatgagtacatgaaatatctaggcgaggagctagccttggctcctgcataccagccaccaccttcctacttcgagaagcagtggacgaactttcagttggctccctccaaggagctaacctattgggacactggcttggattactcactacttcattacattggtcagcagagtgtgactttccccgaagactttgtaagttagctcagatatgtgtatatatatatattctaaaggttttttcctgggtaacagaacatccatccccacctgctgaaaacgcatgtcaatgctcggctgaagaaactggaaaacggagtcaagatcgattggtccacagccgaagccctggctattgggagcctgatgtaccagggacacaatgtgaggatcagtggtgaggacgtgggtcggggaaccttctcccatcgccacgccatgctggtggatcagcagaccaacgagatgttcattcccttgaacagcatggagggcggaaacggtggaaaactggagctggctcacagtattctgtcggaggaggcggtgctgggattcgagtacggcatggccattgacaatcccaacaacctgattatctgggaagcgcagtttggtgactttgccaatggagcacaaattataatcgacaccttcatcgtctcgggagaaagtgagatggaaatagcatcttttctccgtactgattttaaagaatttcttaactagccaagtggatggagtccaacgcccttgtgatgctactgccccacggatacgacggcgctgcatcggagcacagttcctgtcgcatcgagcgcttcctgcagctctgcgactccaaggaaacatccgccgatggcgattccgtcaacgtgcacatcgtgaaccccaccacgcccgcccaatactatcatgtgctgcgtcgccaactggcaaggaacttccgcaagcccctcgtggtggtggcccccaaaacgttgctccgtcttcctgcggccacatccacgcacgaggacttccagccgggcacgctcttccacaatgtcctgggtgagtaatggcttctgtttatcttcacggactcgagggatagcgagtggggtcatggcatgactagggtactatgtctctgtccctaggcaaatatgtagaaaactactatagttaaatctattaaaaatacacctcgttggccaaaatagttattggccacatacataaaggcaaactagcaatataaacttttcagatttgcaaagcacataattgacttttaatgccacatatatctttttatatgctgtcctgctcctatgaattgtaaaaagatgtttacgtaaattcagggttattatactacgatattaatccacattttcttctttactttcccctgttattacccacccccaacgataggagacaccatagcgaagcctgagcaggtgcgcaaggtcatcctgtgcagtggaaagcactactacactctcgccgaggagcgggagaagcggcaggcctacgacacggccattctgcgcctggagtccctgtgtcctttccccatccaggagctgcaggcccagctggcccagtacggcaacgtgcaatgtgagtccatcgtaaacttaggccacaaagttgaccggatctgtatttgctatcgtttttatacacgaaaaaatataactaatatctttcttgatatatatattgtaccactatatatattttctctgcgtgcagcttttgtttggagccaggaggagcatcgcaacatgggcgcctggacgtttgtgcggccacgttttgaaaatttaattggccaacaggtaaaaagtcggcctgccaccggcggcctcagaaaaagctctagacacttttcactaccaaccgattttccccgctttccacagctccactactgcggtcgctgcgaggcacccacccccgccaccggaatcggaaaagtgcataaacgggaagtcgatgagattgttgctgccccattcgaactttagggcgaacccgcctcctcagccggtgcatatatcacaaagtactttagctcaattaaactgccaaaaatgtttgtgtaaaagcagaaaacaagacttttgaaacggttgatcgtgggaataccctcaaatttcatcacttacaaaatgtttggatgagtttttagtggatttaaaatatctctttttatttattttgttattactcggtgtacgaagtgaaagaaatatttttaaatttacgagcactgataacagtcaagatttaagtattgcatgcaaacattttcaacaaagttctttacaaacgcccttaaagtaccataaaaaagaaactaaaacgaaccgaagtgggaaaatgcttcccgctccgcacaaaatttatcgtacggaaaagccgtccgaagaggggaaactttaagcgaaaagtttttaattgtttgtttctgggaccaacctggtccggcaattgtgaacgaaaattgtagcaagtgattccactcgcagaccaataaaaatcataatgccccgaaaatgtaacctaccgtaaatatttattatatgtttatgaaacattttacagactttcattttgaattgtttaagcagcgcagtgacctaacttatagaagaagtacagaaagtattcgtgggtcaggtcaggcggtttactagatagctggattagctggattagttaaggcctacgagaatatacatacatggagatagacagtgaggcgaggcgaagaatggagtgcttcggtggtgaattgtgaggagtactacatataaggcgttaccaaggaccagcggatcggtgagagaaggttgtcggaagagaatcaactaactgcaaaaggtatcaaagtggccaaagtctcatcatcacgcttaaactctagacggcaggactcatatgacctgtctgccgtagacttgctcaagaatggtataaaagtcggtggacgtcttatatgtaaagtgcagaagtcacatccagaagaccatggccacgcacaccatcaccaccacaaaggcggcctcccggcaatttgcattgtcccacccgcactccagatcga

SEQ ID NO: 1463 - DNA, 2873 bp, DROSOPHILA
tcgaacggcggcgagaagagaccgcgatttcgctgcgaacttatcaggtgatccggcatacacgcctcgtttttaatccatcagcatgctgcgttatctggcgctttcggaggcgggaatcgcaaaactgccacgcccacaatcgcggtgctatcacagcgaaaagggcgtttggggctataagccgattgcccagcgtgaatttcaagtggccgaggatgtgcgggcctcaaggaactcgcaggccaacgtctatcgctttgtggaggcctttcgccagcatgggcacaaattggcagccgtaaatcccatcagcatcaggacgagccagcaggagctgcaggaattaagtcccgcattttatggactgcagacacaggagccggtgcgcaccgatggccttttaagtggtccgcaggtggcccacaacgtcgcccagctggagcagctgctcaaggacatttactgcggccgctcaaccagcgccgagttctcctacgtcgaggacatcgaggagcgtgagtggctggcccggaactttgagacgctggaccagcagcagctgggaaaaagcgagcgctgcgaaatcgccgagctgttaattaagtcgcaggcctgggacaatttcatggcactcaagtttcccacagtcaagcgatacggaggcgaaggagccgagtccatgctagccttcttctggcaactgctccgtgacagtgtccaagcgaacatcgagcacgtggtcctggcgatgccccatcgaggaaggactccgctgcaggcggcgctcctcaacatgcggccggcgaaagttttccgcaaactcagcggcgcatccgagttttccgaagacatcgaggccatgtccgacgtcataagtcatttccatgtttccgagcagctgaaaatactgggcaagaagctgagcttcagcatggtgcggaatccctcccatctggaggcggccaatcctgtggccatgggaaaaacgcgatcgaaacagcaagccagaggagagggtgccttcggggatggcagtcagccctttggagagcacgtgctcaacgtaatccttcatggtgatgctgcgttcgccggccagggaatcaaccaggagtgcctcaacatggcctatgtgcctcacttcgaggtgggcggaagtctgcacctgattgtcaacaaccaggtgggattcaccacgcccggagatcgaggacgatccactgcctacacctcagacttggccaagtctattcaggctcctgtgttccatgtcaacggcgatgatcccgaggctttggccagggtcacaagcttggcctttaggtaccagagggaattccgcaaagacatctttattgatctgaactgcttcagaaggattgttcaccagcgggaatcggttccggacttgtatgcccagcagttggccaaggagcaggttctatcagaatcgaaggccaaggagatgagggatgagtacatgaaatatctaggcgaggagctagccttggctcctgcataccagccaccaccttcctacttcgagaagcagtggacgaactttcagttggctccctccaaggagctaacctattgggacactggcttggattactcactacttcattacattggtcagcagagtgtgactttccccgaagactttaacatccatccccacctgctgaaaacgcatgtcaatgctcggctgaagaaactggaaaacggagtcaagatcgattggtccacagccgaagccctggctattgggagcctgatgtaccagggacacaatgtgaggatcagtggtgaggacgtgggtcggggaaccttctcccatcgccacgccatgctggtggatcagcagaccaacgagatgttcattcccttgaacagcatggagggcggaaacggtggaaaactggagctggctcacagtattctgtcggaggaggcggtgctgggattcgagtacggcatggccattgacaatcccaacaacctgattatctgggaagcgcagtttggtgactttgccaatggagcacaaattataatcgacaccttcatcgtctcgggagaaaccaagtggatggagtccaacgcccttgtgatgctactgccccacggatacgacggcgctgcatcggagcacagttcctgtcgcatcgagcgcttcctgcagctctgcgactccaaggaaacatccgccgatggcgattccgtcaacgtgcacatcgtgaaccccaccacgcccgcccaatactatcatgtgctgcgtcgccaactggcaaggaacttccgcaagcccctcgtggtggtggcccccaaaacgttgctccgtcttcctgcggccacatccacgcacgaggacttccagccgggcacgctcttccacaatgtcctgggagacaccatagcgaagcctgagcaggtgcgcaaggtcatcctgtgcagtggaaagcactactacactctcgccgaggagcgggagaagcggcaggcctacgacacggccattctgcgcctggagtccctgtgtcctttccccatccaggagctgcaggcccagctggcccagtacggcaacgtgcaatcttttgtttggagccaggaggagcatcgcaacatgggcgcctggacgtttgtgcggccacgttttgaaaatttaattggccaacagctccactactgcggtcgctgcgaggcacccacccccgccaccggaatcggaaaagtgcataaacgggaagtcgatgagattgttgctgccccattcgaactttagggcgaacccgcctcctcagccggtgcatatatcacaaagtactttagctcaattaaactgccaaaaatgtttgtgtaaaagc

SEQ ID NO: 1464 - protein, 901 aa, DROSOPHILA
MLRYLALSEAGIAKLPRPQSRCYHSEKGVWGYKPIAQREFQVAEDVRASRNSQANVYRFVEAFRQHGHKLAAVNPISIRTSQQELQELSPAFYGLQTQEPVRTDGLLSGPQVAHNVAQLEQLLKDIYCGRSTSAEFSYVEDIEEREWLARNFETLDQQQLGKSERCEIAELLIKSQAWDNFMALKFPTVKRYGGEGAESMLAFFWQLLRDSVQANIEHVVLAMPHRGRTPLQAALLNMRPAKVFRKLSGASEFSEDIEAMSDVISHFHVSEQLKILGKKLSFSMVRNPSHLEAANPVAMGKTRSKQQARGEGAFGDGSQPFGEHVLNVILHGDAAFAGQGINQECLNMAYVPHFEVGGSLHLIVNNQVGFTTPGDRGRSTAYTSDLAKSIQAPVFHVNGDDPEALARVTSLAFRYQREFRKDIFIDLNCFRRIVHQRESVPDLYAQQLAKEQVLSESKAKEMRDEYMKYLGEELALAPAYQPPPSYFEKQWTNFQLAPSKELTYWDTGLDYSLLHYIGQQSVTFPEDFNIHPHLLKTHVNARLKKLENGVKIDWSTAEALAIGSLMYQGHNVRISGEDVGRGTFSHRHAMLVDQQTNEMFIPLNSMEGGNGGKLELAHSILSEEAVLGFEYGMAIDNPNNLIIWEAQFGDFANGAQIIIDTFIVSGETKWMESNALVMLLPHGYDGAASEHSSCRIERFLQLCDSKETSADGDSVNVHIVNPTTPAQYYHVLRRQLARNFRKPLVVVAPKTLLRLPAATSTHEDFQPGTLFHNVLGDTIAKPEQVRKVILCSGKHYYTLAEEREKRQAYDTAILRLESLCPFPIQELQAQLAQYGNVQSFVWSQEEHRNMGAWTFVRPRFENLIGQQLHYCGRCEAPTPATGIGKVHKREVDEIVAAPFEL

SEQ ID NO: 1465 - DNA, 13175 bp, DROSOPHILA
caatcttcgccaggtgtcgacagcaccacgctcaaggaggatggcatccacgtgtggcgcctgaagcacttcagcaagccggcgtactgcaatctctgcctcaacatgttggtgggtctcggcaagaagggcctctgctgtgtgcgtgagtatctgtgtggggggcctgaggacaggaaattgtctatctgaatggccaaactaactttaaggccattcgactatccacaaaatacccaagaggatgcatttatcccatttatatttaacgaatatatgttaggaaaagttattttcaagataagccatttctcttaacatatttactatgttatactcgtacttgttttttaaatgtgttgtttttaatctttactcaaatttgtatgaaaagcaaatactaaaatgcgtcaacataaaaatgagtaattttattgttctcaagcttaaacaatcacgcagattatatattatcatatacaattactcatgattgactgttttattacttttaatatgaaattttcagtgttagaaattaaaaaaaaaaatgtttaaattggattgtattactgcaggattatatgaagtaaaactatgcaataattcatgcattttatgtaagctgttttttttttattttattgacatcaacataattatgtaagcacacatagtttttctattttctgtgaaattattaataacttgaattatttaattaacctaattatgcttgagaagcaaagtaaaatgtatcgatttcacttacagtttgcaagtacaccgtccatgagcgatgcgtgcaacatgctcccgcgtcctgcatcaccacctacgtcaagtccaagaaaccaaagtgcggcggagacctactgcatcactgggtggagggcaactgctatggacggtgctccaagtgccgcaaaaggataaaggcctaccacggaatcacaggacttacctgccgctggtgtcacatgatggtgagtgaatgaatagatttcttaatttattcgaaattataaactaaatacaaaaggtatatttattgtggtagtttgaatttgaactaatttgacacttcaaatatacaaatttaaatagtatattcttagaaatttctatttggtgtgattaaatataaatacataagtagtttataattggaattcgagttacatcagctggcaaattcggttcattcacaatcaatccgtaacaagaccaaatcagatcggttctggccgagattgccggcattgtttcgaaacaaaaattccaattatccggaataacaaggcagcctttggcccagcactcccaatgtagtttcgttggagctgtgactcgcagccggcaggaacaccaacacttcccaccagcgaaatccccccaattcccgcacccggcagggactcggatgcgtcccgatccgcacacatgagatgggaacttcgttatggctggcaaattgtcacgttccgaacaaattgcgctactgctgccgccgttgcatgccaccaacttttgtgtcctgtgtctttgacaagtgcagtggagataatgccgaattcctttccgccagagggtcgtcggcgggagcgaaggtcgggaaacttggtccttcgagccggatgctgctgcatcggcaaatactttgtaagccaaacgtagccgaacgcttttgacagtcaataacttcgcattttgagtggatgtgtctgtgtgtgtgtgggcatctagtctatgccacataaaaggggaatgtggttgccatgccctccccctgccactaaatacctcaccacagatatactctacctaatgccgtttaaagtaaacacaatagtgttcaggttttttacctaagattaactttcatgggtatttaaacatagcaattttagggtttaatcacttttctagaaaattggaaaatagttgaaattaatagtacatttacagcaagggaatgaaagttctgtctagtttcctttttgttaattaaaagtagaacacgatttaagaaattacaaaaaaaaatccagttgagcacttcgtaaacggaaaacgttttcataagtttcgtttaattagaaacaaaaaacttttgagcctggtcatcagtgtatgaccaactccaaatcaattttaaaggccgcagctgtgaaaaaagtaatgcgaaaaaaggaagccgcgtggtcattagccaaaagaagaaaccagactttgctccagccaaattgatatttaaatgaaaatccgcgccaaaatctcatttaggccaaaattaaccattttttctgctccacgggtcgggtagtcggcggcgctaacaaacttttaatcggattcattaaggcgaattgaacgcttgagagtcgtcgactccatctccctgtccaccacttctgccataagtggcctttggccggcaatggagtggaaattgaatttaatagcgtagattttctacgagaccgcgctatctggctgcgtactctgcctaatttgattcgtccccccatctcgtcccatcgatagctccacaaccgctgcgcctcgtcggtgaagaaggagtgcaccttgggcgaatactccgagctaattgtcccgcccacggccatctgcccggcggtactcgaccgccagcgatccgtgaatcaggctcacaaggtatgattgcatcctattctattaagtccttaaagctccttacccacttaaatcattccaaatatataaaaaacaaaattctgtcgaaatgttattaatattaatattaacaaagagaaagataggattgttaatgaaaaccttttgaaaataacgtactgccaacatttttggacatctttttagtttttttgcttgaatttaaattttatttgcttatgctctatatccatgtatatatagccttacttaataacaaaattcatttgacgaaggataaatttgttaatttcactttgcttcttaactaacaaaaaagaatcaatttagaatcattttcccctcccgcttaattttttgttttgtgaaactccaaaagattggctaactaacccctttcaaaattgaccttccgccttcaaaattaaaaaaaaaatatcgccaaacataacaattggaactgctgctttgcgtatcgtaatcgtacccatgacattggccaaattcgtaaccagaaatcccaaatgcatcaccaccaggccacgcacttccaaatcacgccgccggacgagctgagctgcccgctgctggtgttcgtcaatccgaagagcggcggtcgccagggggatcgcatcctgcggaagttccagtacatgctcaatccgcgccaggtgtacgacctgtccaagggcgggcccaaggagggtgtgtgtgtgtgagtgatggccattcaagcacggtgattgatttccgctctcgttgccaggactcacactcttcaaggacctgcctcgcttcagggtcatttgctgtggcggcgacggcaccgtcggctgggttttggaagccatgggtaagtactaactaagaactcaggaataatgctaccctgcttttatgatagaatctttagaatcgtttaaaataccaatgcatttacatacaaaacaatataagaaatgtgtccctgatttttctgcagactccatagagttggccagccagccggccatcggagtgattcccctgggaacgggcaacgacctggctcgctgtctccgctggggcggtggatacgagggcgaaaacatccccaaactgatggacaagtttcgaagagcctccaccgtcatgctggaccgctggagcatcgaggtgaccaatactccgcacagcgatgacatgcgacccaaggtgagtgaagacaaaagcctaaaaattcgtaaaattataagcacaacacatacaataaataggaaaacaaagccaatttagcacagtaataagatatcctttattagctaatacgggtaattcaaataaagtaaatcctttattaacttttataatgcatatacattttgctatatgcccgaaaggtttttaaagataagacccattctttagtttcagtttgcagctaatggagtgacattttcagatggaaaacccattaaagtgtaacatttttggccctactgtcttatttattgctttatttagcctagacactgggtattttcccttacaaatcgaatcgaattggctataacccggccaaagtaggcgtttgtgggcgtgagctggaaaatccaattattggccacaaagcgcttaccacgcataccattcccatccttgtcctgaacagcatccttgccctgcctcttgggaggaaaacgattacacaaactaattttgctggctggaaggcgtgatgctgacgctgccaaccaggaattcgaaaaactccaacctccaacaattggcaattggctgttggcaattgctaagccaagttttcccttcttttttcgccgcaggtgacgctgcactcgaacatgcagaaggtgattgagctgtcgcaaagtgttgtggtcgacaaatcgctgatggaacgcttcgaggaaatccaacggcagagcaagcaggtggccacgtccatgggcacggcggcctcaagcacatcgattatgatggccagcaagacggaaacggaaatggaaacgatggccacgatggagttcggcagcagcacgaccaccaccaacagaacgaccacgaccaagagcatttcgatgtccacgttcgagacgcagtgcctgcaacagaccctgcggacagcgatgagcagcagcagcagcaacacgagcagcggcagtccgtgcaacggcaaccaggatgcggaaacggaagtagattcccatgccgctgccgctgccgatgtccgggagaagtccgtgcccaggaggtcgggtgaaacggaaaagcaatcacttgagacgctgctgctgcagcacaaacagcagatgcaacaacagcagcagcaacagcagcaaggagtcacatcactagctgtcgaggaagctgcaacagcaacgccagtcgggagtaatcaaagcgataatagtagccagcgcaataagcaaaacaacatccttaaacagcaaattacattgtcattggacttgtccgaccatgaggacgagcccaaggacgatggcggtggcgctggcgatggtaccaagagcaacggcaacagcattccggcaacaccagccacaccaatcacacccaccactccgaatgccgcatcaagtgtgctgcagcaacaacagcaacagcatctccagttcgagcagcaacagaagcccatcaaagtgcaatccgacaaggactgcacggtgccctacaacataatcaacaattatttctccgtcggcgtggtgagtactctgcactgcatgcactgaaagaaaccattccaattcccatattgacaatatattatacactgcttatatgctgatatgaagaggaagtttagagcttggatcttataacttcatcttttaatcacagtggctatttgtttaacaatggtgttttgagtatagatacctttttattaatacccttgtgatataaatggcacctatttgctgatctactttaagtgtatgtaatgtaatgcctagaatgcattccctatcctgctgctccttggactgtgactccgattagttgcatccactaatgccaggcagccattccggatccagattcactccgtcacatgtcagatgctaagccggcggttgtcatgccatttccattcgaactcgctccgctgctcgtgttgcccatccggcttcaggtccacatccacatccctgcccatgctaatgcccatgcccatgcccatgtccatgtccgtgtcatcggcagtggccacatccggcgtaacaagagcagctatggcgcaattttcataattagtgaggacgagctgtcgtggctgttgacatgggatttgcagttgacaagctcgctggccaggcttaatttgattatccgaggaaatcgcatcgcatggcatcacaagttcttagcctttgtctcgaactgattgccggaaatttcggtcttgtgtaggtgtgtacggcaatcaaaacagaattcttaattggaaatttgcgaaactttgtcaagagcgtcggggtccttactctgtattacattcttcgtatttatttagcttcaatgcaatttatgaattaccttgtccatcaagattgtatttagttttgattaggttgtcggcagtcatcgttcgtacattctaaggcaattaaataaggtttggaaatctcgttagatattcagtcaagttattgagtaaaatacacgaatactgtaaactcggagataaagatttgcactttgcacttcaagtcattatgtccaagattttttcatcatctttgctatcctgattactcaatagtccttaaatacctataatatttggggcaagtgtctcgctgatggctaaatgaagcgactcggcgtggctgttcaataattcatttaagtcgactcaatcatttattcagcgtttaggacaggaggccgcatatttccggcgcacatagcccaaaattcagccctcaaagaccgtaaatgaatatcctttggggcgggcaacggtctttcagatgcaaatttgcgaggaacgccgttctgctggctacattcataaccgcggagctcaaacaaaggtgctgcaacaaagagtggcgatggttccgcatccccggtaaccatgaatcgtgcctggcgattagtcaaagactcgggcgcgttgcaacgcattttgcatgcaaagtggctgattttcacaaaagtcgaatgccacacgcccgtggctcaggtgcagatacaattacacatacagacacatataccggtgcaggtgtagaatggcaggatagcagactcaaatgcagatgcagatacagatactttagcatcttgagctgggggatcgggagcatgcaaacgaggtggcacacaatcatcagctgcgctgatgctttcgattggcaggtgcaatttgcactgtttgcttgcacttttgccggctttcgagaccaaactgccacgaaaggtaggcaacactcttctgcaatgcaaattcacttaactcaagagtcctgccagccggaattcctgaaaaactgcaaatagccgagagcgtttagattaatgaattgtatgcccaggctgtgggcagaacgaaacttgtgtcattataatttccagcaagtgttgaattagtaacgccaaacaccgcaaagtcaggaaaagaaacagattgcgccccagggaccaacatatatacatataacattagaacgcccacacactcgctggcaataaataggatgttggataaaactttgcccagttgggtagcgtccttttgaataatttagtatgatgtgcgatatgaaaacggccaaggagcagggaagcagggaacatcaaaatcacagatactcgcactttcagcggcctgcactccgattatcaggccgggatttagtggagccataaagtaaagttaagtgacaactttacagctcggcctggccgcagaaatgaaacgaaatgaaggccaaatgaaacggcaagtcgtacaaatcagcagcccaacgatggtccgtttccgttttgtggcagagtgcaaacacgcccattgcccgcttcaagtacacagagaagaaaggatataaaggatatagacaagcgcccacactttgtgttactttcctcattaatttaacatcttaaattctatatattacttatagtagttatttgatatttaacattaaattaagttaaacaaaaacctttgccatatccattgcactcagatcccaagatcacagtttactatcaaccattatgaggagcaataaactcctaatgcatttctgattgatgaaagtcatatcgaatacctaaacgatctgcagtacacccaggagccaataagctccaaacgttttgtagttcgctgtgtacgcgcaggatatgtggtaggatgtgggcgagtgggtcctgcgtaaggtcacaccatttgtcaagtggcggctaaagccgaaatcctttttgtgcaaacattttgcgctccccagcgccacagaattcagcctaatgctcctgccacagagccccggcaattgcacaccagatcccacaaaatccgcactagagccaaaataaaaatgtgcgcccgtatggaggtgggttggctggatcctttaggattcgttgccatgtttgggtgtggatttcggcttgggtttccccatattttccccatattcggtgtgtgtgtgtgtgtgtgcgtgtggcgtgttagtttatttatgacttgatgtgcgtctgtttaaacagtaggcgtctacaggcgaagtgatggcgatgatgttattgccgtttctgctcctgctcctcctccggctccagttgccgggatttcacttgtcggacacatttcacacggagagctctttgtcctgggcccatcacgaaatccatttaacactcatgtacatgaacatgtgtctggtctgccagggagcgctccggttcaagtggcccagctccttgggagcgagcatctttggggaggagaacggacggagccggagcaggagcgtagcactctgctcgggtaatacagcatgaaaagtatttcacgctgacgcttgggtttaacgtcaaacaattgacgttgagcgccaacttgtgcgacgataataaaagtgcgagtttcagccacttttgggagttcagcccagcatttagccagcgaatctgtcttttcggataactttgtccagctggtaaagggggtactatcatgctatcattttttataagtttttatagatttcaagggaactgaaagggttaacaatcaatagtttcacaattatctgtaaacaacgctcatattttcatgttttcaactaccaaatccattgcttatatgacacatttacctactgtactggtaaattatccttcgctttttatttagatacagcatttcttgaacttaaggcatgaaatatgtatagtagcttagaaaatttctagcttgtttttagctcattcttgcgtggaaaaatggcttttcatcgcggagtcgtcagcactgtttgaaatgggaatcggggaaaactggcaactggaggctgttatgaagttgatgtgtaattgtctgagcttcgactttgacttcggctcaagttttatgtgccaggacgcagagataggatcctggatgcgcattttatggaagggcttttctacctgagttgcgcatacgccccgttgccttcaatgggatttcgtcttatctataactgctcgcattttcccagctgcctgccagtttgggtacacaaattatttcattagactcacacctccctctacttttttttttgctttggcccatccttgggcaacgtgccgcctattactgaaatgtcgtgccgggcaccatcggcaaactttccccaatgcaaacaagctgtcagctcgtgcggtctgcccgcctccgtcgacatggagtaatgggtatggtgcggtcgaggcatgctaataagctgggctgtcactaaattagtttaccgcacaggccgtgcataaagtgacatccgagatgggggaagcaggatgcgggatgctgctgaagctaattaaaaagtttttcgtcgatttttcgattttaagcgctggcaggcgctcgctcatgttgacaattcaatttgacgtcgagcggtaataaatcttatttgccgtgcaaccagcaggccgtaattgaaagtcctgccagtcctgccgccaccacgtgccctcaattcggcggacaaagggaccagaggcgcgcgtgcctgtgtgtatttgccgagcgacatgcataacaaatgcgttggcagccagtgcaacgtgtcgtatgagcaacgctggcccacagggcgggcacgcaaccgaatatccgcataagaaattaaaatgcaaccgtccgtccgataagggagactcccttccaccgcccgtcttccgtgaaatggagttgcctgcgggtccgaaaagcaaacacttctgcacgggaagggagcatccggcacgtgagctaacccagcacataggaggctgggtaatagcacacttttggctccaaggcctttgttttacaagcattccataccatttataggactagacgtgacatttttaatatactaattcaatctaaatggacaaagacaaaccttgaagccttaagctactcgataaattcccgagatttccaaacacctgagatgaaaagctcttttcccaccccctcgattgctaatataaattaggtgtcgtacctaaggctcggccacaagattaattagcattgctgcggttgggccaatcggatccaatccaagtggtttgccatggcagccatggcaggagtgtcaatctaattgagatttctgggaaagtctgaatggcaaatagcaatcgcggtcgagtgcaatccgaacgtgaccctgaatggcgcgctatccagctgacctttcaactggccttgcacacaactcatcccacaccgcactgattctgtttccccaggacgccgccatctgcgtcaagttccacctggagcgtgagaagaacccgcacaaattcaacagccgcatgaagaacaagctgtggtacttcgagtatgcaacatccgagacatttgcggcatcctgcaagaatctccacgagagcatcgagattgtggtgagtggagggggaagatgcaatcgatgtggtggtcacccgtcgtccgtgattcattagcggatgctgtaccgatagctgcgcagcgtgtaaccttcgctccgtatttgcagtgcgatggcgtggccctggacttggccaacggaccccacttgcagggagtggctctgctcaacatcccgtacacacacggcggttccaacctgtggggcgagcacctgtctcagaaacggatccgcaagagtgccggccccttcggcaagagtaagaaactacgcgccggcgacaaggagttctccgccaccagcttcaattccgtggacctctcggtggccattcagggtaagtcaactatggccgatttggatttatttgaatgtaggcaacaatagaactaatacgttttttatatgaatcctttctagactttggagatcggctcatcgaggtaattgggctggagaactgcctgcacatgggccaggtgaggactggacttcgcgcgtcgggacgccgcctggcccagtgcagcgaagtgatcatcaagacgaagaaaacatttcccatgcagatagatggcgagccctggatgcagatgccctgcacggtgagtgatctacaaactatgaaaatgccgacatagtttcatgattacgttgaatttcctcgctgcagatcaaggtgacccacaagaaccaggtgcccatgctgatggcaccgcggtcggaaaagggacgcggattcttcaacctgctgtgcagctgattcaggcgcagcgcatcgagcgacttcatgggccggagtgcccaggagtcggccgatgagctggatgatgactttcggatcgtccctagaagcaccaccgtccacaacatagcctagcgtcaatagctttagcccagtccacccgcgatcgcatcgaattggttaaccctaggttaaggcttcccttatgatatgatatgatatgacatgatatgatatgatatgtgtagatctgctatatgtgtatgtattcttgtatgcatgtatgtcgagtgagttacagagctttatatttagtgttagactagccaaatatacaaccgagtcaagtccattccaatggcatccgagtgcggtggctgtatatacatacatagcaatactgcgacggctttaggccaccggatattttaagaacacactttaaaagcgatagcatagcgaaaattgtccaaagatgcaactgaaatgagaccaaccaagcaaccagaacaacaaaccaaacacaaaaaccaaacagctaatagtagtgcgaattttatgccctaggctaagtacgagtatgtaatttattccgtcatttatcagcagtggtgagtgttgctgggatcgacgggggatatatgtatacgtctaccgacgtatgtagaaccaactcacatatcattgatttccgactcgagattttgcatttgagcagcactccgccactgaactacgaactttacttgtttttttttttatttttggtaatttatattgtatatagcgaaacaaatgtaacttggcatgatgcaagtgtcaactaaatggtgcagctttaaacgaaattttatatatgaacacatatattgagatgacacaaaccggatgttgaacaatacatacatagcatatatatttcgtatagtcgtatatgtttgttaagtgccaataaggtcctcacaaatacaatactcatagaagaataccctgtcccaagccttttctcacccccatcagtaaatttaaccgcccaggaaaaatttcaaatcgaaaaaccacattccaagcatttcccagaccacgtgtacatttttagacgcaaagcacgaagtagtgcaaatctggtaaagtgaaatcaccaataatcttgtttgttaaacgtagtatccctagaatcaaataactactagctgatagttattgaatggcacgaaaccaaagagcactatttttgaattattaggtaatatgagaggcactgctcagatggaatgttaattggatatactcgcaatataatatgtgtccttcgaatcgttactccccctaagtagttcggaatattaaagcttacttcgaagactaaccatagtttttacaaacacttcacacctaatgttatggagcgcgtcgagatatcctagccattttccgagtccaaattgagttctcctcgtacgtgccatcctaaccgaccttagacttcctcagcaggatatccgcactgcacacgattaatccttaatgtacgtggactcttgtatactgtcgaactactattgcaaaccaacgtaatatacataaaagtcgattta

SEQ ID NO: 1466 - DNA, 3399 bp, DROSOPHILA
agatttcttaatttattcgaaattataaactaaatacaaaaggtatatttattgtggtagtttgaatttgaactaatttgacacttcaaatatacaaatttaaatagtatattcttagaaatttctatttggtgtgattaaatataaatacataagtagtttataattggaattcgagttacatcagctggcaaattcggttcattcacaatcaatccgtaacaagaccaaatcagatcggttctggccgagattgccggcattgtttcgaaacaaaaattccaattatccggaataacaaggcagcctttggcccagcactcccaatgtagtttcgttggagctgtgactcgcagccggcaggaacaccaacacttcccaccagcgaaatccccccaattcccgcacccggcagggactcggatgcgtcccgatccgcacacatgagatgggaacttcgttatggctggcaaattgtcacgttccgaacaaattgcgctactgctgccgccgttgcatgccaccaacttttgtgtcctgtgtctttgacaagtgcagtggagataatgccgaattcctttccgccagagggtcgtcggcgggagcgaaggtcgggaaacttggtccttcgagccggatgctgctgcatcggcaaatactttctccacaaccgctgcgcctcgtcggtgaagaaggagtgcaccttgggcgaatactccgagctaattgtcccgcccacggccatctgcccggcggtactcgaccgccagcgatccgtgaatcaggctcacaaggccacgcacttccaaatcacgccgccggacgagctgagctgcccgctgctggtgttcgtcaatccgaagagcggcggtcgccagggggatcgcatcctgcggaagttccagtacatgctcaatccgcgccaggtgtacgacctgtccaagggcgggcccaaggagggactcacactcttcaaggacctgcctcgcttcagggtcatttgctgtggcggcgacggcaccgtcggctgggttttggaagccatggactccatagagttggccagccagccggccatcggagtgattcccctgggaacgggcaacgacctggctcgctgtctccgctggggcggtggatacgagggcgaaaacatccccaaactgatggacaagtttcgaagagcctccaccgtcatgctggaccgctggagcatcgaggtgaccaatactccgcacagcgatgacatgcgacccaaggtgacgctgcactcgaacatgcagaaggtgattgagctgtcgcaaagtgttgtggtcgacaaatcgctgatggaacgcttcgaggaaatccaacggcagagcaagcaggtggccacgtccatgggcacggcggcctcaagcacatcgattatgatggccagcaagacggaaacggaaatggaaacgatggccacgatggagttcggcagcagcacgaccaccaccaacagaacgaccacgaccaagagcatttcgatgtccacgttcgagacgcagtgcctgcaacagaccctgcggacagcgatgagcagcagcagcagcaacacgagcagcggcagtccgtgcaacggcaaccaggatgcggaaacggaagtagattcccatgccgctgccgctgccgatgtccgggagaagtccgtgcccaggaggtcgggtgaaacggaaaagcaatcacttgagacgctgctgctgcagcacaaacagcagatgcaacaacagcagcagcaacagcagcaaggagtcacatcactagctgtcgaggaagctgcaacagcaacgccagtcgggagtaatcaaagcgataatagtagccagcgcaataagcaaaacaacatccttaaacagcaaattacattgtcattggacttgtccgaccatgaggacgagcccaaggacgatggcggtggcgctggcgatggtaccaagagcaacggcaacagcattccggcaacaccagccacaccaatcacacccaccactccgaatgccgcatcaagtgtgctgcagcaacaacagcaacagcatctccagttcgagcagcaacagaagcccatcaaagtgcaatccgacaaggactgcacggtgccctacaacataatcaacaattatttctccgtcggcgtggacgccgccatctgcgtcaagttccacctggagcgtgagaagaacccgcacaaattcaacagccgcatgaagaacaagctgtggtacttcgagtatgcaacatccgagacatttgcggcatcctgcaagaatctccacgagagcatcgagattgtgtgcgatggcgtggccctggacttggccaacggaccccacttgcagggagtggctctgctcaacatcccgtacacacacggcggttccaacctgtggggcgagcacctgtctcagaaacggatccgcaagagtgccggccccttcggcaagagtaagaaactacgcgccggcgacaaggagttctccgccaccagcttcaattccgtggacctctcggtggccattcaggactttggagatcggctcatcgaggtaattgggctggagaactgcctgcacatgggccaggtgaggactggacttcgcgcgtcgggacgccgcctggcccagtgcagcgaagtgatcatcaagacgaagaaaacatttcccatgcagatagatggcgagccctggatgcagatgccctgcacgatcaaggtgacccacaagaaccaggtgcccatgctgatggcaccgcggtcggaaaagggacgcggattcttcaacctgctgtgcagctgattcaggcgcagcgcatcgagcgacttcatgggccggagtgcccaggagtcggccgatgagctggatgatgactttcggatcgtccctagaagcaccaccgtccacaacatagcctagcgtcaatagctttagcccagtccacccgcgatcgcatcgaattggttaaccctaggttaaggcttcccttatgatatgatatgatatgacatgatatgatatgatatgtgtagatctgctatatgtgtatgtattcttgtatgcatgtatgtcgagtgagttacagagctttatatttagtgttagactagccaaatatacaaccgagtcaagtccattccaatggcatccgagtgcggtggctgtatatacatacatagcaatactgcgacggctttaggccaccggatattttaagaacacactttaaaagcgatagcatagcgaaaattgtccaaagatgcaactgaaatgagaccaaccaagcaaccagaacaacaaaccaaacacaaaaaccaaacagctaatagtagtgcgaattttatgccctaggctaagtacgagtatgtaatttattccgtca

SEQ ID NO: 1467 - protein, 791 aa, DROSOPHILA
MRWELRYGWQIVTFRTNCATAAAVACHQLLCPVSLTSAVEIMPNSFPPEGRRRERRSGNLVLRAGCCCIGKYFLHNRCASSVKKECTLGEYSELIVPPTAICPAVLDRQRSVNQAHKATHFQITPPDELSCPLLVFVNPKSGGRQGDRILRKFQYMLNPRQVYDLSKGGPKEGLTLFKDLPRFRVICCGGDGTVGWVLEAMDSIELASQPAIGVIPLGTGNDLARCLRWGGGYEGENIPKLMDKFRRASTVMLDRWSIEVTNTPHSDDMRPKVTLHSNMQKVIELSQSVVVDKSLMERFEEIQRQSKQVATSMGTAASSTSIMMASKTETEMETMATMEFGSSTTTTNRTTTTKSISMSTFETQCLQQTLRTAMSSSSSNTSSGSPCNGNQDAETEVDSHAAAAADVREKSVPRRSGETEKQSLETLLLQHKQQMQQQQQQQQQGVTSLAVEEAATATPVGSNQSDNSSQRNKQNNILKQQITLSLDLSDHEDEPKDDGGGAGDGTKSNGNSIPATPATPITPTTPNAASSVLQQQQQQHLQFEQQQKPIKVQSDKDCTVPYNIINNYFSVGVDAAICVKFHLEREKNPHKFNSRMKNKLWYFEYATSETFAASCKNLHESIEIVCDGVALDLANGPHLQGVALLNIPYTHGGSNLWGEHLSQKRIRKSAGPFGKSKKLRAGDKEFSATSFNSVDLSVAIQDFGDRLIEVIGLENCLHMGQVRTGLRASGRRLAQCSEVIIKTKKTFPMQIDGEPWMQMPCTIKVTHKNQVPMLMAPRSEKGRGFFNLLCS

SEQ ID NO: 1468 - DNA, 4882 bp, DROSOPHILA
ttgtatagacgcgccgcatcaagaatcatgcagacattgtccaaggccagatactggcgtaaataattcgatatggccatctccagatcctggaaaccatactgattggccatgcccagcacatcgatggtggaatcctcgtccaatgtggacagcagcagtgtgcccgagtaaatgtagcgcagcagcaccttgaacgcttccagcggcacctcaagcggtatttggcgctgtgtggtctccgccatgccgccgtacagcagcgcccggaagtattcgctgcgtgccgcgagtatgacgcggtgggcgggtatgcgctcctcctcgacgatgaactccacgtccgcgtactgttcgttcatgcagaggcgcgccatgtccgctgagaagcgatcgcccagatcgaccacgtcggtgtagtcctgctccatggcgcccttcttgccgccgccggacatcttatggtgtccctggctgctcatccttctcttttttgtttttcttccgtgcgatgtgtatttatgtgtgtaagcagccagagggaacagttgacaattaacgtttcgtctcgcctgctgcgtcaatccatcgatgacagttagtgatatcgataatatcgatggcacaatagggattcttctattgcggcgaaaaactgttatatgtgcagtgtgaccgtaggtgtgtataccatttaacgcgtacaacaaccatatcgacagccgtctgctagcgagcacatgaaccacatggttgcatccgataacatttagcgaatacatgaaccaaatggtgtctgtctaatatgccaccactattagcgcgtttcgggttggtgtctctgcgcgctcactggtcacacacggtcagtctagccacagcagttagcgagtgcagtcaccacagtgcgagtgcttatcgataaaaccagcaagtcatcgatttttagaccgaagcgctctgtcaactgctgcgcacggtcactctacacaagtatttcgtaccgtttgtacgagaaaacagagaagagaaaaacacaagctcagcaacgcatcgatattcggcacagtcccaaaagcaaacgaagtgatagaagctgcgtttcttagccaattacctcttcattgcaatcatgaagttccaatacaaggaggagcacgccttcgagaagcgtcgcgccgagggcgacaagatccgtcgcaaatatccagaccgtgtgcccgtaagtactcaaaaatatatatataaatgcatataggtataaagagacgtgtgtgtgtgtgtatatatgcgtgcgagtgtgtgtgtatgtgcgagcttctgtgtatgcgtttgttttgcgtcgttttttttctcgctctttttttttgtgtttgcaccgaagaaaatcaatactgcgcatattgggtatttcgattgttattacaatattattgcactggcacatcaggtggctggggaaatttgtgcgatgggtattgcataaagtgcattttgcattactggtggggggaacaggcgacaagctctcaaaagaaattcaaacgaaaattctgccccctgcatacacacatacgcacgcatacacgcgcacacaggcacacagatgtcgacaggaaaaaacaaaagcaaaaaaagggagagaacaaagcagccgtttcacttgctcagctgttgtgatgttgttgttttcagtgctagatttcatctgtgccacctcttcctctcctctatcccaccctctggctacacagcaagaaaatcgcatatatctatctgtcatcataatttagttacaagcaaagttttgaccaccccgttttttttctgtgtgtgcaccaaccagttgttttcgattttaatttcgtttgtttgttggcaaaacgagcgagtactgcgcataaaaaaagtcactaatactcactaatacacacttatactagcgctgcttgttttgtttttcgcaaatacacaaagtgcgactggaattagtcatagatgcgctgctgaacacaaaacaaaaataataaaaaaaatggaaaacagaaaggttgaaaaaaacaaaaacatcttctgcttcttctttgttgtttttctgctatgtatgtatgcatttcaccacgttatcagcgaaaactcctttcacaaaaaccaaaacaaaaccaaacgaaacgaaacgacaaactgctgaaggtgccccaatcgcagcgaaaagtgcagttcttgttttcgattttgattcggactgcatatgcatatgtatatatgtacaaatatgtacatatgtgcgctatatatgcacccccgaaatattattgccagtgttattttagtgttttttttttttggcaagtgcagcagtgccaaatcacaaatcacataacagctgagcgaggggcaaggccagctggtcgctcggaccaccagcatatccatatatatccgaattctatagaatatacttagtacatacatacgtactagcacatctcatacttgtgccttgagttcggccaatgacgataacgaatttcgatagaacactagtgtatagaggggtggcattcgcgacaagcagtttttgcccatttcgtattcactatgttggcacccgcttcctgttccaaaaaaaaaaaattggacaaaccagtttgccaataatttggctaaggctaactaatgagcccctggctagaacggatcgtctagtctaggccagctagcaattattccagagccaaggaaatgcagtagattcgttacaaagctcacttcaatgaccaacttggtcgtcttggtgatcaatttggctaaaatgctgtaaaatgtgtatgtgtttttgcataatgaacaaaaaaaaacagatgatacaggtgaacttgaatgtaaacaggtgctagaaatcttaattatattacaaaacatataccccttgaaaaatgcattgaatttggcttaaaaataatatgtgaacaaaaacacacgtgtgtgtaattacacattccaacttacgaaattccaaaatgcattacgaaattactgactgaaattacgaaattactcattttcctgtctaaatataatatgagtcaggccaataacaatcaggtatagttgttcgtaaacaaattagttttcaattaatattaaggtattttgtacactagatagcaagcatcagaattcataagactatagtttatgttttcggcattatcatattccaaggtagcacgtattcgagcacacttgcttccagcaatgcaaatgccatttgtagccaaatatgtgagccttattgggcacgtaatcaggtgcgaaatgtgcgcacattaacatgcacaagtagcccgcaacaacaactcacctcctgtatttcttcttctatttaaacccaaaggtcatcgtcgagaaggctcccaaggcgcgcatcggtgatttggacaagaagaagtacctggtgccttccgacctgaccgtcggtcagttctacttcctcattcgcaagcgcatccacctgcgtcccgaggatgccctcttcttctttgtgaacaacgtcattccaccaacatcggctaccatgggctccctgtaccaggtaattaccacaatgcccattattattagccttgcaatcgaatcacatacgttcgatgtatttttataggaacatcacgaggaggactatttcctgtacattgcctactccgatgagaatgtttacggcatggccaaaattaactaactttgctccggtcgggatgcatcggaatgaagccccccccctatacagaaatctatatataaataaaatatattttgtgtttagcatgcaagcttacaatatggacggcgagttagctaaacgaattgaggaaaaccgcaggaaatgccacatgaaaagaacttgaaattgatctgatacgcagggcaacaaaaaaaatccacaaaaaccgaaaactacaaaaacaattgttatgtgaacattattttatatatatacattttccaaacgcgttagtatttcaattaaactctgctttgtgtcctacccattaacgaaacaaccaaccaaccaactttccccacaaaaaacagatctattcacaccctttctgggccatttaatttccattgctgtaattgatccgtgcgaatgctttgtactttactttgttactttgctaatatttcaatgaattcactatttttttttttattcacgatgcaacaaaattctgtgcatatttagtgtgtatggttacgaataggactctctcggttaagtgtacggtaattaatctattattaaataaacaaaaaccacaaaaatacacatgcaaagggtgtttgtttatttggattgttcttcgttttcagtttgcaatcacgtatatcacgcttagatgattcagcgataagtgacaggaagaagttattttatactgctttttcttttgttcaccgaacaatgagtccttatcttttaaaaatgaaatgagctttagcaatgagtgggtgtttttttttattctttgctattagtaacaaaagcatttatttattttaaattgaaggcgtaaaaggtagtacttatgataccattcgcaacgcaaaagtttaagtgtgcaaattaaattgaaaagaaatcactttgtttattgtttgcttatcttatcgcagcaaaggcactttgctagccattcaaaattgccgcccacaaacgtttttatgggcagcactgtcatcaaaacacagctggtcacaccatcaagtgctgcaaagcaatatctcaagtcagccataaggagagcatgtgctaaaaagggacagctccacacaataagtacgattaaattgcgatatatttttggtagttagt

SEQ ID NO: 1469 - DNA, 635 bp, DROSOPHILA
gtaccgtttgtacgagaaaacagagaagagaaaaacacaagctcagcaacgcatcgatattcggcacagtcccaaaagcaaacgaagtgatagaagctgcgtttcttagccaattacctcttcattgcaatcatgaagttccaatacaaggaggagcacgccttcgagaagcgtcgcgccgagggcgacaagatccgtcgcaaatatccagaccgtgtgcccgtcatcgtcgagaaggctcccaaggcgcgcatcggtgatttggacaagaagaagtacctggtgccttccgacctgaccgtcggtcagttctacttcctcattcgcaagcgcatccacctgcgtcccgaggatgccctcttcttctttgtgaacaacgtcattccaccaacatcggctaccatgggctccctgtaccaggaacatcacgaggaggactatttcctgtacattgcctactccgatgagaatgtttacggcatggccaaaattaactaactttgctccggtcgggatgcatcggaatgaagccccccccctatacagaaatctatatataaataaaatatattttgtgtttagcatgcaagcttacaatatggacggcgagttagctaaacgaattgaggaaaacc

SEQ ID NO: 1470 - protein, 121 aa, DROSOPHILA
MKFQYKEEHAFEKRRAEGDKIRRKYPDRVPVIVEKAPKARIGDLDKKKYLVPSDLTVGQFYFLIRKRIHLRPEDALFFFVNNVIPPTSATMGSLYQEHHEEDYFLYIAYSDENVYGMAKIN

SEQ ID NO: 1471 - DNA, 3177 bp, DROSOPHILA
ctgcaccagctccagctccacccttgctctggtagtcctcggccctgtagcgggcattgagtacttccagcaggtgggtgcacacctcgttgggatccaaaacgggcagtagcttgaagatcattagggttttggaaccgccttgcgaccgggtggtgccgtagaccttcacgtagttgttgaccattacttcgggtgccttgagagcgtcgccctcctcaagccagtagtgcgcatcgatcctgccgctatgatcctccagggtgtaggtgatcttcgtcgaggaagtctccacgttccgcactatggccacaacacatgccatggcgtactgcatgccgaacaactcgatgtttccctctggggcgtccacaatctgcttcaccaccaggggcactattccctagttgcaatcatacggaatcatgttaggttgtgcaactttactggcgtctcactcacttacttctcccttttgattgctggcggctccagttggcgcagtttgtgtggcattgaaatctccaactaaaacgagcttcgttattagttcccttaatttctctgagctacgggctatacttacatgaatcattcattttcttggcttttgagggatttgtaattgagtattctatataatttcacaagggccgctggtaaacaataaaacgcgcgaacgtagagctgatagtgtggccgtaggtcgaacacgtaggaataacatctatttagtatataagaaatacgaaatattgtagtgtcaatatttcaatatttttcctgaaaaactgaattattgtaataaattgggaatatacctttttcagttaaaacaaaaaaagaaaaaccacaaaattttttattttttacaggacttacagcccccttaataattcatttattttcttatgggtaacacaatatttttcttagcactaataatttcagaaacacttagaaacctaaaacctttttcagcgttcgctgaacctctttcctatcggtctttcttccttttttctttagtttcagcatgggctgaaggacaaatgtccttgttcaggcactccccacaatttggcttcactggggtgcaaatggtttgtccgaatcccacgaacaaatgattgacctctgaccagaggctgaatggcagccacttctccaacgccacacgggtttgctcgggctccttggtgggcttcggcacccagcccagcctgttagaaaggcggtggacgtggacgtccactccgattccggttatcttgttccaggccactgccatgcatatatgggccatcttggggccaactcctggaagagctacaaggtccttgacattatctggaatgtccgaaccatacttgtccgtcagtatctccacggtttgcttgaggtatttagctttgttctggaagagatcgagagtaagtgcgatatatttatttattattaattccaccaaaccttgtagaaggatacgggatgcagtaaattctcgagttcagtcactggcatttcctttactttcagtggagttagacctcggtctttaaggcgattcatggcttcataagtagtttggtctttggtttgactggacagcatcaatgccactaagttttggaagcgctgggtctgcaaggaagttgtttgcttgtaacatattcttctatgtacttaattccacttattggaaataccttcgagtctgcttttaaatcggcgcatcggtggcatcccatggtgtccactggcgcagttctggagtttctcataatgcgaatgttttctaggtggttaaaccacaaaggatgtggtgcttgcacctcagaaaaagaaggggaatcctccggagcttcctgttttatttggggttccacctcctctcttatcttatccactctcactggggagtccacagcatcagggaccaccttgcatatgaccacagtagccgaacccatttgaactctggttaccatgcgatcatcctttctaaactttttgggtgccactcgagctggagacaagggctccattttaatgttagttttcttcacggcttccccatttaagagacgctgcttgcgggtttgcacgggggagaagaacactgagctactcgatcctgctgcgccagcagatacaccaaccagatcctctatatcctggaagatttagaaactgcgtcttgagtatcaatttcattgtttatcatgcatttccgcctaccctcacgttatccgccctatttggacgactttttatttccgtgggttttataagatctccgcgttttgccaacttgttggccaacgttaatttctttacatttttggccatagctaatacaatttctgcgcttcagtttcagtttccatgtttgtttacatttcgaacctatcgatttcgatgtaggagaaacggccacactttacaactaagtagccgggaacatttgaaatttcgaaatattcaactcatgcaagttaggattttaagaaccatttttcgtatgctacagcataataagttataagctattacaatacattttaagccacaaatttaattttaatgcacttgatttaaaaaaaagtacaaacttttcgatttcgttatcaacagctcataaaatttaacaaagatatttaaaataaattttatacccgatattcgtatactagattcgttgaaaagtaagtaataagcagaaggaagcgtttccgaccaactacatatatatatattcttgatcaggatcagtcgatctagtatgaacgtcgagatcccaggaactataaaagctagaaggttgagattaagaacagtggttctagagacatagacgtagcgcaattttgtagaaccgatttccaatctaacgcccataaacagcccgaaattgtcatgcccaaacttttgaaaaatgttttactattttttgatttttatgttagttttgtaaatttatatgccaaaatactttacgcccacaagccgcgtaaacctgtcacgcccacattctcagcaacatttaaatttttattttattattttgtttccaatttctaccaatattccaaaaaatattgaaatttctcgttcacacttccagctgtgcgagggaactcgactatagcattctctcttgtttttaatctgatg

SEQ ID NO: 1472 - DNA, 1056 bp, DROSOPHILA
gatatagaggatctggttggtgtatctgctggcgcagcaggatcgagtagctcagtgttcttctcccccgtgcaaacccgcaagcagcgtctcttaaatggggaagccgtgaagaaaactaacattaaaatggagcccttgtctccagctcgagtggcacccaaaaagtttagaaaggatgatcgcatggtaaccagagttcaaatgggttcggctactgtggtcatatgcaaggtggtccctgatgctgtggactccccagtgagagtggataagataagagaggaggtggaaccccaaataaaacaggaagctccggaggattccccttctttttctgaggtgcaagcaccacatcctttgtggtttaaccacctagaaaacattcgcattatgagaaactccagaactgcgccagtggacaccatgggatgccaccgatgcgccgatttaaaagcagactcgaagacccagcgcttccaaaacttagtggcattgatgctgtccagtcaaaccaaagaccaaactacttatgaagccatgaatcgccttaaagaccgaggtctaactccactgaaagtaaaggaaatgccagtgactgaactcgagaatttactgcatcccgtatccttctacaagaacaaagctaaatacctcaagcaaaccgtggagatactgacggacaagtatggttcggacattccagataatgtcaaggaccttgtagctcttccaggagttggccccaagatggcccatatatgcatggcagtggcctggaacaagataaccggaatcggagtggacgtccacgtccaccgcctttctaacaggctgggctgggtgccgaagcccaccaaggagcccgagcaaacccgtgtggcgttggagaagtggctgccattcagcctctggtcagaggtcaatcatttgttcgtgggattcggacaaaccatttgcaccccagtgaagccaaattgtggggagtgcctgaacaaggacatttgtccttcagcccatgctgaaactaaagaaaaaaggaagaaagaccgatag

SEQ ID NO: 1473 - protein, 308 aa, DROSOPHILA
MEPLSPARVAPKKFRKDDRMVTRVQMGSATVVICKVVPDAVDSPVRVDKIREEVEPQIKQEAPEDSPSFSEVQAPHPLWFNHLENIRIMRNSRTAPVDTMGCHRCADLKADSKTQRFQNLVALMLSSQTKDQTTYEAMNRLKDRGLTPLKVKEMPVTELENLLHPVSFYKNKAKYLKQTVEILTDKYGSDIPDNVKDLVALPGVGPKMAHICMAVAWNKITGIGVDVHVHRLSNRLGWVPKPTKEPEQTRVALEKWLPFSLWSEVNHLFVGFGQTICTPVKPNCGECLNKDICPSAHAETKEKRKKDR

SEQ ID NO: 1474 - DNA, 6965 bp, DROSOPHILA
tgtgtggattcgtggagcaaatcgaagttggcaggattaaaggcattcgcgaacgcagaggcagcagctaaagggccacccatgcaccaaagaaacaaactagctggcccagcggttcatttatctgcgactaacaagctaaaatcggcgtaattggcaagttcaatgcacgactaatatatttggccacacttgccagtgtatgtttgttcgtgtgcgtgcctgtttgtgtggtgtcgtctccgtacgtgtttgtgtgtgtgtccgcgacgagtatgtgtgcgcacatattcgtatatctgcaagactcgcggatgaaacagcgtgaaaagtgagcaaaatatcggggaaaaacggcacggtacggccacagaacggaacggtacggtgcgatacgatatcgagaaaaggccatcagccagagtactcctcgatccggaaacggataatggggatatagatgatacagccaatagctccccgaaagccacagcacacaataggtcggtcggtcggtcggttggttgggcgacgtcgccgagagttaaacatcaaaaatcaaacccaggaaccgacggagctaagtgtcaagtgtttggtgttgtgaaatttttcgtttccagctctccgttcagcgttcagccaatttgccaaccttttcccctctttaatttgttatccccggacaccacaagagtttcgatcaaaattttcaattgaacgcaacatcgccataaacaaaaacataaaggtaaaattcggccactacccaaacaacaaaaaaataaaatcataagaaaaaatcacgcagtaacgtagaagaagcagcagccgaagccgaaaaaagacgaaaagaaaacttgtttgaaaaggccgaaccgaaagaagaaaaagagcagcagcagcagcacagcggccaagtttggaagaatttcagaatttcagcgtgctaggaacggagcagcggaccggcgacgtcaccaaataaacgcccatcaccatggacgaggatgacaacctgtccaatgccgacataagcatagatgacgaggaggtggtgcgggagcagacccaccatccgcccatgcaagaggatcaggagctggataacgaagatgggtcatccgacgtggatctgtcttcggtgtacgtcgtgccacccatagtctcggcaccatcgcccgcatcagtgcgcatcgctggtggatccacaattggtggcggaggggtcgcagctggagcagttccaacaaccaccgataactcgcattcccccttccacgattgggattccagtgtggcggccgctgctgctccaccgccgccaccgcccaggacaggaccaactacaactacaagctccggcacagccgcggaatcgggagccgcgtccgccttatccgacgatgccggcgccaagccaagtttcttctttggcgcctcctcgttcagtttgcgcagccgcaaggaggtggccgccctgatcaacacggaatgctgccgtggcagccccacacccgatctcgactccataatggataccctattcaatccggggacgcccatcgacaatctggacaacatcgagtggatacgatggctcattgccggcggacggacgccgcaggagtttgttaaaattggtacgtcccaatgtgtgcatatcgataagtgtgttgcattttctatcgccaaacagctgatcgcaagtccgttgcccctgaaactctgaccgagcatgtgtgtgttacctgcgttatgtgtgtgtgtgtctgtgaaatgtaatggttgtagggcacgcaaagaaaaggtagagaggaagagagcataaaagcaaggtgcaaggcagcgtgaagagtgcgagtgcaccaccatggcaacagcaatcaagcgcactctctcgcacacacagcacactcactacacacacatatgcactgattaggggagtcaactttagcccaatttaatctcaactgctcatctatttgcaatgctgtatttgtgcataattttcatcactacttattactttttgtgccaggctgcgtatgtcgccaaagttgcttttatcgtttatggttgtttgtcgcgtctagtcttgtcttgtcttgtcccacttgtcagctctgtcacacgcacacatacacacactcgtgcaaactggcgggcggagacgtacacgcacagtggaatgcagcttgcaccttgtggctttgtatcagctgtttcggtacgccttgcgtaataaatgtttccgcagcatccgtcccaaaaccacacgaacacgaatgtagatggtgcttgattatatgatggcaccttttgtcaccgctaggtgctccttttttttttttgtgttatatttctttcacctttttgtttgttactcgttgcaagaacaattgcaaaattgcactggtgcggaaaaagttgattgaccgtcattgttgttgatttgacaaaaacacgcacagtggtcgcgaggggcggatgtgatgtggcccactgtaagctgtcaacggcaattgaccgaaagaccgttatgttattgggtggtgtgtatgtgtgtgcgtgcgtgcgtgtatgggtgagggtgagagagtgcaccttttttccgttcccatgtcatgtcacctccccttcccttcgccacacccttgctcctccattcggaccttgtccaaaagttctcagttagaaagagactgctgagccaagatagtgagagcgagagagagttgctaactttccgttgatcgatcgctattacaattttacaacattgtcaatcaactttccgctgcactgtggttgttattggccaatccattcgatttccttccgcatgcggcggccgacaacgttgacctttttagtcaacaaggtccgagcggaatacgtacatacatatgaacatacatatgtgtataaactacgaaacataaaacaatcgtatgtacataaatacatgtacatacgccccagaacgcaggccgaagacaaaaaatcaaagagtcacgcaactaaaagcaagaaattaactaagcaatgagtgcatcattttatttttggaactcaaatcaaatcaatagcaatagcaaggcaatgcggtcggtcagaaaaaatcagctagcctcgactggttttacaatttcacctcatcgctcaaatttgcaagcgatatttaatcgttttgtgattagaggcgggaacaatgctttgcaatcgaccgattatttcgatgattttgcatatgaattcgttgagttcaattggttaaaaaccccaaatacaacttcttaggtcaaattaccgtggatatattaataaattattattattatacacatatacaaatcatgattaacgtaccaacaagattgtcttacgcatgcctataaaattgtgcttgtgcactgatttcttgatgtcctttgtctgtaataaccggattccaatgacccataatatttaagaaaatcgatagttggccagggcctctcacataaatacagagcaaggtcttaactttttaagaacttgcggatgtgtctgttggttaaacataacaaattttttagctctgtgattcaatgtggcgatgcccttgctccttatgtgtccaaacctattttatagctggcttctcttctgcgtctgccatatactcaatgaattgcttaatggtttttaatttttgaaattttatcttgcagtgcgcagctatgacaaccacgccaaatgcggtctggtatgggtaccgcatgtggtggcctacaggtgccgcacttgcggcatatcgccctgcatgtccatatgccgggactgcttcaagaagggcaaccacacgaaccacgacttcaatatgttcctgtcacaggcgggcggtgcctgcgattgtggtgacacctcggtcatgaaggcggagggtttttgcagtgatcatggcatcaataatcgggtgaatcgcgatccggtgccaaacaatcttttggcagtggccgaggccataatgcccaagctgctcttccgcctgctgcagcacttccgtgagcacagcgacaccccactggaggtgcaagcgataacgtcgtactcctgcgaggagttcgccaacatgctgatcgatctgaacaacatgggcgaaataatgcgcaaagtgatgacgcgcacgctgataaatccggaggtgtatgccttcttcatggaagcaccgtgccaggacacccggaatggacgcttcttgaaggcgaaccgagagaagtacgaggatgccgtcaatagattcccaaacccagagccacccgatgagtacagagatctgcccgcgctgggcgacaaattggtccacaccacgctactcgaagagttcatcttctggacatttaagttcgagtttccacagactctggtctgctttctgctgaacatgctgcctgatcaggattacaaggttagtcttgatgggatcatatgatttttacatatctatatcaatatttattcgttttctgccctaaaaggaacacctcacccgcacatttgtgatgcactacagccgcataccgtccgtgttggaaatgtcccgtgatccggacacgctcagcaaccgggtggtccacatgagcgtccaactcttctctaacgaaagtctggccctcaagatggtcaacgagctgtcgctgctgcacgtaatgattattagtctgaagctaatgatgtccaagatactcatacagaatacattgcatggtgagaattattttatatatccgactgtagctctttgaacatttccatttttcgttcagatcccaacaagaattttcatttcgtcatcgactgcacgcgtcaggtgatgaaggaccactgctactggccactagtctcggactttaacaacgtcctttcacacgaatcggtggccctggtctttctgcgggacgacaatctcatcgatatgtggttccagtttctccagatgctccagggcatgaatgtcaatgtgcgcgagacggcttctcatgtggaattcgagccaaatagctactatgcggcgttctcctgtgagcttgaggccagtgcctatcccatgtggtcgattatctcgcatctgcaggatggcacacatgcccatctggcaaagaagatcatcaactactgtgtgacgacgctgcacgagtggctagactctatttactttatggaggcgcgtctatctatggttggtattttcaatccgtttattgcagtttcaataaaatccttttatttatccgtgcaggaggagatgatgcaggcttcgttccactttcccctgcatcgttatctggctgcctttgtttgccaggcggtaactaaaatgggaatcagtctgaacgatgtgctgccctcacgcccctatctgctgcccctgctgatgatccatccacttcgcgtccaggtgagtcttcaatcctttatttcgcttattttcgctttaaatagtaagaaggtcctcggttctctggtttctcagattcacattcgtttttatttcttttgttattttcaatataatttgtttttatattcttgtcttgccggattctgcatctcctgcggttcgttctcctctgatctcacttagactatgcgacagttaaacgcaagtgtgtattgataggtagtgtacaactaaaaaaaagctatgacatatgtgcgggatggaaacagcaccgcttctctccgctttagaatctattctttggcacctgaacgtggggcatgaagtcgtaggtgatgatcttggggcccaggaagccgccgtagccgttgcggcccttgtagtaaatgccaatgccggctagtggtactggtggattcgagaccacgtcctggatgtccataaacggcactgtgctctgggcggcatccttgtccagtccagtgttagtgaagtcgatgtactgattgtggcgcgacagaggtatcgagtgtgctattgtccgcgtagacacgtcggcgttgctcagacgcagtttctccctgaaatcaaggggttagttatttagtttttgctatccgaaaatagaggacacacttacctgcgtgcgccgctgacatcggtattgtcgttggacttccaatagctattgtactccggccggatgagctgacccgtccggaaatcaaactcactgtagtaggcctccaaattcagatgtgtgcccaccacacggaatcgcacgccggtaacgacaaaggaattgtcatccgtatccacatcgtccagatcgatggtgcgtttctcgtagctcaacttatgataatcaacgccattcttcacatgacgatcaaagacgttgtacttttccacgggtttccattccagagtgctttgattgacaataccacgaggcaggagttcgccctcctggatttgcagatggaaaatgcgattttgctttacaaaacgcaaaccagtcacgactctgaagaataattagtaaatatgtggttgatatttcaaaatcaacagattcaactagaacttaccggttgcgcttgacatcggcgatcgtgtcccgcagattgaagaaacgatcagacttcagaccctcctcgtcgcacaggcagaagcagtagctgcagtgccagagaaggtaacgccaccagctgtccaccttggtggtgcccctggtgcacttaccccgctggccaaggacgcgtccgttttcgtactcgatgaactcatagcgccgcgtgctattctgtggcgacgggcacacccacatgtcggagtctacgaacctgcagttgtacagacgaccactacatttcggctgacgggaacagtagagatccttaaagcagccttcactgcgggtggactgataaaagtcacacgtctctcggcaagtttcctctttattcaaatccacctcgttttcaatgtagccttgaaggaggcgcgtgacctc

SEQ ID NO: 1475 - DNA, 2685 bp, DROSOPHILA
atggacgaggatgacaacctgtccaatgccgacataagcatagatgacgaggaggtggtgcgggagcagacccaccatccgcccatgcaagaggatcaggagctggataacgaagatgggtcatccgacgtggatctgtcttcggtgtacgtcgtgccacccatagtctcggcaccatcgcccgcatcagtgcgcatcgctggtggatccacaattggtggcggaggggtcgcagctggagcagttccaacaaccaccgataactcgcattcccccttccacgattgggattccagtgtggcggccgctgctgctccaccgccgccaccgcccaggacaggaccaactacaactacaagctccggcacagccgcggaatcgggagccgcgtccgccttatccgacgatgccggcgccaagccaagtttcttctttggcgcctcctcgttcagtttgcgcagccgcaaggaggtggccgccctgatcaacacggaatgctgccgtggcagccccacacccgatctcgactccataatggataccctattcaatccggggacgcccatcgacaatctggacaacatcgagtggatacgatggctcattgccggcggacggacgccgcaggagtttgttaaaattgtgcgcagctatgacaaccacgccaaatgcggtctggtatgggtaccgcatgtggtggcctacaggtgccgcacttgcggcatatcgccctgcatgtccatatgccgggactgcttcaagaagggcaaccacacgaaccacgacttcaatatgttcctgtcacaggcgggcggtgcctgcgattgtggtgacacctcggtcatgaaggcggagggtttttgcagtgatcatggcatcaataatcgggtgaatcgcgatccggtgccaaacaatcttttggcagtggccgaggccataatgcccaagctgctcttccgcctgctgcagcacttccgtgagcacagcgacaccccactggaggtgcaagcgataacgtcgtactcctgcgaggagttcgccaacatgctgatcgatctgaacaacatgggcgaaataatgcgcaaagtgatgacgcgcacgctgataaatccggaggtgtatgccttcttcatggaagcaccgtgccaggacacccggaatggacgcttcttgaaggcgaaccgagagaagtacgaggatgccgtcaatagattcccaaacccagagccacccgatgagtacagagatctgcccgcgctgggcgacaaattggtccacaccacgctactcgaagagttcatcttctggacatttaagttcgagtttccacagactctggtctgctttctgctgaacatgctgcctgatcaggattacaaggaacacctcacccgcacatttgtgatgcactacagccgcataccgtccgtgttggaaatgtcccgtgatccggacacgctcagcaaccgggtggtccacatgagcgtccaactcttctctaacgaaagtctggccctcaagatggtcaacgagctgtcgctgctgcacgtaatgattattagtctgaagctaatgatgtccaagatactcatacagaatacattgcatgatcccaacaagaattttcatttcgtcatcgactgcacgcgtcaggtgatgaaggaccactgctactggccactagtctcggactttaacaacgtcctttcacacgaatcggtggccctggtctttctgcgggacgacaatctcatcgatatgtggttccagtttctccagatgctccagggcatgaatgtcaatgtgcgcgagacggcttctcatgtggaattcgagccaaatagctactatgcggcgttctcctgtgagcttgaggccagtgcctatcccatgtggtcgattatctcgcatctgcaggatggcacacatgcccatctggcaaagaagatcatcaactactgtgtgacgacgctgcacgagtggctagactctatttactttatggaggcgcgtctatctatggttggtattttcaatccgtttattgcagtttcaataaaatccttttatttatccgtgcaggaggagatgatgcaggcttcgttccactttcccctgcatcgttatctggctgcctttgtttgccaggcggtaactaaaatgggaatcagtctgaacgatgtgctgccctcacgcccctatctgctgcccctgctgatgatccatccacttcgcgtccagattcacattcgtttttatttcttttgttattttcaatataatttgtttttatattcttgtcttgccggattctgcatctcctgcggttcgttctcctctgatctcacttagactatgcgacagttaaacgcaagtgtgtattgataggtagtgtacaactaaaaaaaagctatgacatatgtgcgggatggaaacagcaccgcttctctccgctttagaatctattctttggcacctgaacgtggggcatgaagtcgtaggtgatgatcttggggcccaggaagccgccgtagccgttgcggcccttgtagtaaatgccaatgccggctagtggtactggtggattcgagaccacgtcctggatgtccataaacggcactgtgctctgggcggcatccttgtccagtccagtgttagtgaagtcgatgtactgattgtggcgcg

SEQ ID NO: 1476 - protein, 783 aa, DROSOPHILA
MDEDDNLSNADISIDDEEVVREQTHHPPMQEDQELDNEDGSSDVDLSSVYVVPPIVSAPSPASVRIAGGSTIGGGGVAAGAVPTTTDNSHSPFHDWDSSVAAAAAPPPPPPRTGPTTTTSSGTAAESGAASALSDDAGAKPSFFFGASSFSLRSRKEVAALINTECCRGSPTPDLDSIMDTLFNPGTPIDNLDNIEWIRWLIAGGRTPQEFVKIVRSYDNHAKCGLVWVPHVVAYRCRTCGISPCMSICRDCFKKGNHTNHDFNMFLSQAGGACDCGDTSVMKAEGFCSDHGINNRVNRDPVPNNLLAVAEAIMPKLLFRLLQHFREHSDTPLEVQAITSYSCEEFANMLIDLNNMGEIMRKVMTRTLINPEVYAFFMEAPCQDTRNGRFLKANREKYEDAVNRFPNPEPPDEYRDLPALGDKLVHTTLLEEFIFWTFKFEFPQTLVCFLLNMLPDQDYKEHLTRTFVMHYSRIPSVLEMSRDPDTLSNRVVHMSVQLFSNESLALKMVNELSLLHVMIISLKLMMSKILIQNTLHDPNKNFHFVIDCTRQVMKDHCYWPLVSDFNNVLSHESVALVFLRDDNLIDMWFQFLQMLQGMNVNVRETASHVEFEPNSYYAAFSCELEASAYPMWSIISHLQDGTHAHLAKKIINYCVTTLHEWLDSIYFMEARLSMVGIFNPFIAVSIKSFYLSVQEEMMQASFHFPLHRYLAAFVCQAVTKMGISLNDVLPSRPYLLPLLMIHPLRVQIHIRFYFFCYFQYNLFLYSCLAGFCISCGSFSSDLT

SEQ ID NO: 1477 - DNA, 6765 bp, DROSOPHILA
tcagtgggaaatcaatgttggccgccaacggggaggattgtacaatgtcccaggccttgaggacgccggaggtgacctctttgaccacatgtatgatgtccaggacatcctcgatcagagcgtccgttagtgtgggctgttgcagggcgaccaacgtggccagaagcaggggaagtacccaatttataaatctcatcctgcagccggctgtgcgtgagtgctatttgggtttcgttttgtatatgaatgtttatttatttattgcagcgcgaaatttgacgatcgttggggatgttgtgctgacgatggtggggtgtcttttaaatattatgattaaatgcttgcacaaacaagcaaacacacagacagacagatagacacgggctggcacgcaactgcgcccgctgaaaatcaaaacgcaaatgggaggatagtcacaaaaacagagagtcgagttttgtctcgagctcgagcgtcgagtttcgacgacgttggcagattaatctgctgtgctgctctcgccgctcggagattgattaaaaaatcgtacagttgtgggtttcacttgtctcttttccttctttttccgccgcctgtagacaccctgtttcacacacagacagacacaaatatgcggagagacgggctctgtttctttgttttgcaccgttctttgtcggttgtcggggaagggggaggggcagatagacagcataggtcacagcgagtttcgataactttgtctgctcgcaagtcatcgatgtttcataactatcgcactcgctggtgtacggttacttaatttttttttatttttattaattttaaataaagattatgtgcgtgaaataattttttatatttaagagaatagaataaaatttgtatataaaattaaatttaaatgttaaatttatttttacttcgtttttagagttttttctacgagatcctggccggaaaatgggtgcgcaatggtctccaaatcaagggacaagcgatgacctatatccaggcgaacttctgcaactcgatggccgacatggacctgttcttcctgcaaatctgtgccaccaacctgccgcagtacttctttctgcagaacaccatcgagttgttcgacgtaggtcaatggctggagacagctcccttgaagcagcctcaaaaggcggagcaatcctcgatgctggagggattcctaaccttcttggccaccctggtgacgagtcgcactaatctgggaaacgatgaagccacccaatgcattattgagatcagtgccttgttggctaccgagaacaagacgcattcgcagctccttgaactaatgccggagcggtcgggcaatgtgcataccaaaaactttgagaccttccttaagaagctatcggtttacaaggctccgtcgagtgggagcgagaacctggagcagggtctcttcacgcccatcgacgaggtgtgggagaagcactacgatccgctgcacgtccttttgcgagcagttcatcgtcgagactttcaatcatcgctggaccgctttacaaactatgtgaagagcaaggataagatgccggcaagtggtaacctatggccacccttccgattgcctcatgctctgcccgcaacgagctccttcagtgatccctgcaagattttgaactcgcgcatctttcactccaccatcctgtcgatatttttccgtgcagttcacacacgtgatgtttccgagcatctgctggctctggctgtgttcctcttagagattgctgtggaaacaagtgatgatgttggcagtggaactggagatcgggcccctcctgcgctggctgctgtggtggagtcatctagcgggccgggctatcatggctacggcacgggacggcatgagccgcccaagcttttccactgctatcccacggacaatctaagctgcaatctgcgccacgtggtcaagaaagtgtcgctgaagtcacgcgatccgcaagtgatcacctccagctatcggtcgaacccattttactcagatctggactttgaggttgaagcggatccagagcaatcgatgcgcatgattggtcaaggggaccccgaaggagatgaggcaacgggtggagctggactgggaatgggagctcatagcagaaggaatgtctctcaggcgctggtgccgatgagagtgcccggcatggaggtcgccctaccaccggatctttcagtagttgccgaaaccggtgtggttatccgccaggatagcaacgaagatgatctactgagagaaggcaatcatgccatggatatgagtccaccggctgctctcgatttccactttccgctgcagcagatcactttgccggagagcggaatggaggtggctattcggagagatcttctgctagccgaaacgaataatatgggcgcaattgcaggtggagctggaggtggcgccaatgcatcggccacaccaccagcaggggcttccaatgagatgttctcgcctaccacacccacaggcagcggtatgctcctgcctttccagcgggttcagcctgtagccgtacccagtagcggtaatatggatattgtaccatcaaatgccatgggtgccggcggaagtttcacatccggcgtaagtggtagcggcactggacgtagaatgaactacgaaacgggtggagcacgtaagcgatccgtggacattgccatcggtggcagcaataaggatgagctgcatttggacgaaagcattttgtccctgctactaaagcttcattctcagctctcaggcacactagatagcttctcgttgagcgacggtgaagatcaatcatctgacgacgattcgaccatggatgtggactgtaacgaagccagcacctccatggcagcagcggagagcactgccctggctgagagaggacgcagtaagcgcaactacaagaacattcatgtatcctcctcgcgcatcggtgacggaccattctttattggtaatctgctgcgaaagatcgccaagcaggatgagcagtgcgcccagagcatcgacgacatccgtgccagactctggccgaatcagcgtgaaaaacaagcagaggcgaaagcacgcgaggccaaggagaaggaggagcgccgcaaaaaagcacgtgagcgccagcagaagatgatgcaagacttcgccaacaagcagaagctcttcatgcaatccgctgcagcgtcatccagtggcatgggctacggaccggaggacgaggacgatgaggagttgtacgaggagcagccgcgtgagaaagagtacgattgcataatctgcaattgcactacgcccagtaccgaatcgaatcctatcggcttggtcgttctggtcgagtccagcggcattgttggtcatcggcggcgcatcgccgagcgattgccgctgccgataaacgcggaggatgagtcccgactggcgcacaccactcgactggcggctgaattcaacaggcgcacggaactgctcagtctgaagtttggcgatgagtcctggtatctgtccaataatatggcctacgacaacggtgtacatgtgcagtcgtgtggccaccacgttcatctcagttgcctagaggcataccttaagacgctgtacaccacccaacgtcagccagttcaggatcgtggcgagttctactgtcccgtgtgccgacagctctcaaactcggtgctgccgctgagtccacaactggacagacccacgcacctggtccgctctggtaatcagccattcgaacgtctggtcgccgatctaacagatctgattaaagagaacgaaacgataccggtaggcataatgattattaagccatttaactatttacctaaaacataaccttatactttttagcagccaacaaaactgacagaggccatgggccatgccatggaggtgatgacaaacattgcccagcgcaaggttaaatgctcctcgataacgttccgcaagctgttcattttcgttacctcgattgcgcgtacaaacctggaggcggagatcatccagcggggcggatcactatgtacagcgaatgccacgcggtacaagccaaagcgggaatgcatcgtaccgctactgcacgtgctatcggtacatgtgcgtgtcttggttgaatggccgctgtggagcagctgggcctcgttagctggcctgcccgttaccgctacggaaccgttgccggcgcactgcctcgaattgattcccagcatattagcggatcccattgctctgctgctcaagtttatcctgctggcgccactgcaactcgatcagggtgagtagttgtgcatgatatatatattaccattatatggcactattaaataccaatggttttttttatcccatttagattactttacgtgcatggtgaaagtcatgtacaatctgctgtactatcaaattgtggttcagctgtgcgttactctcaccgatttagagtgcgatcacattgtcaaagtttacggcagcactagcgttggcagtgacaactctgctgcggaatcccaacagcaggagtctgccgccgggacaacgaacaaccgtcgccgtgctggacaacagcagcagagctcctcgcagctaggaaaggccatggccctggtgctgagccagacaaatgacctagttcacttgcgacgcgactgcatacccagtaccagcagctcggcggcagcgtcggcggctggttcctcctccacaacgtccacaaaccatggagctagcgcagccacagcctcctctgccacgacgatcgaggttaatctgaagtccatggaattacagctgcaggcgctatgcttgccgtttttgcgagtagctgccctgctgcgccagcatctctatcgccatgagatgccggagatctcggcaccgggactggaatttgtgcgccttgtttactatttggaactcgtaacagattctatggactgggattgctttaatgccagcaaggggctatgctttattcccggcactgagacaacgctgccccagttctggtgccagcagttgatggaggtgcgtccgccggccgatacggtcagagaattggtgctcatcaatcagcattcgttgtggcagcagccgcgacttcttgaattgccgcgcgagtacgaacgcttgttcacggtaagagttgtgacttactatgttgattttggatatgtaataataatacgattttttcgttttccccccaaagtactaccatgagcggccgtgcctcaattgctataaagtgcccaaggagagctccatctgcctgctgtgcgggacgatcgtatgcctcaagcagaactgctgcgcggagaatgactgctgcgaggctgttcgcgtgagtagtcttaaaattcactcgatgttgattaaagtgctaatgcgtatccctttggtttatcacctaatcagcatacgctatcctgtggcggtggcataggcatctttttggtggtcacctccacgtacatcattgttatccgcggacgacgcgcctgcctttggggctcactctatctggacgacttcgatgaggaggatcgcgatctcaagtgagtaatcagagttttaatataatatgttacgattgtaatttatttttaaactactttgcaggcgcggcaaacctttgtatttgagcaaagaccgcttcaatctcctggagtcgcagtggctgtcccataagtttgctcatacaaaacacacatgggtgtttcaccgggatctcttgtgaaatatggaagatctactgcgcagcatccaggagctggttggccagatctgagatgccctatccacgcctagtcgaaccagtcaaccacaaaaccacccaaccacacaaccacacgatcacccgtccccaaaatccgccttcagcagctgaatcaccactaatccaatcaaccacctgactaaaagctagtttccacattttgtcggcttttcgtatccgtttacgcatctgcattttgtttacggctttcgatccccatcccccaccacatgccccaaacgcacctagaagcaatgtaggcaatttgcaattaattgatattaaacatttttttttaatacataaacaatacttataaatatggatgcaaagggatacgaaataccgacaactatactattgtttgttgtcaactttttaagtgagaaacgcataatacaccttatacagaagatcacataatcttgcgatcgacaacaatatttaacaaccaattataaattacaaatattattacccacccacttgctgggcaaagacgacgcgaaaacagcctggataaaacggagatggtgcatcgcgcgggtcttcagttgcgttctacctaaactaagtcttaagtccttaactttatagatttttttttttagggaaagaaaggcaagaaggcaaataacaaattacgagtaacaaataacacgatactacacaatataaaattgcctacattggactcatgagtttgtgcatgtaaaaaatgaaaaaaagattatatagttaatatatacaaatacaatatacactacagttaattgcaacataaacgaaaaatgatacaaaaaaaaaaaaaaaaacaataaacgaaaagcgaattgtgaaatgcatagaaactagtttgcatgccccattatacataaatattatgtaattaagaagcataagaaaaaagatgattgaaagaacgagaagggtaatcaatctgaattggaaacgctaggat

SEQ ID NO: 1478 - DNA, 4413 bp, DROSOPHILA
atgacctatatccaggcgaacttctgcaactcgatggccgacatggacctgttcttcctgcaaatctgtgccaccaacctgccgcagtacttctttctgcagaacaccatcgagttgttcgacgtaggtcaatggctggagacagctcccttgaagcagcctcaaaaggcggagcaatcctcgatgctggagggattcctaaccttcttggccaccctggtgacgagtcgcactaatctgggaaacgatgaagccacccaatgcattattgagatcagtgccttgttggctaccgagaacaagacgcattcgcagctccttgaactaatgccggagcggtcgggcaatgtgcataccaaaaactttgagaccttccttaagaagctatcggtttacaaggctccgtcgagtgggagcgagaacctggagcagggtctcttcacgcccatcgacgaggtgtgggagaagcactacgatccgctgcacgtccttttgcgagcagttcatcgtcgagactttcaatcatcgctggaccgctttacaaactatgtgaagagcaaggataagatgccggcaagtggtaacctatggccacccttccgattgcctcatgctctgcccgcaacgagctccttcagtgatccctgcaagattttgaactcgcgcatctttcactccaccatcctgtcgatatttttccgtgcagttcacacacgtgatgtttccgagcatctgctggctctggctgtgttcctcttagagattgctgtggaaacaagtgatgatgttggcagtggaactggagatcgggcccctcctgcgctggctgctgtggtggagtcatctagcgggccgggctatcatggctacggcacgggacggcatgagccgcccaagcttttccactgctatcccacggacaatctaagctgcaatctgcgccacgtggtcaagaaagtgtcgctgaagtcacgcgatccgcaagtgatcacctccagctatcggtcgaacccattttactcagatctggactttgaggttgaagcggatccagagcaatcgatgcgcatgattggtcaaggggaccccgaaggagatgaggcaacgggtggagctggactgggaatgggagctcatagcagaaggaatgtctctcaggcgctggtgccgatgagagtgcccggcatggaggtcgccctaccaccggatctttcagtagttgccgaaaccggtgtggttatccgccaggatagcaacgaagatgatctactgagagaaggcaatcatgccatggatatgagtccaccggctgctctcgatttccactttccgctgcagcagatcactttgccggagagcggaatggaggtggctattcggagagatcttctgctagccgaaacgaataatatgggcgcaattgcaggtggagctggaggtggcgccaatgcatcggccacaccaccagcaggggcttccaatgagatgttctcgcctaccacacccacaggcagcggtatgctcctgcctttccagcgggttcagcctgtagccgtacccagtagcggtaatatggatattgtaccatcaaatgccatgggtgccggcggaagtttcacatccggcgtaagtggtagcggcactggacgtagaatgaactacgaaacgggtggagcacgtaagcgatccgtggacattgccatcggtggcagcaataaggatgagctgcatttggacgaaagcattttgtccctgctactaaagcttcattctcagctctcaggcacactagatagcttctcgttgagcgacggtgaagatcaatcatctgacgacgattcgaccatggatgtggactgtaacgaagccagcacctccatggcagcagcggagagcactgccctggctgagagaggacgcagtaagcgcaactacaagaacattcatgtatcctcctcgcgcatcggtgacggaccattctttattggtaatctgctgcgaaagatcgccaagcaggatgagcagtgcgcccagagcatcgacgacatccgtgccagactctggccgaatcagcgtgaaaaacaagcagaggcgaaagcacgcgaggccaaggagaaggaggagcgccgcaaaaaagcacgtgagcgccagcagaagatgatgcaagacttcgccaacaagcagaagctcttcatgcaatccgctgcagcgtcatccagtggcatgggctacggaccggaggacgaggacgatgaggagttgtacgaggagcagccgcgtgagaaagagtacgattgcataatctgcaattgcactacgcccagtaccgaatcgaatcctatcggcttggtcgttctggtcgagtccagcggcattgttggtcatcggcggcgcatcgccgagcgattgccgctgccgataaacgcggaggatgagtcccgactggcgcacaccactcgactggcggctgaattcaacaggcgcacggaactgctcagtctgaagtttggcgatgagtcctggtatctgtccaataatatggcctacgacaacggtgtacatgtgcagtcgtgtggccaccacgttcatctcagttgcctagaggcataccttaagacgctgtacaccacccaacgtcagccagttcaggatcgtggcgagttctactgtcccgtgtgccgacagctctcaaactcggtgctgccgctgagtccacaactggacagacccacgcacctggtccgctctggtaatcagccattcgaacgtctggtcgccgatctaacagatctgattaaagagaacgaaacgataccgcagccaacaaaactgacagaggccatgggccatgccatggaggtgatgacaaacattgcccagcgcaaggttaaatgctcctcgataacgttccgcaagctgttcattttcgttacctcgattgcgcgtacaaacctggaggcggagatcatccagcggggcggatcactatgtacagcgaatgccacgcggtacaagccaaagcgggaatgcatcgtaccgctactgcacgtgctatcggtacatgtgcgtgtcttggttgaatggccgctgtggagcagctgggcctcgttagctggcctgcccgttaccgctacggaaccgttgccggcgcactgcctcgaattgattcccagcatattagcggatcccattgctctgctgctcaagtttatcctgctggcgccactgcaactcgatcaggattactttacgtgcatggtgaaagtcatgtacaatctgctgtactatcaaattgtggttcagctgtgcgttactctcaccgatttagagtgcgatcacattgtcaaagtttacggcagcactagcgttggcagtgacaactctgctgcggaatcccaacagcaggagtctgccgccgggacaacgaacaaccgtcgccgtgctggacaacagcagcagagctcctcgcagctaggaaaggccatggccctggtgctgagccagacaaatgacctagttcacttgcgacgcgactgcatacccagtaccagcagctcggcggcagcgtcggcggctggttcctcctccacaacgtccacaaaccatggagctagcgcagccacagcctcctctgccacgacgatcgaggttaatctgaagtccatggaattacagctgcaggcgctatgcttgccgtttttgcgagtagctgccctgctgcgccagcatctctatcgccatgagatgccggagatctcggcaccgggactggaatttgtgcgccttgtttactatttggaactcgtaacagattctatggactgggattgctttaatgccagcaaggggctatgctttattcccggcactgagacaacgctgccccagttctggtgccagcagttgatggaggtgcgtccgccggccgatacggtcagagaattggtgctcatcaatcagcattcgttgtggcagcagccgcgacttcttgaattgccgcgcgagtacgaacgcttgttcacgtactaccatgagcggccgtgcctcaattgctataaagtgcccaaggagagctccatctgcctgctgtgcgggacgatcgtatgcctcaagcagaactgctgcgcggagaatgactgctgcgaggctgttcgccatacgctatcctgtggcggtggcataggcatctttttggtggtcacctccacgtacatcattgttatccgcggacgacgcgcctgcctttggggctcactctatctggacgacttcgatgaggaggatcgcgatctcaagcgcggcaaacctttgtatttgagcaaagaccgcttcaatctcctggagtcgcagtggctgtcccataagtttgctcatacaaaacacacatgggtgtttcaccgggatctcttgtga

SEQ ID NO: 1479 - protein, 1456 aa, DROSOPHILA
MDLFFLQICATNLPQYFFLQNTIELFDVGQWLETAPLKQPQKAEQSSMLEGFLTFLATLVTSRTNLGNDEATQCIIEISALLATENKTHSQLLELMPERSGNVHTKNFETFLKKLSVYKAPSSGSENLEQGLFTPIDEVWEKHYDPLHVLLRAVHRRDFQSSLDRFTNYVKSKDKMPASGNLWPPFRLPHALPATSSFSDPCKILNSRIFHSTILSIFFRAVHTRDVSEHLLALAVFLLEIAVETSDDVGSGTGDRAPPALAAVVESSSGPGYHGYGTGRHEPPKLFHCYPTDNLSCNLRHVVKKVSLKSRDPQVITSSYRSNPFYSDLDFEVEADPEQSMRMIGQGDPEGDEATGGAGLGMGAHSRRNVSQALVPMRVPGMEVALPPDLSVVAETGVVIRQDSNEDDLLREGNHAMDMSPPAALDFHFPLQQITLPESGMEVAIRRDLLLAETNNMGAIAGGAGGGANASATPPAGASNEMFSPTTPTGSGMLLPFQRVQPVAVPSSGNMDIVPSNAMGAGGSFTSGVSGSGTGRRMNYETGGARKRSVDIAIGGSNKDELHLDESILSLLLKLHSQLSGTLDSFSLSDGEDQSSDDDSTMDVDCNEASTSMAAAESTALAERGRSKRNYKNIHVSSSRIGDGPFFIGNLLRKIAKQDEQCAQSIDDIRARLWPNQREKQAEAKAREAKEKEERRKKARERQQKMMQDFANKQKLFMQSAAASSSGMGYGPEDEDDEELYEEQPREKEYDCIICNCTTPSTESNPIGLVVLVESSGIVGHRRRIAERLPLPINAEDESRLAHTTRLAAEFNRRTELLSLKFGDESWYLSNNMAYDNGVHVQSCGHHVHLSCLEAYLKTLYTTQRQPVQDRGEFYCPVCRQLSNSVLPLSPQLDRPTHLVRSGNQPFERLVADLTDLIKENETIPQPTKLTEAMGHAMEVMTNIAQRKVKCSSITFRKLFIFVTSIARTNLEAEIIQRGGSLCTANATRYKPKRECIVPLLHVLSVHVRVLVEWPLWSSWASLAGLPVTATEPLPAHCLELIPSILADPIALLLKFILLAPLQLDQDYFTCMVKVMYNLLYYQIVVQLCVTLTDLECDHIVKVYGSTSVGSDNSAAESQQQESAAGTTNNRRRAGQQQQSSSQLGKAMALVLSQTNDLVHLRRDCIPSTSSSAAASAAGSSSTTSTNHGASAATASSATTIEVNLKSMELQLQALCLPFLRVAALLRQHLYRHEMPEISAPGLEFVRLVYYLELVTDSMDWDCFNASKGLCFIPGTETTLPQFWCQQLMEVRPPADTVRELVLINQHSLWQQPRLLELPREYERLFTYYHERPCLNCYKVPKESSICLLCGTIVCLKQNCCAENDCCEAVRHTLSCGGGIGIFLVVTSTYIIVIRGRRACLWGSLYLDDFDEEDRDLKRGKPLYLSKDRFNLLESQWLSHKFAHTKHTWVFHRDLL

SEQ ID NO: 1480 - DNA, 3885 bp, DROSOPHILA
cactttttctcgaattttggcggagaagtcgtgggaattgggaggtattcgaagtatggacctgcgatctgccgcggtaaagacaaggttattgccaccattattttttttttccataagtttcgttcttttgaataaagtttattatagggttgcgacatctggcgggttttctgaaattttatgattatgagcattaatagaatgctatgatattgtatatttcctgcagggataacagggttcctcttaaagcaaacttttcaattcaacagcataacaaattttgttgtccttaccttaggaccttttttttatcctcaaggagagagggaatgtcagtgaacaaaaaacaacaacattgatgaattttcgtgcaatggcaaaaccagaaaataaaaatgaacggagccatgcagggggcgctaatctgatgacgcgtagtgtatatccaatgaactatcatgcaaatgtggctaggacgcattagcgaaaatttttaaatatcttactttcacgacattttatccttgctactacaatgtattaaatagttttatatgttcgcttacttcgtattttatacgttttatatgctcgcttactccatattttaagtgcctaataaaactgttgacgataattgcttttcatggaaggacttttgtgacaacattttggatatactctttttttaaagtgtatttgtcaagtgtaaaattttgtgtcacaaaaggtaaattccgatattcgttttttgaaggtgcgatagtcattagttttttcctcgtagatgtcaatcagcaaaaagcgcactttataatttaaaacttacagtgtatttaaatttattattatttagtctaaactaaaaaatatcgatacttccaaaagctcccgtcgctgggaatatttgctgttctgcgcacggccacactgaaacggaatgtacataaacaaggccgaaattcgatcggaaagcacttgctgaataaacgccagctgataaacacaaagatgtcggccatatcgggacgcgccctgcactatgtgttcaaaatcggagatcgggcgaaaaacgccttcttctttcggcaaatcttgggaatgacggtaagctgggtgtggcgggcgtatcgccagaaatcggcagacttccttatcgcaggctgttgtgtctggctgtagttttatctggacaacgtgtcaacgacgcgcggctgctaattaaaaagcccagatgcccgataatgtcatataatgactgtgttaaaatttcatttttctctcatcgtttttgctcccttctatcgccatcccgctcgttcgcacggcaacaggtgctgcggcatgaggagttcaaggagggatgcgacgcagcttgcaacgggtgagtgctatttcggagtgttgcgacaggactaactggtagtgttaatccttcacaggccctatgacaatcggtggagcaaaacaatggtgggttatggacccgaaagttcgcatttcgtcatcgaactcacgtataactatggagtgagcagctacgaaatgggtaagacacataccggataaaaatgttaggctcacatgaggattaaaagtcctgagtgcaagctaacaagcgggaacgttttaacccttacagcggctaagtaatatcatcctaaaatacctatttattttatcaggcattaaagcgtttttaataagaattgagagttgaaaaagtttgaaacttcagtgatggtaggctaaatcgcatatttaagctttgagcagtcatatgtacacatttctggaaatttgaaaaaatgtacaaccctataaatgattaccgagttataatccaaaatatttaatctaacactagtaaaattgggatggcttatcttaaagtacaaatgagttattctatcttcgacaacttcataattaagtgtttcactaataatagctattcgataagtgacttgtcttaagtacgtaaagatagtaggttattaatctttttctttatgaatacggaaatagttatctataagtaggtcgaaatctatcagtcattctagttaaaaccgcgatgaagatttctgtctatcacaaaatgaactaaaaacgaaagtatgtgagttgaatgtttgaagatgtttgaaaaagtacagtacagtaattgaaatatactacttaatgattccctttgtattaattcccaagttaattttaacacttataaatcctgttaatcgatacttattcttttcgattcaggcaatgattttgggggcgtgaccatacactccaaggatatcctttcccgcgccgccgagcactcgtatcctgtgacacaggtgtctggaaaagccggtagtctgctgacctcgcccgatggctacaagttctatgtgatcgatcaggcctctgccagctctgatcctgtccaatcggtggagcttaatgtgagcaatcttcaaaactcgcgcaaatactggcacgatttgctgcaactgaaagttctcgaggagaacgaagcaagcgtgcgtttgagttacggtgaacagcaggcttcactggagatcacccagatctcagagccaattaatagagctaaggcctatggacgaatcgcctttgccattccggcggcccagcagccacctctccaagaagcggttaaagcagctggcggggccattctaacacctctgattaccctggatacgccaggaaaggccaccgttacggtggtaattctcggtgaccccgatggtcatgagatctgctttgtcgacgaggagggcttcggccagctatctcaggtggagtccgatggcgataagcgactggatcgaaacatcgaaaaggatcccttccaaccgaaatgactttcccagcaatccttgagcactgttatttgtacacagcaccttttgtatttggattttgtattgtctaatggttaatggctgttttcaacggagatattatactttttaaaacattgtaaaacatcacctacgctcgttcttgttttacaacatacatatattttattacataaactgtcgataaaattaagcgtgcgtatgggacttatttttctttgttataagaagtattttagcttttctagtattgaatcaatcaaaaacacctttaaacgaggtgaaaagacatcctgatatcagctattgtggtttttaattcgactaaacaaacagatggtcataaatccgcttaattggtccttactagcgaaaaggatttcaagtatatgtattcttgatttggaacacatatattttattaagtattgcgtacttaagtattatttttatgatcctaacaacgtgctcgggattttcctttcattttcatttcagttttagaagagacaaattggtttcgatttcgttttttgtagcatttatttttttagggtgtttcctgaatttatttttattttttttttacttgagcgacaaggagacgttggtgcagaatgaaggactcgagtcaatcggcgccggcaggccttttggtggcaaatctgaagtcttgggaaacgttcgactggccgacggagcagcagcgttggatctaccgcagttggggccagtactttgcgcggatgcggaagaacacctttgcccagaagtacttcgacaaatgcatcacagagaatgagagcacggatcacaaggctctttatctgcgcagcaaattcaagagatcggtggccctgacgcaggacgcattggaggatagcttgagggccatggaggtaaggcaggcgtgggacgcaaatgtgtccatggagctcggagatgcgctctacgatttgaatcggtttgaggagaacaagagcctgctgcacgacaatgt

SEQ ID NO: 1481 - DNA, 884 bp, DROSOPHILA
agctgataaacacaaagatgtcggccatatcgggacgcgccctgcactatgtgttcaaaatcggagatcgggcgaaaaacgccttcttctttcggcaaatcttgggaatgacggtgctgcggcatgaggagttcaaggagggatgcgacgcagcttgcaacgggccctatgacaatcggtggagcaaaacaatggtgggttatggacccgaaagttcgcatttcgtcatcgaactcacgtataactatggagtgagcagctacgaaatgggcaatgattttgggggcgtgaccatacactccaaggatatcctttcccgcgccgccgagcactcgtatcctgtgacacaggtgtctggaaaagccggtagtctgctgacctcgcccgatggctacaagttctatgtgatcgatcaggcctctgccagctctgatcctgtccaatcggtggagcttaatgtgagcaatcttcaaaactcgcgcaaatactggcacgatttgctgcaactgaaagttctcgaggagaacgaagcaagcgtgcgtttgagttacggtgaacagcaggcttcactggagatcacccagatctcagagccaattaatagagctaaggcctatggacgaatcgcctttgccattccggcggcccagcagccacctctccaagaagcggttaaagcagctggcggggccattctaacacctctgattaccctggatacgccaggaaaggccaccgttacggtggtaattctcggtgaccccgatggtcatgagatctgctttgtcgacgaggagggcttcggccagctatctcaggtggagtccgatggcgataagcgactggatcgaaacatcgaaaaggatcccttccaaccgaaatga

SEQ ID NO: 1482 - protein, 288 aa, DROSOPHILA
MSAISGRALHYVFKIGDRAKNAFFFRQILGMTVLRHEEFKEGCDAACNGPYDNRWSKTMVGYGPESSHFVIELTYNYGVSSYEMGNDFGGVTIHSKDILSRAAEHSYPVTQVSGKAGSLLTSPDGYKFYVIDQASASSDPVQSVELNVSNLQNSRKYWHDLLQLKVLEENEASVRLSYGEQQASLEITQISEPINRAKAYGRIAFAIPAAQQPPLQEAVKAAGGAILTPLITLDTPGKATVTVVILGDPDGHEICFVDEEGFGQLSQVESDGDKRLDRNIEKDPFQPK

SEQ ID NO: 1483 - DNA, 6103 bp, DROSOPHILA
ttttttttttgtagtgtacctatgtagatcggtaaatcgcaatgcgttttcctatcaaccattcgatatccgaactgcgctggaagcctgcatccgcttggggggatccgccagcgttcccgagcgattataaatggtgtatccatgttttttaaatttgattttgtttcgtcttgattctttgtttgcgtgattttccttgtttttgtttgattttgttttcgtgtttgttaggataacaaatgcatcaaaaaagagtccaaaaatgtacaacagtgggcatacatatatggggatcggtataaaccgctttgggtgggaaaatgttaaaacaggagctaaagattggctgctgcactagaggccagaagaaggttagaagataagccacttggtgaatacatgtcctgggcgggagtgattgcgtctttgttaggctccggctgcgaatcctgggctggcaaaagagaaaagaaacgtgtcgagaagttgtccatcttgtgtggcgccttgctggcagattggctcatccgtgggcgaactccgtctcgggagcgcactcgtgaccaatggccaatggccggtggccaatggcatgtcgcctggctatgactccatggcccgcggcgctacggaaacagcaactgcagctgtgcatcctggcagcctacagtgatttgctctcgatatttcgatctttcgacatctctctcccgtctcagtcttctttattactttgtaactccacatcttgccatatccgtctccatctatcacgctgcctcgtctcgatttgccatcttttaatgtcccgctttgtcctaatgttcttaggtcgcattgtttcccgcatctgtcgttgttcccgtgatggtcctctctgctttttcctgctgcctactgatgctactccttgatgatgacttcaaagttgagtttgttgttgtttcgtttgtgttgcttgttatcgtttgtagttgttgcacctccaaccggattctcaataaggctgtgagaactgattcaagctccgctcgcccgactgcgaaacacaaataattcagattacctaacactctttgggtttcaaaaatatcacttccacacttaccgcgttaaaggcaacatcctgggatagcaaaccgtccatctgcgatatttgcccaaagtcctgtgaaagttccggctgctgggacagagcaaatccgctgggctgggtcatctgcagcgacaaaggcatcgggtgctgactgtatggagcagcattgcataccgagcttccttgtgttagcggtgccccgccagttccaccgcccgttacgcgcgattttcccagcttgttggtcttcttattgccgcctggggtggcgcttcgtccgactccgactccagtgactccaggacccgagttaccgggagagaaattacccgtctgttgttgaatggcgcgattctgcttgaccgccatgatcgcctgctggtgctggttgtagaaacgcggcggaatattgctcatgttcatgaacatgccaaccggaactggcatgttgcccagtgctgctgctccatgctcgttggatatatagccaatggagtcgtggtggaggtgggcagccgcccaactgggtccagcccctccgaagttgttgttgccaccggccgcgccattgcctccgttgcccaggccaaagcccaccatggaattggagctgggagtaccgtagccgaggggtgagtttccgtagggaccacctccactgccaccgtactgtccgccattcattgactgtcccaccatttggcgaccttggccgtaaccgccactgcggtcgtaaatggagcctggcaccatcacttccttggcatcggcaataatggtggacataaagtgtgccccaatgttcatgctgttgacaagctttttgggcttctggaagtggattagcgactccttaaggttattcagagatccctcgacgagcaccttacggtccttgtagaagttgagcagatggttccacagctgctgcttggcgagcactttgggattgcccacaatgatgatcccgaacttggcccgtgtaagggcaacattaaggcgacgtgggtcgttcaaaaagccgatgccttgacgttcgttagatcgcacgcaagacatgataatgatgtccttctcacgtccctggaacgcgtccacactggcgatctcgatctcctggtatagacgagagtgcaggctgccctggtattgcatgtactgcaccaggtaagcgcgctgaccttcgtaaggcgtgatgattccaatttgttccggcttgatgcctgccttaaggaatcgcgtcgtaatcttttccacgttggccgcctctgtgcggttgaggaaagaggtgccggagccggcaatctcctcctgtccctgtgttaccagaaagaacatcggtctctccggctgtggccaggggaaatcaagcttaaggcgacgatcctccgcgcagacgccgttttgcagcgatccctcgtagaagaagttggacgggaactgggacagctcggggtgcatgcgatattgcacctccagccggaacggacggatgcccagaaccaccaggcgctcgaacaaactttgcgagaggccggcacgagctgctttcttgcacataacaaccggtcccagctggcagtgatcgcccacgaggatcagctgcttagcgcccagcaccactggcaccatgcactccggctccgtcgactgcatagactcatcgatcaggatcgaggtgaacttgactcgcgatagacgaccatcgccggcgcctacgcatgtgcagcagataacgtcggcagcctccagcagttggttctcggcggcacgtttcaggttgcggtatcgcttttcgtctgctgagctcagctcgccggtctcgtctttcagctgctgcagcttctttagctccgagttggtctccatgttacggatttggttgtgcagcgccaggaagcttaccgggctatcgatggcctcacggctcttggcgcaaacacgcaccactttaaggtttgttcggtggatcttctcagttagctgatccacggccgtgttgctgggagcgcacaccagcactgtgccaccatggagcttgaccagctggtaaacgatggtcgccgaggtcacggttttgcccgtgccaggcggcccttggattagcgagagcggacgctgaagcgcgtgtttcacggcatacacctggctgcgattcaaatccggcagatgcggggcactgaagagcttgggttgtgggccgcggaacagcacctcgtcgttggaatccgcacgaccgtggcccaacaggcgcgagtagatgaagttcgacactgaattgcgatcgatggcgaatttgcacagagcacgtgtcatgcgatcaaatgacgtgcacttccagatgaagtccaccgtaaagttactggtgcacttaaccggggcattcgttgaggatttcagctccaggccgacgtcatcgccgaaattgtccggcaccttgataacgtggccgatctcgctccacggattgtacagctcgcccacataatgcaggcgcagctcgtcgccatgcatgagcttcatgtccgaatcggtcttcgccagcgtaaagtaggcaatggtctttttgttgaggccgacgtcccagcgtacttcgatgttctcctgcgtggcagactccttcagtttttggtcgtattcggcctcaaggcggaccagcggcccaaaggtcttctcgtactgatagccatcctcgtagcggagtagcacatgtgctggctccgagtcaatgcctggcttctccagatcctgaaacgtggcctcaatattctccttccatagctcctccagcttgttgatctgagcggctgagatttggcgagctcgcagctgtccctgttcgctgggttgctttaccagccaggccaaaaagcagcggtctgcaattagaggcttccactgttcctggtcccagttcatatcctttagcgaattctgggcggcacacggctgacggcagagcagcacgaccacagaatcggccttggccggaatgaagcccagcacaaagacgttgcgcacaccacaggagtagcactccaggattgtctcgcccaggggaccttccccgtggagcgtcacctcgcgatgcttggccctcaccagatggttgatgatgtgcgaaccggaagtgcttccacgaccgttgcaaaaccatttgcggcagttgttgcacatgaccaccgtggctggatcatggatgccgcaatacttgcacgcatgcggcggcagctccttcacatacgagctgccaggctcgtcgtcctcctcttcgaactgcagatcggccagatcgttggtgatgctggccagtcgtggatgcgagtctccggcagagcagcgttgctgtaaattaaaaagggtatatgccatttgggtttcgcggaatgatttgggggacaactcacggcaatctccagctgatcgttctgggtctggctctgcgaggtggagggcatggtaaagtcgcggtaatcgtactgcgtgggttgagtatccgctcccggaagcagctcgttgtcgtccatgtccaggaacgagagcgccgagctgggcgcgtacgtgtccacgctcatggcgcctgttgtttcttctcacccaaggtgattatgctgcgtttccgcagggatcgcgatgagatctagttagcaatgtgcattggccgataggtacgtaactcggatgggactgatgctcacctatagtacctgctcctagaccacggatcgcttggtcagtgtttccggaattgaaaaattcctaagcttggagcgtggccgcgatgattatggtatggcgatggtgtcgtgtgtgcgtttcgcgctttccgtgttcgggagcccgccgttcggcactctttcgaaactgtggctgttgtgtgttttaaattgagtctgtacgagattcccacgctattgcggggaatgtaggattaaaaaaagcgaaaactttcttgcttgttcaacaaatttgcccggcctgttttgccagtaataaatatacgtcagtttgcatttgactcacgaggggtctatcgataatcgcgtatggcaacatcaatcgctagtgttgggcaagttgactatagatactatcggtgatggggtgaataatatatcgtttaagtattgtctttttagtaattataccataaattactgtttattttggaaaacgccaaaatcgccaaaatttatgaaatgaataaacaaacataggactcccgtattgcgtatttatttaaaagtacttatatagtcgaccttataataaactattacaaacaggatttaaccataaggtttaacttgaaataacttgttggataaaatggaagaaaaaataaaaccttcaagtatttcctacaggttaaagttttagttgcgaaggcaatcattataatcaaaacttttttcgttcccaataaatatatatgatataaatatatattttctttgtcaataatgtgactcatcaagatttgccttcagaagcaagggttccttgtaatcattaagggaaataaaaaaaaacaagagagagtgctatagtcaagttccccgactataagatacccgttactcagcaagtgtgaatgcgaacgcgaaattttatcatttttctgggatatcgatagatattggggaataaaatgagaaaaattaaaaaaaatgttccaaactgtgggcgtgaccggttcggctgccctagggcgttagagtgggcgtgtcttttcgcagtttggcaactaaaaaaattatgaaaaatttcaaaaaatggttcagaagtgtgggcgttagagtgggcgtggcaacatgggtcaccaaacttgcgctgcgtctttgtctctagaatctgtatgctgaatctcaaccttctagcttttatagttcctcatacggacagacagacagagggacatagctagatcgactcggctattgatactgatcaataatatatatgctttatatagtcggaaacgctttcaacgccaaagttgaa

SEQ ID NO: 1484 - DNA, 3831 bp, DROSOPHILA
acgtatatttattactggcaaaacaggccgggcaaatttgttgaacaagcaagaaagttttcgctttttttaatcctacattccccgcaatagcgtgggaatctcgtacagactcaatttaaaacacacaacagccacagtttcgaaagagtgccgaacggcgggctcccgaacacggaaagcgcgaaacgcacacacgacaccatcgccataccataatcatcgcggccacgctccaagcttaggaatttttcaattccggaaacactgaccaagcgatccgtggtctaggagcaggtactatagatctcatcgcgatccctgcggaaacgcagcataatcaccttgggtgagaagaaacaacaggcgccatgagcgtggacacgtacgcgcccagctcggcgctctcgttcctggacatggacgacaacgagctgcttccgggagcggatactcaacccacgcagtacgattaccgcgactttaccatgccctccacctcgcagagccagacccagaacgatcagctggagattgcccaacgctgctctgccggagactcgcatccacgactggccagcatcaccaacgatctggccgatctgcagttcgaagaggaggacgacgagcctggcagctcgtatgtgaaggagctgccgccgcatgcgtgcaagtattgcggcatccatgatccagccacggtggtcatgtgcaacaactgccgcaaatggttttgcaacggtcgtggaagcacttccggttcgcacatcatcaaccatctggtgagggccaagcatcgcgaggtgacgctccacggggaaggtcccctgggcgagacaatcctggagtgctactcctgtggtgtgcgcaacgtctttgtgctgggcttcattccggccaaggccgattctgtggtcgtgctgctctgccgtcagccgtgtgccgcccagaattcgctaaaggatatgaactgggaccaggaacagtggaagcctctaattgcagaccgctgctttttggcctggctggtaaagcaacccagcgaacagggacagctgcgagctcgccaaatctcagccgctcagatcaacaagctggaggagctatggaaggagaatattgaggccacgtttcaggatctggagaagccaggcattgactcggagccagcacatgtgctactccgctacgaggatggctatcagtacgagaagacctttgggccgctggtccgccttgaggccgaatacgaccaaaaactgaaggagtctgccacgcaggagaacatcgaagtacgctgggacgtcggcctcaacaaaaagaccattgcctactttacgctggcgaagaccgattcggacatgaagctcatgcatggcgacgagctgcgcctgcattatgtgggcgagctgtacaatccgtggagcgagatcggccacgttatcaaggtgccggacaatttcggcgatgacgtcggcctggagctgaaatcctcaacgaatgccccggttaagtgcaccagtaactttacggtggacttcatctggaagtgcacgtcatttgatcgcatgacacgtgctctgtgcaaattcgccatcgatcgcaattcagtgtcgaacttcatctactcgcgcctgttgggccacggtcgtgcggattccaacgacgaggtgctgttccgcggcccacaacccaagctcttcagtgccccgcatctgccggatttgaatcgcagccaggtgtatgccgtgaaacacgcgcttcagcgtccgctctcgctaatccaagggccgcctggcacgggcaaaaccgtgacctcggcgaccatcgtttaccagctggtcaagctccatggtggcacagtgctggtgtgcgctcccagcaacacggccgtggatcagctaactgagaagatccaccgaacaaaccttaaagtggtgcgtgtttgcgccaagagccgtgaggccatcgatagcccggtaagcttcctggcgctgcacaaccaaatccgtaacatggagaccaactcggagctaaagaagctgcagcagctgaaagacgagaccggcgagctgagctcagcagacgaaaagcgataccgcaacctgaaacgtgccgccgagaaccaactgctggaggctgccgacgttatctgctgcacatgcgtaggcgccggcgatggtcgtctatcgcgagtcaagttcacctcgatcctgatcgatgagtctatgcagtcgacggagccggagtgcatggtgccagtggtgctgggcgctaagcagctgatcctcgtgggcgatcactgccagctgggaccggttgttatgtgcaagaaagcagctcgtgccggcctctcgcaaattcccgtccaacttcttctacgagggatcgctgcaaaacggcgtctgcgcggaggatcgtcgccttaagcttgatttcccctggccacagccggagagaccgatgttctttctggtaacacagggacaggaggagattgccggctccggcacctctttcctcaaccgcacagaggcggccaacgtggaaaagattacgacgcgattccttaaggcaggcatcaagccggaacaaattggaatcatcacgccttacgaaggtcagcgcgcttacctggtgcagtacatgcaataccagggcagcctgcactctcgtctataccaggagatcgagatcgccagtgtggacgcgttccagggacgtgagaaggacatcattatcatgtcttgcgtgcgatctaacgaacgtcaaggcatcggctttttgaacgacccacgtcgccttaatgttgcccttacacgggccaagttcgggatcatcattgtgggcaatcccaaagtgctcgccaagcagcagctgtggaaccatctgctcaacttctacaaggaccgtaaggtgctcgtcgagggatctctgaataaccttaaggagtcgctaatccacttccagaagcccaaaaagcttgtcaacagcatgaacattggggcacactttatgtccaccattattgccgatgccaaggaagtgatggtgccaggctccatttacgaccgcagtggcggttacggccaaggtcgccaaatggtgggacagtcaatgaatggcggacagtacggtggcagtggaggtggtccctacggaaactcacccctcggctacggtactcccagctccaattccatggtgggctttggcctgggcaacggaggcaatggcgcggccggtggcaacaacaacttcggaggggctggacccagttgggcggctgcccacctccaccacgactccattggctatatatccaacgagcatggagcagcagcactgggcaacatgccagttccggttggcatgttcatgaacatgagcaatattccgccgcgtttctacaaccagcaccagcaggcgatcatggcggtcaagcagaatcgcgccattcaacaacagacgggtaatttctctcccggtaactcgggtcctggagtcactggagtcggagtcggacgaagcgccaccccaggcggcaataagaagaccaacaagctgggaaaatcgcgcgtaacgggcggtggaactggcggggcaccgctaacacaaggaagctcggtatgcaatgctgctccatacagtcagcacccgatgcctttgtcgctgcagatgacccagcccagcggatttgctctgtcccagcagccggaactttcacaggactttgggcaaatatcgcagatggacggtttgctatcccaggatgttgcctttaacgcgtcgggcgagcggagcttgaatcagttctcacagccttattga

SEQ ID NO: 1485 - protein, 685 aa, DROSOPHILA
MSVDTYAPSSALSFLDMDDNELLPGADTQPTQYDYRDFTMPSTSQSQTQNDQLEIAQRCSAGDSHPRLASITNDLADLQFEEEDDEPGSSYVKELPPHACKYCGIHDPATVVMCNNCRKWFCNGRGSTSGSHIINHLVRAKHREVTLHGEGPLGETILECYSCGVRNVFVLGFIPAKADSVVVLLCRQPCAAQNSLKDMNWDQEQWKPLIADRCFLAWLVKQPSEQGQLRARQISAAQINKLEELWKENIEATFQDLEKPGIDSEPAHVLLRYEDGYQYEKTFGPLVRLEAEYDQKLKESATQENIEVRWDVGLNKKTIAYFTLAKTDSDMKLMHGDELRLHYVGELYNPWSEIGHVIKVPDNFGDDVGLELKSSTNAPVKCTSNFTVDFIWKCTSFDRMTRALCKFAIDRNSVSNFIYSRLLGHGRADSNDEVLFRGPQPKLFSAPHLPDLNRSQVYAVKHALQRPLSLIQGPPGTGKTVTSATIVYQLVKLHGGTVLVCAPSNTAVDQLTEKIHRTNLKVVRVCAKSREAIDSPVSFLALHNQIRNMETNSELKKLQQLKDETGELSSADEKRYRNLKRAAENQLLEAADVICCTCVGAGDGRLSRVKFTSILIDESMQSTEPECMVPVVLGAKQLILVGDHCQLGPVVMCKKAARAGLSQIPVQLLLRGIAAKRRLRGGSSP

SEQ ID NO: 1486 - DNA, 5676 bp, DROSOPHILA
acggttttcagaaatttgtagaaattcaattgcaaaagattatgaataaaacactaaagcaataacattcaatagatcaattgttgattaatttcaaccggcaaattgattgctattgattagttctaggcagttcaagctcggcgcttgttaatccaattatgcaaacaaagtgggaaatacactatgctccagattaattaattggatcagtgtgtgtattcccagtaggtgtgataccagttccatcgaagtgcgaagccaaacacctgctacgaatcgcagttttatcgatggatcccataggatccgatacgagtgtcatcgatgcattgacggctgactgctgccagttgcgtttgaatttattggagctgacttgaatacggagaaaagaaaggagttggagttgaagttgcagtcgaagtcgaagtcagagttgtggatcagcgacatgtgtcgccatgtaatgcaaatgttatctgcatttcctgttgagatgaatggcatagccaaagatctcagtatggagaacttctcggctccctcctggcgatgccgagaaagcccccttgcagaacccactgccattcaacatgcatgcagcacacatggcagacagtccagacagtgaagacagtggagaccctgtttgacagccaggatggtagtggtgccgaagcgaaaagactacgacgacgacgacgacgacccataaatcttgcgcccagacccggcacgccccttcgccgcccgtccctcgacaaagtgttcatcaatcaagcggatagttttacataattaaacgaataatcaatgttttcacccaggggcgttgccaaagccaaatcgttcaccataaaatacattgaatgaaaggctaaagataactttaacaaagtgctcaacttacagtaacttctttaaatttaattgtaatggtacttaccatgactttacccggaaactaatcgtcccactctcacatccttcattgcagcaccattaagttcgatcttccttacgcaaagaagccggattccggagacagcctcaagattgctcccatcagcaccatgaacggccagggctgcgagctgggccacagcaatggcgacatcatctcacagaatcaacagaagggatggtggaccatcggcctgatcaacggccagcacaagtacatgaccgcggagacctttgggttcaagctcaacgccaatggcgccagtctgaagaagaagcaactgtggacgctggaaccctcgaacaccggtgaaagtgagtagaggttcttaaacagatgggagaaatgttagttagttgggttcttgaaagatttaagatacttaaggaatagtaagcaaaagttaaggatatgaatgctgaattgaattaggatacttctgtggatattttctgtatgtatctggatttggtttaagattgatcatctcttcttgattacgattggaaaaagaaaagttttcgaatcaaatgctattttattcaatcacagctgtggcgagattaacaattcagtcattcggggccaatcgatggcatataacattcgagtggtaaacacaatatccatgtgcgtgttatctgcaaatatcaccgataagcatgtaaatcccatgactgcaagtgattttttgttttatgtttttttactccttttttttgtttgctttagcaggggagtggtacatatattatttggaaaccagttaccccaactgctggacttaagtggcgcagtcgaagccatttgccaaccgtaatcaccatcatcttggccagttagtggagtcttattttttgtttttttttttttttattgtttacaacataaatcatctggggtctctggcgaagaggaggataagtccagttgcactaatttgatgtgctggagagtagaaagcaaagcgcctcacgaatttggcatcatttatcaacctggcggctggctgcatcgcaattggaattggattcggagttggctttggctttggagttggctttggagttggctttggctttggagtcggtcttgcgcatggcactgcagtccgttgtgtccgtggccagcaattataattaaagctggctagcaactgcaactggtttttatacagtcgccgacaccactctggtcgttgccactggcaattaataaacattttctataataccaaagccataagtcagccggcattcgttgtggtcattaaaatagctcatccaaattgaaaatttctcggccttgctgctcctgtagtggagtgcaactcccaactgaatattaccgctgtttggtggatacggattgagcaaatggctaaatggctcaatagatgatagcattcaaaatgtttggaaagcgagccaatggtcgaaatgaacgggggatatcgatagctccaaatgccatcgacgacggagcgcgagacaaatcgatttttaaatttttccaagctgccagggggcattttctcatcttagaaaaaaaaaacgaatgtaggaattcttcgaaaaatgctttccttgcagcaatagctcgccaatgaagcgacttactaatccatggactttaccatatctgtttcaggtattatctacttacgatctcatctgaacaagtacctttcggtcgatcagtttggcaacgtgctgtgcgagagcgatgagagggacgcgggcagccgcttccagatcagcatcagtgaggacggcagcggacgttgggcgctgaagaacgagtcgcgcggctactttctgggcggcactccggacaaactggtctgcacggccaagacgcccggcgccagtgagttttggacggtccatttggctgcccggccgcaggtgaatctgcgctccatcggacgcaagcgattcgcccatttgtcggagtcgcaggacgagatccatgtggacgccaatattccttggggcgaggatacgctctttacgctggagttccgtgccgaggagggcggtcgctatgctctgcatacgtgcaacaacaagtgagtgattgcattgccttgactctacaatgcatctaacttttttttttcccctttgcagatatctgaacgccaatggaaaattgcaggtggtgtgcaacgaggattgcctgttcagtgccgaatatcatggtggccatctggcgctgcgcgatcgtcagggtcagtacttgtcgcccattggctccaaggcggtgttgaagtcccgctcgtcgtcagtgacgcgggatgagctcttctcgctggaggattcgctgccccaggcttcctttatagccggactcaatttgcgatatgtgagcgttaagcagggcgtcgatgtgacggccaaccaggacgaggtcggtgagaacgagacgttccagctggagtacgattggtcggcgcaccgttgggccctccgcaccacccaggatcgctactggtgtctgtcggcgggcggtggcatccaggccaccggcaatcgtcgctgtgccgacgctctcttcgagctgatctggcacggcgatggctcgctctcgttccgggctaacaacggcaagttcttggccaccaagcgctctggtcatctgtttgccacctcggagtcgatcgaggagatagccaagttctatttctacttgattaataggtaagggaattgtttacaccattctgtattttccgtttttaattgcattgtttttgttaaattaacagaccaattcttgtactgaagtgcgagcagggattcgtgggctatcgcacgcccggcaacctgaagctcgagtgcaataaggccacctatgaaacgattctggtggagcgggcccagaagggcctggtgcatctgaaggcgcatagcggcaaatactggcgcatcgagggcgaaagcatctcggtggatgccgatgcgcccagcgatggtttcttcctcgagcttcgcgagccgaccaggatctgcataaggttggaccgcatttgctgtcatttaaaaacggctgtaaattatgattgttaactaatgccgatactctatattttagatcgcagcagggcaagtacctgggcgctacgaagaacggggcgttcaagctgctggatgatggaaccgattcggccacacagtgggagttctagggcgtgaccacgaccatcccgaatgggttgctgcacgcgtcatcagtatcacaatcacacacatacttcccaaccaagcggggattccctaattattgatccacgcagctgaagcgccaagaagagtcgcacaagaatttgatatatcctaaacaattgcaaaatgaacgaaattaaaatgataggaaggaaacgttgatagacccaaggagatacgagtgaatgaaaaatgaagaaacaaacttatatatttatatataaagatctacgtatacatagagagagattttttttaaacaacctatttagctttttatacgttttatacgatgagaatatctacaaacgagaacaagaaatcttttagcgtagacaacaaaacaaaacttctgtcgcgagtccttccgttttatcaaatatatcagcaactaggccagcaaaaatgaagaaagacgtaatggttatacaagcacatcatatatacaccaatatatacatattcgattcgtaaagcttcacggaaaagaaactaaaaaaaaagcgaagggaaataagagcaaaaaaaaaaaaaaaatatgaaaaaaataaaaataaatcaacacatattcctataaatttatttatatatttatatacatattgatatgaacgataatacatgaacacacacacatacacacgactccacacgctcacatagacacgcatgtccaaacacacacacacacacacactcaagcaagcaattttaatacgcataacaaaatttagtcgctaagcaaaacttaaaaaaattaatctgtaataaaaacaaagtcaaaaattaaacatcaaatctctccgtacggcgattttgcaatggaatcaactccactatatctagcatatgcatatattgaattagttttttgttatttatttgcgtcgatttcttaattaattaattagtaatctttttttttttttaatttgtgcacttcaaaacgaaacaaaaactcaatccaatttagttgctaaatcttaaaatggaaattttgtatgatacatatgaaatatatacatatatacaattatgttgttactttttatgggttaatatacaacggaaagctgaatatgcgaagggttgcattattttaacgtgtctttattttcacggttactttttaagttgaaacttaaatacatgcatctggcatccccatttccgctaactggcaactcggcgcccaatgcaaccgtgcaatgtactgctattttgaaaaggcgttagaaattcaagaaataatttcaatataatttatttatcgtgaaataaaatgcaaatgaaccgaaggcatacgtttaaatactgttattcataattttgtatgaaaagcattaaagtgcaatcaatttagtgaacagcagtgaaataacgccatgtaatgcaataagtctaaaggtcgccaacttttgattgaccggctgacaaatggttggtggtagaccccgcccccctcgcaattttccaacgccc

SEQ ID NO: 1487 - DNA, 2134 bp, DROSOPHILA
caccattaagttcgatcttccttacgcaaagaagccggattccggagacagcctcaagattgctcccatcagcaccatgaacggccagggctgcgagctgggccacagcaatggcgacatcatctcacagaatcaacagaagggatggtggaccatcggcctgatcaacggccagcacaagtacatgaccgcggagacctttgggttcaagctcaacgccaatggcgccagtctgaagaagaagcaactgtggacgctggaaccctcgaacaccggtgaaagtattatctacttacgatctcatctgaacaagtacctttcggtcgatcagtttggcaacgtgctgtgcgagagcgatgagagggacgcgggcagccgcttccagatcagcatcagtgaggacggcagcggacgttgggcgctgaagaacgagtcgcgcggctactttctgggcggcactccggacaaactggtctgcacggccaagacgcccggcgccagtgagttttggacggtccatttggctgcccggccgcaggtgaatctgcgctccatcggacgcaagcgattcgcccatttgtcggagtcgcaggacgagatccatgtggacgccaatattccttggggcgaggatacgctctttacgctggagttccgtgccgaggagggcggtcgctatgctctgcatacgtgcaacaacaaatatctgaacgccaatggaaaattgcaggtggtgtgcaacgaggattgcctgttcagtgccgaatatcatggtggccatctggcgctgcgcgatcgtcagggtcagtacttgtcgcccattggctccaaggcggtgttgaagtcccgctcgtcgtcagtgacgcgggatgagctcttctcgctggaggattcgctgccccaggcttcctttatagccggactcaatttgcgatatgtgagcgttaagcagggcgtcgatgtgacggccaaccaggacgaggtcggtgagaacgagacgttccagctggagtacgattggtcggcgcaccgttgggccctccgcaccacccaggatcgctactggtgtctgtcggcgggcggtggcatccaggccaccggcaatcgtcgctgtgccgacgctctcttcgagctgatctggcacggcgatggctcgctctcgttccgggctaacaacggcaagttcttggccaccaagcgctctggtcatctgtttgccacctcggagtcgatcgaggagatagccaagttctatttctacttgattaatagaccaattcttgtactgaagtgcgagcagggattcgtgggctatcgcacgcccggcaacctgaagctcgagtgcaataaggccacctatgaaacgattctggtggagcgggcccagaagggcctggtgcatctgaaggcgcatagcggcaaatactggcgcatcgagggcgaaagcatctcggtggatgccgatgcgcccagcgatggtttcttcctcgagcttcgcgagccgaccaggatctgcataagatcgcagcagggcaagtacctgggcgctacgaagaacggggcgttcaagctgctggatgatggaaccgattcggccacacagtgggagttctagggcgtgaccacgaccatcccgaatgggttgctgcacgcgtcatcagtatcacaatcacacacatacttcccaaccaagcggggattccctaattattgatccacgcagctgaagcgccaagaagagtcgcacaagaatttgatatatcctaaacaattgcaaaatgaacgaaattaaaatgataggaaggaaacgttgatagacccaaggagatacgagtgaatgaaaaatgaagaaacaaacttatatatttatatataaagatctacgtatacatagagagagattttttttaaacaacctatttagctttttatacgttttatacgatgagaatatctacaaacgagaacaagaaatcttttagcgtagacaacaaaacaaaacttctgtcgcgagtccttccgttttatcaaatatatcagcaactaggccagcaaaaatgaagaaagacgtaatggttatacaagcacatcatatatacaccaatatatacatattcgattcgtaaagcttcac

SEQ ID NO: 1488 - protein, 512 aa, DROSOPHILA [sequence omitted]

SEQ ID NO: 1489 - DNA, 3064 bp, DROSOPHILA
attagttacctttggtcagggcaacgctgccaaagtagttaaccaccatcaccttgagatccacatccactgccgtggatgccacatcggctcgcacactgatccctccgttgttgatgagtatgtccacttggttgtacacggccagcacccgggtgacaaattctggaatggagttcagttcagccagatccaggggaagcactgtcggcggataagcgggatcctgaaatggttagtgcattataatgcgaaccacataacctacgggtcccgaacttaccacatccaatgcgaggaggtccttcttaacccgctccaattcctgagtgcgacgtgccgccaaaataaccctgcatccagcgcggtagaagacgtgggccagagattcgcccaggcccgaactggcccccgtgatgagcaccacctgcaaatggtttacataattaccgggctaatcagtcattaagttaaactcgtcaccttgccgggcaattgattgcggaatttctgggcctggaatcgctgccaaatgttgatgatggccagtggaagtgccaccggcatcaggaccgtgcccagcacccagtaaagaacgttccagtcgctgctgggagcacatttgtccatgtcctgcaccttcattttcccaaaccgacgcgattcgatgatcaaacctttgaactccaagccgaatgcaaaatgattagcaatgacaacaaaaccgggattgtcattcactgcgaataaggcacaggggagcttagttaagaggaaagaaaatgaattctaagtgtaaggaagaatacaaaagtgagccacatgggaagtaataattattgtaacatcaagtgggcaaagtatgtaagtttgactttcattattacatttcaactgtgcttatcttctatcgaatatctactgtgcactgctgtttcgctgagaatggcaactgggccagctgattattgttacgttgttttgctgcacaggctgctagagaaataagatttacttcaacctaaaccaatgccacgatgaatagtctcctgcgacaaggactccgcctgggctgctgccttccggctgtccagcagcaaatccacaccaccgccgtgcacaggacattctgggagcgcgagaaaaagtccggctacaagaccaagctgccggaaccctcgaagaagcagatgatcatggacggcttgagggacctcaaggaggagatgaagctgtggcgccaggaagtcaaggagcagttcgaaagtgatcccatcctggtcttccggccgggtgaaacggatgtggtgttcgatttcaaggcgccggatgtgctggacaagtggacggtgaccaccgatgcggatcacggcgagggcaagagtactgcgactctggaactaagtgcagccggtgctggactcttccatggccaagtcaactcggatcacaccaaggatggcattatcaaaaggacgggatatgcgaacattcgcacgaagagagtgcgggtgagtttattgttgatttcaaattggatgtaacgatactaagcctcattatcctcagaaatcctttaagcgcgagaccacctatgactggacgcagtacaacatgctggtcatgaaggtgcgaggcgatggacgcagctacctgatcaacctgcataccgaaggctacttcgacctgatgtggaacgacatctaccactatgttctgtacacgcgcggaggtccccactggcagatagcgaagattcccttctccaagttcttcctgtcttccaagggacgtgtccaggatcgccagggcgccataccgctgaacagggtaacccacttcggattctccgttgccgcaaagaagggaatggatggcccgtttggcctggaaatagactatgtgggtttggagtacgatcccagtcaccgcgaggaattcgcctacgaaatgtaccagactcccaaatacatcgtggccacgtaacgtaaccgccttacgttacgtttgtgttatttaattgtagaaacgtacgaagagcagtaaagattggttagcagaaacatgcacattgcctttacatttgggaaattcaatatttattaatatatataaatagtaaattcacgaattaaaatttttagaccatcactcataggcagttacaactgtaccctcagctggttattgctctctttccatctctatttctttctatatttcttttgcttttgcagaacctttctcttcgcaatcagctgtttaaatgtttacattcacatcgccgaatattcagggtcatttaagcgttgaaaccagagaactgcagcccgccactcgcactctacgtccacccgataaacactcggtactctaggcaccccgttttttttgacaccctacttgcggcaacacaaaatactcgagtgttttaccgacgttgtgtttttgttacgagtaaaaaaaccacccgaggcctgctgcgcaagagccgtatgggtgagtggacgcacagtcaacgatcggccgcaggtcattttttgtatgcgggctgcagttctctggtcattttttgtacgcctaaaatttgtatgggtggaagcgtgacgggtataagaaatgaagggtaaaagggaatacccaagaaaatttttgtgctcatgtctttgctctttgatggactcaatgggtgcctcccatttcaaacacataaagtaattgcaattaaagacggcatttgttgatttttacgttttttaatgtctcaatctaaataataaaaacatagtgggcttaaaaagtatctattaaatataaggacttaatgttgttggatcaggtagtaagtcatcgacgtctacctgttccccatagatagcgccgatttgtaggaaaaacttcaccaaatttttaaatccggctccggttactgcagaaaacggccgacaatcttggacaacccattgggtgcatttttcaatagctactttcttgtcgttttccgaaacaatttttaattccgttggtcgtcttaatgttagacaacatttatggcgggataaat

SEQ ID NO: 1490 - DNA, 1006 bp, DROSOPHILA
agaaataagatttacttcaacctaaaccaatgccacgatgaatagtctcctgcgacaaggactccgcctgggctgctgccttccggctgtccagcagcaaatccacaccaccgccgtgcacaggacattctgggagcgcgagaaaaagtccggctacaagaccaagctgccggaaccctcgaagaagcagatgatcatggacggcttgagggacctcaaggaggagatgaagctgtggcgccaggaagtcaaggagcagttcgaaagtgatcccatcctggtcttccggccgggtgaaacggatgtggtgttcgatttcaaggcgccggatgtgctggacaagtggacggtgaccaccgatgcggatcacggcgagggcaagagtactgcgactctggaactaagtgcagccggtgctggactcttccatggccaagtcaactcggatcacaccaaggatggcattatcaaaaggacgggatatgcgaacattcgcacgaagagagtgcggaaatcctttaagcgcgagaccacctatgactggacgcagtacaacatgctggtcatgaaggtgcgaggcgatggacgcagctacctgatcaacctgcataccgaaggctacttcgacctgatgtggaacgacatctaccactatgttctgtacacgcgcggaggtccccactggcagatagcgaagattcccttctccaagttcttcctgtcttccaagggacgtgtccaggatcgccagggcgccataccgctgaacagggtaacccacttcggattctccgttgccgcaaagaagggaatggatggcccgtttggcctggaaatagactatgtgggtttggagtacgatcccagtcaccgcgaggaattcgcctacgaaatgtaccagactcccaaatacatcgtggccacgtaacgtaaccgccttacgttacgtttgtgttatttaattgtagaaacgtacgaagagcagtaaagattggttagcagaaac

SEQ ID NO: 1491 - protein, 296 aa, DROSOPHILA
MNSLLRQGLRLGCCLPAVQQQIHTTAVHRTFWEREKKSGYKTKLPEPSKKQMIMDGLRDLKEEMKLWRQEVKEQFESDPILVFRPGETDVVFDFKAPDVLDKWTVTTDADHGEGKSTATLELSAAGAGLFHGQVNSDHTKDGIIKRTGYANIRTKRVRKSFKRETTYDWTQYNMLVMKVRGDGRSYLINLHTEGYFDLMWNDIYHYVLYTRGGPHWQIAKIPFSKFFLSSKGRVQDRQGAIPLNRVTHFGFSVAAKKGMDGPFGLEIDYVGLEYDPSHREEFAYEMYQTPKYIVAT

SEQ ID NO: 1492 - DNA, 3140 bp, DROSOPHILA
gtgggatcccgagagacgccctgcttgacatccgtgtggtaggagacgatgtcctcgcgtatgtagaccagaatgcgcagctgattcataaagtcctgcgtcaaaggaccgcagtcgcccacgcgaaaagtgtgattcaaagccacatcgcagtcgttcaggttcaccaggagcggaagtgcagcactagaggtccaggagcagcgtagtctcatgtggggattgacctggtagctattttcaatgagagtttcatccggtgtcttgccatgatggcgcaccagggcttgcgaggttactaagtaagcagggcgcacaccctggtagctaagtattcccctggagaagtgcgtagggttgaactcgtactggagcaactgagtctgcccgagatcactgccgtcgcacaaaaaccacacggatccgagtccctcggccagctgcaggaactcggagcacacgatggacctagccttgtccacgggtattccgcgttgatattcctcctccagcttccagggattcgagtgatccagctgcaggtcgatggacaagtcggctatggcgtccaccaggcagtcgtccttcaaaggacttcccgtcagatccaagtccgcagagccctctttttttggggctgccctggtgggcgtggtccggagtctcgccactgctccattgcgatcctccttaaagaccagcacaatcttcttgccagcttccgcagcccccaccatgctcaccaagtaggtgggtggcgctccataggtgatcgtgtatgactcgccacaccgccgcattagctccgcgtaaacgtttgccaagttcgcagaagccgacatttttggagcaaattcgcaaaacagaaacaaaaagcggcagtatttgaaaagcgaagcgagaattggttaaacggtcacacagcacttcgctttttagtgcacctcaataattttagcagtaagccgcgtgaaggtcacactgcaacatcgatagccgatagacttaggccagcaacaatcgataattcttatccccgcacgtgttgaaattgttttcttttatttggatcagatttaatttagttaattcagacatgtcggactttgaaatggaggacagtgcctcgggctacgactcaggggataactcagatgccgaggtaagtgaggaaccgaagaaatgaacaccccgtataccaaaatctccactcttttcctgcagctgcaagcggcatttgagcgaggcgacttgaaaccaggcctaaatgtggaattcaatggccagagagacaaagtgaacgatgtggtaagtagctagctggatgcccgcttttgaatcgactaatccaatcctgcccacatagaccaaactgctggccaagacagaggctatcaagatgcaactgccttggctggaacgcctggacatgatcaacacactagctccactggcgccggaactcgctgtacagctggagaagcacgagcagaagcgggccaatctcttcaagggcaacgccaagctgccctacattcggcccgaggaggatcccgtcctgaatgacttcaagagggagatgctcttccaccgacaggcgcaaagtgctgttctggaggccattccccgccttcacgagctgggcataaagactcgtcgacccgatgactacttcgctgaaatggccaagtccgacgagcacatgcagaaggtgcgcgccaacctgatggccaaacagcaaggacaggcgaaatccgagcgcatcaagcagatccgcgagcagcgcaagatgggcaagatgctggccaaacagaccaaggtccaacgcgaagccgagaagaaggacatgctggacaaactgaagaagttccgcaagggcaagctgaaaaacctggacttcctggaggacgccaaggcgcttgagtccaagcagaagcagtcagccgagaatcgcaagaagcgcaacaagaagttcggcttcggcggcaagaagaagggcctcaagaggaacacaaagtcctcctccgcgggattggatggcgacaagtcctccaggcgccagcggggcgtaaaggcaggtgcttcggtcaacaagcggcttggcaaatcgcgacgcattaaggccaagggcagaaagtaatccccgggactgccgactatatttaggtgaccaaactctagttttataaagcccccaatcctgtatagattttttagacccataaatacataacattttgtgtgcacacagccttactttcgaaatgtggaatactccgtatagaattttagaattccatgagcaattttcataaattacatttttctaacatcgtttattctaaagtggactataactattacacgttctccttgttctttcgtttcttttttagttttgtgctagtttccgattcctccgaagagtccgccgtttttcgcttcttttttgactttacttgttcatcagtttcaacatcctggggcagtccttcagttgctccaagccctgcttgcctatccgctctcttgtccttcttcttttttatcttcactggctcttcgacttccacaccgtcttcctctcccggctcccgtgtcttattttttttcctcttgatcttgacgggatcttctggagtttgatgtgctggggattcctttcctgccttctcagccttgtctttcttctttttcttggattttatgggctcttccagttgggaaacctcacatgcctcggaaaactcctccgctatggattttttctttttctttgccttcgtatcacactgctccacactgtcatcaactgactccactgctcgatgctcggtttcaggcgtagtcttcagcttgcgctgaagcttctccagcatctcgcgctcctgctgctccaggcgggcgatctttccgctcagctttaggccatgccgtgctcctttgtgcgcagtccttcctccgcaggccttgaagagttccgcatctgtgagtaccgccaccttggtgacctcaatgtcctccaccctgatgcgttcggaggtctcaacctctccaccgctctgcgtgagcagcgaagtctgcaggaagttgtcgtaggtggcctttccatcgcttgcgtgctgctccttcgctttctt

SEQ ID NO: 1493 - DNA, 1020 bp, DROSOPHILA
tagacttaggccagcaacaatcgataattcttatccccgcacgtgttgaaattgttttcttttatttggatcagatttaatttagttaattcagacatgtcggactttgaaatggaggacagtgcctcgggctacgactcaggggataactcagatgccgagctgcaagcggcatttgagcgaggcgacttgaaaccaggcctaaatgtggaattcaatggccagagagacaaagtgaacgatgtgaccaaactgctggccaagacagaggctatcaagatgcaactgccttggctggaacgcctggacatgatcaacacactagctccactggcgccggaactcgctgtacagctggagaagcacgagcagaagcgggccaatctcttcaagggcaacgccaagctgccctacattcggcccgaggaggatcccgtcctgaatgacttcaagagggagatgctcttccaccgacaggcgcaaagtgctgttctggaggccattccccgccttcacgagctgggcataaagactcgtcgacccgatgactacttcgctgaaatggccaagtccgacgagcacatgcagaaggtgcgcgccaacctgatggccaaacagcaaggacaggcgaaatccgagcgcatcaagcagatccgcgagcagcgcaagatgggcaagatgctggccaaacagaccaaggtccaacgcgaagccgagaagaaggacatgctggacaaactgaagaagttccgcaagggcaagctgaaaaacctggacttcctggaggacgccaaggcgcttgagtccaagcagaagcagtcagccgagaatcgcaagaagcgcaacaagaagttcggcttcggcggcaagaagaagggcctcaagaggaacacaaagtcctcctccgcgggattggatggcgacaagtcctccaggcgccagcggggcgtaaaggcaggtgcttcggtcaacaagcggcttggcaaatcgcgacgcattaaggccaagggcagaaagtaa

SEQ ID NO: 1494 - protein, 307 aa, DROSOPHILA
MSDFEMEDSASGYDSGDNSDAELQAAFERGDLKPGLNVEFNGQRDKVNDVTKLLAKTEAIKMQLPWLERLDMINTLAPLAPELAVQLEKHEQKRANLFKGNAKLPYIRPEEDPVLNDFKREMLFHRQAQSAVLEAIPRLHELGIKTRRPDDYFAEMAKSDEHMQKVRANLMAKQQGQAKSERIKQIREQRKMGKMLAKQTKVQREAEKKDMLDKLKKFRKGKLKNLDFLEDAKALESKQKQSAENRKKRNKKFGFGGKKKGLKRNTKSSSAGLDGDKSSRRQRGVKAGASVNKRLGKSRRIKAKGRK

SEQ ID NO: 1495 - DNA, 29263 bp, DROSOPHILA
gaatgcgttcctaaaatatccattatataagccatgatgcgaaattacttgaaaaacataaaccagcttgaatggaattccttgagagaaacttgtagatttcgatatgcaagttccctaaacgataaagttacactttggcacttttactttcccaccaagaagttggatgacttgcgaaagtaaaccgcaaactgattaatgccatttatgcccaacgaatctggctttatgtaccaagattgtcaaggctgtcaagggggcgtggtggggtggggggtggagggaggtaggtaggcggagaaagcgcctgaagtgggcggttgaaagtgagttacacgtcgccgttgtgatgctggcacgttgaaaactttttcggaataagttgaaggatgtggcatgtcgtaaaacgaggcgtggctgcaaagtacgcggccacgaaaatttccaaaaaaaaatttttaatgcacacaggcacgtgaaaattgcccagcggccattagaacatcaccaccatcatcattattaccgcacataatttacccatcaaacgccacccattacccattccaaaccgatgtttccacacaaaaccatcgcgtcgatgtcgccagataaatttgccatgtaaatacaatacaatgaacgtgtaaacatttattatgtgcttataaattttgtcgttgttgtccatgctcaaatctgtcaattgtctgatttaaattgtacacggatttgttttattatacccgctgcttgaaaatgaactggggtatgatgactttcggccattttgcaatttaataaagtttatttgaactaagctgtggccatagatatcatagatagcatacaacttaatataaccttggaattagttataatctatgtagtattcccagaaagtttatgaaaagagggtatcaagtagtcttgtttatgcaaacacatcatcgatggacttcgcctatcaataattgtgcaatatcaacatttgcagcagcagccatagcgaattaatttcaaagtgtttggctattagtgattagcgataaacgatatccgagaacaataattccgccaccgatctgccggccgtgcaatctcaaatctcaaaatgcttaaaattccgctgcagctgagcagtcaggatggcatttggccagcccgattcgccaggcgactccatcaccaccaccaactggcttatcatcatcacaagcaggagcagcagcagcagcagcagcagcagcagcagcagcaggcgaaacagaaacaaaagcaaaatggagtgcagcaaggacgttcgccgacatttatgccagtgatgctgctcctcctaatggccacactgctcacgcgcccgctgagcgccttctccaaccgtaagtagatgcttcgatatatgccaaccaataatttgtatgtttatagtgcttttcatattaaaaaatgcctagaaatgttgcacagcaaagtaattcctaactatctaaactacctaactatctaaactattatctgaaatcaaaattagttcgttttatccagttcaatacgaattcagcgtggtattaaattattttgcttgtattgtgaaaaacccttattatttgtagcggaaaataaggtcaagatccttggcttggcatcaatcgaaactctcacgccgtcatctcaattacgcaaatgcataggcgggacagcattttgggaaggcaagttcagttgcctgtttgcctgcttgtttataaagcctgtccttccgtacgtccgtttgtccgtccggatggatggctgtccgtccgtccggatgactgtctgtctgtctccgtgagtgtcagtccgtgtgtacgggtaatggcgtatgtgtgcgtgtgcttgtgcgtgtgtcgaggaatgtggatgtggaagcatgcgtggggcattaagttatcaagtggagcaatggcaatggcatcgccgaagaagatggcggatttgcggccagccctctcgactgtgacatgtttgtttgtttcccagctacaagcattaaaattcgcacccacccgcacacccgcacacccccgcacaatccgaagaaacgcagagtagggtaaaattgagatgtagcaggacgaaggaacaaggactaaggacgatggtatgccagacggagtctgggcccgtgtaggtggcttcctcgcctcgtaaagttcatggcttggtggcttgttccgaacaccgactacgactactcagactacgactacgacgacgccttggctggcaggacagaaggcgtgcattaaaaatcaatagaagttacaaatgtatccttccattgcgaaaaaggggcaaaacatttgtggcgccatttgtgcgctgacagactgactgactgactggctgactaactgaatggccgactggctgactggttcgcttcgatgctccactgcccacgacgtcgctggtaactacaagggttataggtgttccggggaacggaatgtggaccgtgcaggtgtgccaacgtcatcggacgactgattttgcagatccccagccacaatagtccatgcagtgggatacaatttattcgctcgacatgaaagcgataaaaactggaaaaagataagcaagcgggagtaagactttttatgccaatcataaaagacaactacacttgcttaatatcattgataaagaaaagggtagaaatccgaaaatattaaatttttttttcattttttcacttttgtcgccaaaaaataatcagtatttttgtgataagcaaaaaagtaatggtccaaatatggaatgtcatacctcattgaactcgtaataaaatttccaatcaagtggcattcacagctagaaatttttaatttggaccgttttttgcaaaaaaggatgatgttaccccttacaaaaaatttgaaaaattacaaaattttagatttcttgaaatcagcaggaaagtgatagggatcgttagctaagatattaagctgcacaaatcagtcattattttagctgtgcgaccaattttaacgaagttatgtccaaaaattcactcaagaatatgcaatttttccattatttcttaactggatttttcgcaaaaaatactcagtatttttgtcattagcaaaaaagtaatggtccaaatatggaatgccatacctcgttgaactcgtaataaaatttccaatcaagtggcgttcacaactagaaatttttgattttttcaatttttcgcaaaaaaggatgatgttaccccttaaaaaaaatttgaaaaattcaaaaattttaaaatttttgaaatcagtagaaaattgatagggatggttaatttatataattagctacacgaaacagtcaatcattaatctgtacgacgatttttagccaagcgagatgccaaaaacactttaatacacgagctcaagtcttgaatttgttgttgtttgtgcttatgtgtcgcatttaatggcatattgtttggatatcaaattgaactccaatcaatgctatatatacaccttcaatcaagtacatttctatgagtttaggcaaatccatttactcgatactcttgaagagatgtaaagtaaacgattcgagtgcccaaacatccaaacatcgaaggcaacaagtccaaattgatgctcaagttacgccagctatttgatgacagttcattggtccgatggcagcaacaaagagcattcatgaatcataaacgggacaaacattcttaatggccatcctagctgatgctccactcgatgcactgtgaaaaaaataagtttcaaatcaaacgaaacatatcgttgggcaagtgaagactgtgagatgagcaggcaagcagcccatacgattttgttagttacttctttaaagtaactaagctttgactaacttttattgttttttttttttttgtgcagtgtaagtggcagtgtgtatgcgaatgaaactttatatgttcctttcgtattggccatcgagtgtccataaaacaaaatttgaatgcgaagcgtaaacatcgaaataagcaaaataatttgctattttttatttcgtccttctgcttcatttttccccatttgctgctcaaattacgtatccgacgtgtgggcgctcgtccgtccgggctgcctgcccacaggacatcccaaatccgacataagtgtctgattagttcaggatggggctactccacttatttaccttcgacggttgggcctcataaatccataaggaactgacaaaaaaaaaaaaaatagaaagaaaaaatgtaaaagaaactcgagtgaaatcactttgcttgtcgtgtgtttttctcctattttcttttttcttttttttttatgtctgccgattggccggcttacgagagctttggaatcaacggggcgccatggcacggagttgcccgcaaaagccttggccactttctatgcgccagacacacgcacatggtgtatggaggaggagctctgctccagcttcctgctcaatggccagggccatgttgtaccaaacaattcaatttatataatccggcggacagtgggtgcccggtggacggtgctcctccgatttctacgttccaggttaatgtgtcaccaacagacatccacggtggatgcgaatgtcacgttaaatgtatcacgtaactggatgcgtgttacatattgctgtgccctcccacaatatctgttgtattttttgtaatttgtatgatttttttttttgccatttccaatccttttgggcttttaaagttgcatttgacttgtgtaacgccatttatgcaaacgcacatttgattgaatttcgctcgcaacaaagtttatacgaaaagtaagcagtttaagtgcgaaaacgaaaggcttaattgctgtcactagagatgttcaatttgattcaacaaaaaaaaaaaactgttcttaattgctaaattgaatttagcacgctgtgcagaagataatgcctcgctatcaacaattgaattgcagttcgccaatgcgctggcataataaagttatttggatttgattagttagcttaaatattttatttaaactgaatagttctacaaaaatgttgtagaattgtcagaaatcatatcggttattgtttattttattaaaaaatcaaaagatttttaacaacgtatttttccagatttgttatgccaaatacagtaaattggaaaaaaagcacattctgtaaattgcaacccaatcgattttcatgagagcacaattaaatgcttttaccgttaaatccccatcacccaccacccaacctaccctttaattcagcgggcgttttatgtctgtcgtcttaattgtgtttgtaggtctcacctttttgtggcacctgtcctgaccaactgcttctgaatccagctggtatttatttaattcgcgtagatttttattaattttaattgaaagctttacgagcatttcgctgtgcgctttgaggctttggccccctctccttttgccactttatacacccccaccccccctcacccactttttcgcaagcggcgcctttgtttgagattaactttgtttttgttttttatttctctgctggctgcattgcttttgttttatgtgctcagctgcagttcttgctcacttgcccctttctccctctctcctctctctctctctcttcaccatctccttatttctttcttcgagcttctgtccctttcttaggccccttctgctcgactttcatctctgtctgtctctttctttcgcttggtgcttttgcttttaatgctccgtttttggtgttgatttagttgttgttattgtttggagacttttgttgtgtgcaaagtgctcacgcttatgttgttgttgttcccctccgttttcttattgttgtttttagactgcttggcactaagctaactggacttgactggaaaattaaaagactggaaggagagcgtctgagatttctcattttcagagatggaaaatcatttttggatatcaaatctctagccaaaatgcttataaatcaataactggaataatatagtatttcgtctagggtttttaactgcgttatttatttaacgacgattcattggaaacccatacatccagcagatatcaatttatttattagttgtctagcagctatattgctacttatcttaaatttagccgacataaatagtgtttgtccataattcacactaaataaactaataaattccaatcttcagggcataaaattagtgtgcgtaaactacaaaaaaaaaaacactctgatattgcaatttcgttcgttgtcgtcagtgaaaattctgtgcaagctaaacttgtcattaatcaagagcaaaaattacccgccaaagtatgctatgaaaatttaattagatgagtattatacatcgatttttgcaaattttgctgcccatacacacaaggattaagaagccatcatcgatgtgtgtgtgtgtgtgcgtttatttatttaaattagaaaatatgtgaatattgatagaaggatcaatgaaccgcagctgccgttgatttatacgtacatatttcaatttccattgattttaagatctataacacacattttgcagataatgtcatccggctaaatatggccctattatttatgctaaaatatttcatttatcattgcagcagattgtgagtattacaaaaacagctatctaatctgtcccgaatataatgtcaaatgatttgcccaaaagcgaagcgaccatcccattttcccaacctttttctgtcacactttgttaggtggctcgaagcgttgttaaaagttattacctttcttatcgccagcatcgtttttacttacctaccaccaacgacctcgtctcatccacccacaaatccccttgacagctggaagttgcccttgtatctgaattcatccggattcggtgtcctgtttttcggctttttggccaacttgggtgcgactgcaatcagttgacaatcgagcaaatcatccgctaactaagaacagcccaaacgactaactaatgagatagccccttatttacatacatacatatatcgcaaatacgtattaaagtctatatatagcctatgcccatatggacccaataaacgggggacatgtattgggatttggtgtcagagtgaaaacttgactgaataaataataagctcgaaccaaagcgggccaaaaactttgcccaacatttattggagtgacttgagagtttgttgggcaaacttttagctactcgtgtcgccgccgttcgcctttcggtggcagccctaatatgtccgaggctaacgtgagcagtagtatatggtgtatgctatatatgctatatatgcaatacatataggatatggtacgtggatggcacaggtcagggggtcaggagaggccaatgatggccattctgcgacgtttgccaatttcagttcgatttatttagtggaaaccaataaataaccaatgatgtatgtcctgctcgcacaaacacttgcacaactcgttcccccgagtgcagtgtgtgcacagtggtgcaatgttaacaaaaaataaaaataaaaagaaaacactaaatgcaactttaatattcatgtgcatttaatacgtttcggctgccgttgaatgttttgtagctatgtagctggcaaactcgtttgataagatttgcgacatgaattttcgcattattttcgacttcaaccactgttaatcaattgaaaattaaatgacttgattaataatctgcccgatttggggataattgtcgttgcactgtgccgcgggtattgcctgcagctctcggtgacataaaatgggaattcccccgatctctggctgtcttcccatgtacccattttcgcatcctcacatcttcccggcgttctgtcattctttggcgaacacaatttaacactttgtcgccgctcgggggaagcaactaggataactggtgtcccgcagctagaggagcatttcaattgcgaaaccaatccacattcgcattcggaacctaaaaacaaatatggcgtcattcaacgcatttccgtttacattacacgctcatttccgcttcgtgtggctttattaagcgtcgctagtttttctgttgcattttccgttctcgcttaccatttccaccagcatggattttccctgcaacacgtgtgtgtttggtgtgtgcttgtgagtgtgtttgccacttgaagtgcgctcaagcaagccaaagccgttgaggaaaatttttctttgaatttgctccagttagtgaaggaatcgaaatgttttgttggcccccagatccccactcaagccccccccccatccccctccaaaaaaaaggaaaaaaccagacttagtttggctgtgtgcatgcgaacgtacagctgcggtcaaaataataggatattatatgagtcttgcaaacaaatcatcttgctctgaacatatatcaaagaactttggaagatggatattgaaaataaaacaaaatattaattttccatatttctatacccatcaagatatttcgaggtagtgctgcgattttaaccgaagttgtgcatccttgtgttggcaatttaaattgggcaaatcatttgatgccacttaatccatatgtgtgcgtacgtaaggatgtcgatggtattcttaagagaccacgattggctgacttcgatggtggttgtaagaactttaatacgatttaagatgaccaaaggaatggtgggatgtggcgtgtggcatgtggcatgtggaaggtaggtgggtaacacaaccgcgagaccttcacggaatgcaatccggtagatgcttacaacgctccaggggcaaatcccacttgatcatattggtatacaaacactaaaaagaaggcgagctgcttaaaaaaaataacgatatgtaaggaataaaaagtatatatttcaatgttatttgaaggaattcttttcggatgcacagcgttcacaaatttgatccgttttgcggccatttggatgggcttatcattgacttggaaaattgttttcgccagttttaagagatggggtattttggatgaaagaaaagtgactccaaagaattttctgggaatatgtaatttcatcagcacgagtgaatgagcttaaaatgtatgttttttccattttttgttttttttgtttgtaattctcagagcacacaatgcattaattgataacaataacttgacagacagagctgttgaataaataatgacattcagtacagcttattaaatattaatacgagaatttttgatttcgaaaacattttaaaagttcgccatgcagctggaatgatggtttactttaacacatttgttttcatcttttattttatattatttaaatgctcacctggtgaaagtgtgcacttttttctttttcttaataagctttacgattgcttcgcggtttcgcaagtatttcgttaaggaaatcagattttattttccgagtgaaatggtcacttgattgaatttcgattcaaatggaaactgaaagggaaccttcgataactttgacctgaatatctacttttttttttttgccaggtaacacggatcggttaatgcgcattcatttatttactcgcagttttctggcctctttcttcgttagtggctcattcagggcttcgtttcataagcaacatttcatttcttttgctcaactgctgcataaatatttagattcaattcaaattgctttccactttcagaatttcgctgtccttggtcctctaggtccttttggtccttttggtcctttagtccttcagtccttcagtcctttcccctggccgttttgtttgtttatttgctttgttatttcgcttcggcttccacttctgcttgagctttatgcggacgattggcaacaaaagctgccaatttgtatttcaattaaatttgaatgtatttgtgggcacttggctgctgctttctccccagcttttccagacttccgctctcgctttttcttagccgcttcgcgaagacgcttcttcatcagctccttggctaaagggtatgcgcttaatatcggggtatattccatttgtgcacttacaaattatattttcgaaatatttgaattgaaagataaagataagtgtcgaaagttatggacagcactgcgtatacgtaatattttagcttcgaccaagaggcaacggtgcgtatgactttttaactggaatattacttcgcaggcaatcttatgattttagatacaatctgttatatactctcaatgtcagaatatgaattttatgaatataatatgttattaaccgagtttaaatgtttttatcattgcccttataaattttttttttgtccaaagtccaaaaactacttgaagtgtatccaaaccaatgggtaactcgcaattgaaagctgtttccccttgtttacactttttgctgagaacttaaatccatcagtgaagcgtgggagtggccaaaaaaagggggcgaacggatattccgggaaaggggttcttttccagaaggtggcggtggcagcggtgggcgacggactgtggaattgccgccgccagccaagtgtcaaaatggcgcttccaagtaatttacttatgtctaaacaacttttattgttgttgccgttacgctgcttgttaacgcgttgtttctggcccagttgcttctgctgtcgttgctgttgctgttgttgctgttgctgttgttatttctggggcgttgaaaagcgtttaattaactaactgctcaccatatagccgcgcttagttttcggcaaatatttgttaattcccaaaccacttgaatgcgctcgttttggctgcgcctcaattagcgcgccaaagtaaatctattttaaattgattttcgttgcctgattaaattagtttcgcccgtgcaacgtttgctcagccccatccacttttagccatcccgttcttgtccttgtggtgtataatttcatttttgaatccatcccacatccccacacccctccgcacgtcgctctcttttagccaattacaaaacgctggcgggcttcatttcgttctcaaatgtttccatgtggaacatttcgcaactcattaaagtcgacgaagtggaggcggcattgcgctgcaaagaataagtatttaagatctattataatcgttcatttagtttacatttcagattttaatatttaatttttttgtataaattgtatttatttttagacagaagcacacgcatgaaatccgcattttaatgatctttaatccgctttttctctcagtagtagcactaaaatttgtgcggatttattatggcttcaaaatgttctatgcaaaattcaaatttctcttctgtctgccgccagtcattttggcggagttggcctggcccaaaaccaaagtccataccagaagcaactccagctctagagccaaatccaaatccacatccaaatccatatccatgaagcgactgaggcaaccaagcagccactgctcctctgccgatttgggtcaactatggtatgtggcgcacattaaaaggaaaaccatttggaaatcgggaatcatcagccgatccattctgcatccttcagccttcatccttcatcttgcatgcatcctccattcaacaatctccatgcagccattatcgcatcgccgggcgttcgagtgcgatgcatcaagtgcccaagagtcccagtgcccaagtgcccgagtgcccaaaagggtcgttctgtccaacatcgaagaatggaaaaaaattccaaatcgaggacgttgcgattaaggggcgtggccaggagcagcgagcagggaatatggaatatgaaaggagtagagcggagagtgaaggtggagtggaccgaagcgatggggtactttcattgagtactttccatttgaaactcattagtgagagttcagttgggttgcaaatgtgggagttgccatgcagagaatgcgggcgatgtgaagaatgttgtggaatgtgacggcgatgggcggtattttagcctgggggcgtgtcaatgtcttcattgcagccaaattgaatcatacatacaagcatgagtatgtgtgtgtgtgtgtgttggccatgtgcagcagctgtgtgtgtgtgttagccatgcaaatgttgagccattattaagtcactaaagcgctcgacgatgggcgcctatattggtcaagcccccagtcagacctcggtaatttttctacttttggcctacatttcattaacagcagcgcattaattagtgacttgtttttttttttttttaattgccagcggaggtctaatgatgacattttgatgttaaaatgaaaactgcaagccgaagctttaatgcactttttgctatacgaaactgaaatgtcaacttgcttttacttactttgggcatatatatattattaataatgtaatttatataatttattagcagtattttgttaataatgttataataaaatatgattgaatgcgaaacaataattcatcaacaatttatgttagataccaccattgtactttgtactcatcctaggcatatatgaaatcaacattatgcaaatgcatatgtgtacatatatgtatatactaacatatatgtacatgtgtacatatacatatgtatacgtatctggctcagccctcgacatatgtacatttaattcaattcagttacattccatacgttctcgtcgtctgtttgtctattttaatgttattttatttttttttttattttttttaatttaaatttcatttccatttcttgctggcacatcccaaggtggcgggtgttgcaagggacacaaaaggcggggcagatgtgaatgggcatgctgcattagcacaaagccaacaacaacggcagacaacagttgttgctaaaataattcaaccagagtttggacttcataaaggggcaaaagtggtgttggtggacgaccactttcatatgcacacacacacacacacacatacacacacacaggcagaaacaaacggcagcatgagcaacacaacaagcatacatacatatacatatacacgagcactgagagaaatttgttgggcgatccattcatttgaattttaatcgaatcaaaactttaatatatatatataactgatattatttacattctttaaactttttttctctgtgtatgcaaaggacacatgacggtgggccgaccgaaaactttatgtgtcagttgaaaagtatcttggagatactttcttgcctccttcttagccatgaatccccatcgccattgccattcccatgccacccccaattcccctcctttcgcctactgtggcttttggcgcagcaaccgccacaatgtcattaaccaaatgaatggctgacactgcagattcgaatgactgaaacaacgggcaatggaagggggggggggctgtgaaacggggagatacatatacaaagataccacaagagaggggagacgggagcagcagcagaggagcaggccaagttaagactgtgacgtccttttcttgtgattaagtcggttacccacccagtggataccagtcagcccatcagtctccccaacctcattcaaatcccattcccacaccccacaccccaccgaccatttgccgtttagccgtagattacctagtgacttgttcccttacctttctcttagcccggcctaaacaaacccaaaataaggcaaggagtccgacaaagacagcctcgtcaacggttctgatacacttgttattcgaacagttttcgaatttaagggaatggtttttaatgcttgttaagtttaaaaaaaaatatattgaaaagatatgaacttattatacacgtaactaaagataaaagatacacaacaatattttctataagcagttcacacagttttttcttctttttgaatatttaataaagatgctttaaagtggataggtgatatatatatatatattttgaaatacccaaaactccaaccagaatcgaagagtatgtgggcagaaggagcaaattttgttttggccaagtgccgttggcgatggtcaaatggggctcgcaggaatgttagtgatgacaacaacttaatggaaatagctgcacatttataagtgacaactctgcagctgtgttcgtgcgtgtatctgtgtgtgagtatatgtatctgtatctgtatccgtatctgtatctgtaggtacgtgtgtgtggcacgtttgtgttggtgtatccaggaccctaaagaacgtgttatttatggtcaaggcgtggcagacaaatggccggcatatgcatgctgagatagacacacagacacacacacacacacacacacacacagatgccaagtaataactaacggtaaattagtttgcaaacagagtgcaaaaaaggcagcaaaatagcaaaaggaaaattgcccaaagatgaaacctaatttagccaacacgcacacacactcactcacccactcaggcacactgataagcctgtgagccacaacgccaacagccaaccaccatccacaggccactgccacgccccattcgcccctttttttttttttgcttttgtagtaccaagttaacgggacaagtgccttatagccaagaacatcaaaggggactttcggtacatcataaaacccgaatcagttgggtggactgattagctctcaagaacttgacttgagatccggaaatccgtgataacacggcatacatacttgtatttattaaatactaattggattaatatattgtatatatatatatacctgtgattgaaactagagaaatgagaaagaccatctaagcaatgtaggcttttagagagtcctgcatagttggcatatggaaacccaatatgtttctttcatcagctttctttttttctttttttgatcaccttagattgttcttcttcggtttctccgtttgctactcggccgatttagacatttttttttgctagaggcatcaaaggaccaaatgaaaacgtggtccttggtccttggtccttcgtcaccaagcagccagcatgcagttttgcagctgcactcgtttgaacatcgcttgttatccatttgaagttgaagtgggtattttttatttattttttgttactatataaattggttgttttgttgcggacgcaaagtttgcaaatggcgaaaaagtatttacaaaaaaaaccctatttcgttcgcatcaacagctgggataaactttcgcaattcattattacgaacagatcagaaagttgatagttttatttaatttgtgtcactaacccttttcgaacttttgcacacagagaaaatcaaaaattaaatgttctgcgcaaaaggtaaaagttatatttttaaattgtattgttttgttttacgcttgaatgcgttgttttttattaagtgtttggaatttaagtaatatattgttttgtgcttgttttttgtttagattgggactaagctgaaatggcttaaattatagggtatttttggcatcgatcatgattcatgcgcctgtatttttttttggttttatcaattttgtttaggactgtggctttgcagcttcgcttttgggccgtttttgccgctttgggccgttgtgtggccacgcgttggctgttttgttttttttttttttaccgactgcctggctctgtggccacacatgtaccatccgcccaaccacgcccaccgcctcattcccctcagccgcccagtttgcggtgcgtggtcagctttattaggttcaagttgcatgggaaactttgggctattcccgctgttttgcgtgtgccttttaatttatttatcacaggccgcagagtcgcagccgcagttttggaccttcccactctagttcttttttattttttttttgtggtttatgctggtttccttttggtttcggttttggttttcattatttttttttttttttttttttgcgagtggtcatagcgtcatttgggccaaaaacgtggccgtggcaatttggcggctttgttatttatgcaacagcctgcggcagttaacattcacgtgcgttttggccacgccacgtttatcctcgccaccttctaacatatgcagctcccggttttccggttttccgttttttccctttccgttttcccgcttccttttcccatattgcatgcccaaatgtcgcctttgggggctatccatatgccacgtgaactggccaaaaaaaaaaagaaagaaaaaaaaaaaaaactgcaaactaaattaacgcgtaaaatacgcttgctgttttatggctctttatgactctttatgatcgaagctaagcctgcgaaggacttgtcgcagatccttgagaatgacgaccttgaaagcttaactacacttcgaaaaacaatagtgatggcgatgagcttcgctatttcgatatacattgctcttagtgtattattaccaaacttaaggccttggcatagtttagtttcactttgcttttgataagtttgacagttggccatttaacttggcttcgagttatggcaaaacgctcttctcacatcggttacaattctaccacttacagccatttagcccagatcctttttattcgcataaaaaaaaagaaataagtaaaagtaaactaaagagcactccccggagacattaacgattcatagggcccagtgtgtcggacatcctaatggattatcgactggagggtgtcattactcaatgtgtcacggcgtttgggtgaacagcctccctctgcctccgcccattttcgtctatatatgtactggaacacacctttccccggatcggtcatcatcatcatcatcatcacattgggaatcatcatcgaaaggtggcgcaaagtggttgccataaatatgctttatgataaactaaacgtgcgctcatttgtacaagacaatgtgcgaatttggcgatttggtgatttgttaaagggagaaagcgaagaaaatgcaaattcttctacacaaaaaaaaaaatatatttttaataccaaaatatttcatattaacatagcatttaaatgttcgaaactttgggtttctttgttgccgttttgatgcaaggatcacaaaaaaagctatcatcatcaaggagttttttttttttgtgcgtggaagtgaaaggaagtccattaaaatgccaatagacatgtgtgtgtatgtgcgcgtgggtgtgtgtgtgtaggcagtacatccaataaatcctcaataatttatattgagctgccaccgcatttctgagggttttgccatcgaaaaggaatgtttgtgggttgtctaagcgaaagcgaaatttgttcaaatatttgtctcaatcaaagagtaggcgcgaccatatcgcaagctcatgaaaaagtcgactaaatgatacttattattcaacttgtgcaagctataaaaaggaaggcagcacttttcaaaacattatgctgctgtaaacatattttacaactggtcagggatggattatggataatggataatgaataatggtgctttgacgattggcgaactgctcatgacgagttattgcataacccaatggatctatattgtgagccaatgtcccgggcaacatggcaatcgaagtggacagctgagggcgcggataatgataagtgataagtgataagaggaacagcaagaacagcaaaccgactggcatccgcaaatggaatccaataaagtgttaagtggggcagccaaaaaaaaaaaagggggatgggtggggaaatgatggaatacagggagaaagtccggggaaagcacgaacatttcattccccagatgcttttgcgtcacttgagcgccaatttgaatgagcgaatgggaatcggaatgcgagtggatcagggaagggaatgggaatgggaagggaaggggaaggggaaccagaaaggaaatgctcgaaatgcgacaaataagaggggggggggggaatggaggggcgatggttaaagccatgctaaatcgtcctcgggccaaaccaattgacgatttgtgcatataacattattataatgacatcatcccagagcgcctttggcagcccaacgtccgaatgcaaaaattacactgccaaaaatgtgaagttaaatgtggccaatcaaataaataaagagcgttttttttttgtgctgcttattttgttaaattttgctttttctattgtgaggcaatgaagcatttctcatttcacgcaccaatttatcgcagtgtagttttggagaagcacttcggtatgttcgatgggcgtgcggagaatccacactgagaactggtgggttggcaagaaattggacatgccttcaagtgccgtccgcatcgcatcgagtaaataataaagaaaattcctgtgcgccttggcatttccgccaacgccaacattgtcatcgcttccgtcatcccatcagtccggagacacaaaactatgcggcgcagtcccaaggatccgccgcagtttaacttccttcgcctgcaaaaaaaacaaaaaaaaaggggaaaaacaaaacaaaaatgaagccgaatgagtggtgcgtcaaaatggcatttcaagttcaagcggattggaaaaatcgaaaaacttttcgattggctaagggacgcagtcgagcaaatgcaataaacttcaagtttattaaattttatcacacttataccgacatcgtcttatggactggatgtgcggatatatgtattttcttgtatataatgcatattggcaattgttcgccgtgttcgcaaaataggccaaaagatcgaacagatagtgtgtaaatttcgattggcaacccaatcaatgccaaatcaaatcaactgggccagttccatcaactgaatctacaatgaacgcgcaccaacccattccaaacgaaacgaaaaagtaatacaaaagagcagcgatacaaattgaattacttaggtagatatggatatttgtgagtatcagtatagtacggctattatgttggaaaggtggggtgtatatggcgagactcataaagaatcccaatgagatgcggctcaaggttgctgattccatcacagaaagaagatgttctaaaatgttcttcctttttttttcaatatgctcaaaaaacgaaccaaacattttgggatcaacgagccaattatgagttcaaaccatttcctatcgaatgctcacatctcatttccctcgcaacaatgacgaaatggcaaatgttgggaacgtaactacgaaaacgatttgtttcgtattaccaaactttcaccggcaaaagaaagcaggcggggctttttggggttttccagttccgcttcgttggcatccttgcggttgggccaatgtatctgtaactgtatttgtatctgtatttgtatctgtatttgtatctgtatctgtatttgtatctgtatctgtatctgtatctgtatttgtatctgtatctgtatctgtatctgtatctgtatttgtatctgtatctgtatctgtattcgtatccgtgtccgtgcgccttgtaaaagtgaagtgagacatatgtacagtaacaaatcaattttagtagcaaacacagacggtggtttaaggtgcggaaaggggaggagtgtgggtgccagccaattgctggacgatgggcgccatgtgccgcctggtggccaaactcgtttttgggggcatattacttccgtcgaacgtgattgaactgctctggcatggacagcgagcgagcagaaagcgaaattcatcaacgcaccactgcacggaatcctttactccattccgcccgcacccatgtcaaaaaaaacccgctcgccaccccaccccctcgggtgccgtgtaaaaaaaccacggacccctgtcacttttgattgtaatcgagtgtttttattgtcgctctcgttctcgctctcgcttttcctccgctgccttctgtgtcttcatctagttacactgtaagaaataatcagctaagcagctctttgtattcgtttaaatttagtttctgatctataactagcttgagtactagagtcgttggtttattaggcatcattctaatatctatttaccaacttttatatttttcctttggttttaaaacgtaagccgttttcatgactgtcaatgtgccacgaaacatacatttcatgaattattatattttttccaatatttttttttgtacgttttagcgccatggcaatatatacttgatatactttacgaactgccgtgcatagcccccattcacatccgcatccagagtcctggccatggtcctcgtcctcatcctcatccccatccgctttcgcatcctcatcgtcctcgatctcggcgtatgtttgccaattggatttgacattttattgggttttccttcgctctcgttactgccgctccactggatccacgattgctattgttgttgttgttgttgatattgttgccgtaattgatgtgcctgatgtgctgccgtttcgaccaagtcgctgccaacataaatccacgctgtcctttatgccccagacttcatggatgccccggttaaccacgacatcgctagctactccgctactgagttcctgctggttaatatgggcatatggactgggtagtggataaattgaagtcgcgtggctcgcttttattttgggtaattagtggaaggcaacttgattatcgcgctatctccacggatgttgtccagttgcccatgaattggtaaccaaagcagtgtagccgacttaatggcctgcaataactccgtccgacgctggatggctggagggtccagaaggattttaaccgggtaacaggtcggataacacggtcagcattggcttcagctgaaaattggctccgcagctgggcaattcaatcgcatcgcatggtatctctcaagtgtcctaattaataaattgaaccaggatctttccacaggatgttcgtatctaaccaaaccaaagcgttatccaattaatttggctggcaattcaatttcaattgataacacacaaatttagaaattgaatcaaaataaaagaaaaaactgctgaaattgttaatagaaccactatttaatgtttggttctagagtttttttttttgcaattggaaacgttgcttttataaaattaaaaataatatttgcaatttgatttaactttttattaaacaaaacagtcaaaataaaacattttcagctgtaaatatcattcgattggtagttgaattaaaagtttattgagttacagcatccaacatttggactattgttttttttcatgaataccgcatccgaaacaagtaaatggctgacgcagggccagcatccgatcgcgattcattcgaaagatatgatcctgcatcaactggtcagtgtgggagcgtatttgattacgatcctcgaggacatgacgcaactgaatcaaagcgttatcaccatcgatgccgcacaattcctcctcgtcggcgtgcagactcatatcggcgatgcccaaacgggccatggccatggcaatattatcaatgtcgctatcaacatgaaagcacgataggtatttctgatcagcctcagttgagcatttatccaactcctgcgactgatcgcccactgtacacatttcattcctttctcgagtttctgtggcttcttcagcagtggccggtttcttaaccaccctcacaatgcatccatcatcaaaggcctcgtcgtagttttgcacactgtatgccccctttggtgacttcggctccttcgtttccattaccataaagcccttggtgatggaaatatcaaatttaggtttgacacctgctagcgttgcctttgactcagcatcatcgctggctttcttttcgatctcaaattgaattttctttatcatatcgacggccggctcttcgcgacaaatcttgccaacgaatagcggtggtgtgatggaaccattatactgtggctgtggtggaccgaaacgtccgatgtagtccatgaaccacagttcggatagagttcccggcttgatgacgcaaccggcttcgaatcctttgggcatgaaacgtttgggcagaaaaattggtcgattgacgccctcacaaatgggaaagactccgatgggcagctcgaacttggggcactccgcatcatcgcccatggtggcgaatgccacagatggaacatgcggattgttaacggtggacagtatcgccaccgtaagatcgcgttggtgcgacataagcaacagaacattggacagatccggcgtataaatgttgcactgcaacgggatacggccatatgaatagggcgatggtggactcggtggtattggcaaattgaagaccatcgatagcgaaaattcatcacgaagctcttgtccttttggctgtgccccatttataagatcattgctggcatgcaaccaattcatcaatgtgtcctgaattggttgggactcaccgtctttttttaggagactctcgacccttgtcggcggttggacttccatgcgcaaaccgacaaacagcggcggcgtttgacccttgtgacccgcggccttcaagtcaatgggataggaacgacgcgtaaggatacccggcccaaaaacaccgccagcttcgaagcccatgggcaacatggacgttggcagaaagacaatcttgtccattggaaccttatccgcgaacagggatggcggcacatcaaagcatggggtctcggttccctcgaagttttcggctgcctgcttatcgtgcttattgacatcgagatataggcgggccaccacaatcttctctgggtaaaacaacttcggaatgaacaggttcaccagatagggcaagtaattggccttcttcaagattaccacctgatctttatcacgatgcaccgtatccattcgcagcatttcggttactaacaattggttgaatttaaaaaaaaacaaaaaaaaaatctatacttaatcccgctctggaatttgttctcgattcaatgaataaaaataaatttctcacaatttctgatctgacaactgatattgtgaatatgggaatataactattccaaagcagcgtactcaaatgaaaacatatttcaaaacaaatccgtcgccaaggatgattctttgtggaatttttaagcgatcgatggcactgggctgcgaaatgtgcaatgcgaaaattgcaaacttgaaaattgcatttttagccaaaaatggttttcagatttttcgcgaaaaacaaaaaccgtattttgagcaaaactttgaaaataatggtccaaatttggaatgtcatacctcgttgagtttgttttttaaatcccaatcgatttgcattcaagtttgggaattctaggattattcaatttttcgcaaattttgatgacttacagaaaatgcgaaaatttgggcaaaaattaattttacaaaatcagtttaagagttgttgttgttaatattggttgttaggagtataaaatggtacttctttttgctctgtgaccattttttgtcaagttatagacaaaaaagccaacttgaaaatgaagttttttgccaaaaatcgttttcctgtttttttgtgaaaaaaatatttggttttttgatcataacattggaagtaattacccaaataaagaatttcatacctcgttgagtttatttcttaaatcccaatcgatttgcaatcaagtttggcaattctaggaattttaatttttttgcaaattttgatgatgtaccccttacaaaaaatgcaaaaatttgaccaaaaattatttttacaaaatcctttaaaaagtgatagggatggttagtattggtaattaggagcacaaaacggtaattcttttggctgtgtggtcatttttggtcaagttatacccaaaaaacccatcttaaatattgaattttttagaaaaaaccgtttccctgattttttgtttaataaaattaatcggtaatatgtcatattttgcaaattttgatgaatgctccttatgaaacaatgctttcattctctatcactatcttaaggcttatccgacacaaagctgcacgagatctacctggacgacaaggagattaagctgagctggatggtcgactggtacaagcaggaggtgctcttccacttgcagaatgctttcaacgaacagcaccgctggttctatctgggtttctccaagcgcggcggcctggcggatgcggatatttgcttttttgagaatcagaatggattcttcaatgcggtaaccgatacgtacaccagtccggatggacagtgggtgagacgggactaccagcaggactgtgaggtcttcaagatggatgagttcacgttggcgtttaggcgcaagtttgacacctgcgaccctttggatttgcgactccatgtgagttgagcatcgggcagtcagaaatcggagataatgatgtgtgtgtattatgcaggagggcacaatgtacgtggtttgggcccgtggtgaaacggaactggccctggaggatcaccagttcgctctgcccaatgtgacggcaccgcacgaggcgggtgttaagatgctacagctactacgggccgacaagatacttatacccgaaacgtaagtgattgtgatatatgtgtagagatatgtagtatatagcgtaactacttatcccaccagcgagttggatcacatggagatcacactgcaggaggcgccaattcccagtcaggagaccacgtactggtgtcacgttcagcgactggagggcaatctccggcgtcgccatcatatcgttcagttcgagccgctcatccgaacgccgggcatcgtgcatcacatggaagtgtttcactgcgaggccggtgagcacgaggagattcccctgtacaacggcgactgtgaacagttgccgccacgggccaagatctgctcaaaagtgatggtcctgtgggccatgggcgcgggcacctttacctatcctccggaagccggtctaccaatcggcggacccggcttcaatccgtacgttcgactggaggtacatttcaataatccggagaagcagtcgggtgagtagagtagggcgaaatggaagtggttgattctaagaagattacactgaaacgatttgggtaagtgatgagcagcatcgcttgtgtttgagtggaaaacgttggcttatcgatcaattgataatatatgtacatatatctacagcgaaattaaagaaaaatgtgaaacttacataccgtttaactagtcgtatacgcaatattgtttcccatattaatcattcaatgtcaattctcgtttcaggcttggtggacaactccggctttcgcatcaagatgtcgaagacactgcgtcagtatgacgccgccgttatggaactgggtctggagtacaccgacaaaatggccattccgcctggccaaaccgctttcccgctgagcggctattgtgtggcggactgcacacgagccgctctgccggcgacgggcatcatcatctttggctctcagctgcatacgcatctgcgtggcgttcgcgtcctaacccggcactttcgcggcgaacaggagctgcgcgaggtgaaccgcgatgactactactcgaatcacttccaggagatgcgcaccctgcactacaagccgcgtgtcctgcccgtaagatcctgcatcgcgatcatagttatttaaaaaacattaatacaatgtgtacaattatgtgcgatctatcaattggttttttttttatgtagggcgacgctttggtaaccacttgttactacaataccaaggatgacaagaccgccgccctcggcggattctccatcagcgatgagatgtgcgtcaactatatccactactatccggccaccaaactggaggtctgcaagagttccgtttccgaggagacgctcgagaattactttatttacatgaagcggtgagctgcagctttattatatatttattttatatttaacacatttgtaacgaaaactatgactaaattttaggcaatcaatatatattgatgcgtgccagttatccgtttaagtgataagctctttatgtagtttgattaaattcggattgaacgcaaaaccctttgattttgtagaagtgccgccggctaattccatctgttttggcatatcctttctattttgttcctctttttttccaccatttattcaagaattataacgcccttgcacattcatcgcattctatccatccgtcccgcgggcattttgtggcgttaatggaagaaatattttttaatctacgcagcgaaggcgacgacgggcgacgtcacaatgggggcagtggcgggtatccgacgggagcagtggcgggtatccaatggtggcgggttcttaagggtgatgagcggcggcattgtgggttttcattaggggggggggggaggggttcttccgctcggctccttctgcatcaaagggaaacttttcggcattccctttcgaggctcaattccgtcggcgcattcataacggccaaaatgctctttgttcgcctcctgtggccgcgcccctgacccccaccgccagccaaaccctttaaccattcccctaaccatttccaagacacacaatttccttggttttgggcaacaaaaaggtgttcgctaattgccaactttaagcagttgagcatcggttgatggcaaagtttacattagattagggccaccgcatccaagttggaacttggaatgtggaatgcgaaacatccgcactcgcatccaccaggtggtgggaagttaaagttaaagttattgttgcggttatactttggtcccttagcaggcgtttggtctcaactcttgtgttcatattatgttctacaaataaacaaagtattattaaaggccaagtaataaaaggattaaattattcatccaaatttgatacgtgcattgtttaaacttttggagttaatcaattccgtttcaattaggcgttttaaatatctgcattcaaattgtgtttgtttcataaaaaaaaaaacgtataaacttataataacttataaatgataattttgagacattatttagtatacaatcttaattgttgcgaattcgatttgtgttaggatagaacttatatataatataataatataatccttattatccgtttgtatgcttgcagcacggagcatcagcatggcgtgcatttgaatggagccaggtcgtccaattaccggagcatcgaatggacccagccgcgtatcgatcagctgtacaccatgtacatgcaggagccgctgagcatgcagtgcaacaggtccgatggcactcgcttcgaggggcggtctagctgggagggcgtggctgcgacgcccgtacaaattcgcatacccattcaccgcaaactgtgccccaactacaatccgctgtggctgaagccattggagaagggcgattgcgatttgctgggggagtgcatctattaggggcgccgtacattaggcattaggcgaataggcgaatgggggcgtggcatagcacacactcacacccacacccacacacacacacacacatacagcacatacaacacacgcgcacggcatggataatatgagaatttcgatttcaacagtcgcctatgcaaaagctaaactcattcacgtctattttgaaagcttaactcatgaatacttttgaatatttagcaaaaaaagcttgaaaacagatctaaaaacatttaaaaaaaggttattttactcctattttggttagttagttcttactaacagtaactaactgatagcctaaatgtttctgttgactttactttgaaattcgcaacagaaatcagaggaatcactttttttttgttttgttttttacgccttatggaagtttgactgtagtcgctttgtattttaccctttatctgcatggtcattagcattatcaacgcgtttgtatgtgtgcgtgtgtgtgtgtgtgtgtgtgtgtaagggcaacagggcaaaacaaatgttttcactctttaaataactaatgcatttaccaatcctgcccatgttgttcaccctttttactttcactttcactttgctttcgcctttgactttgtttgtgccctttgcccttgttgttttggccagcctttgaaatttgccgactgacagcgccgccaggctagaacggtttaatacgacacagcttacaaagcatggcccacacgcacacacacacacacacacacacaagcgcgcgcgcacagaaacacacacacacaagcgcactgaacttggctgagacgaaactgtagcatacttctcagcgccagctgaaaaattaaatggccaactgactgaatgaaacggaacgtacttaaacggacaaactggccggaaacaagatggccaagaaatggatggcggactcactctgtttatacaatataaatgagcaaacttttgatgcaacccgacgttgccaagtctaattaccaagaaactcggcgagaaagacggacaaaaatcgaaagagaaaaaaatatatattaaattggtatgagatcttattggaaatgtgaaaagttggcgcagaggggatcatgggacatggtagatgggctaccaacagccaggagcttaccacatgcacccatgtgtttctttcacaaaaaggggaatcctctagtcgccccattcgattccctattaatccaaccctatcagtaccttcacgcttttcttacttttcactaccgttgaacctatcgacataaatgcaccaacacatacacatccacacaaccacaccgacatacatttgagtaaacatgtaatggatacgtttaagtgtagccaacatacatatgtaagatgtgataattgttctatggctataaatgaaatatatatacacatgaatatataaactatgtagatgaaatatttataaaaaacaaaaaccaagcgaaagcgaaaccaaaaaaaaagtaaaatgtataattatctaataaaaactgaccaccataccagaaacatgcatttttcattgaatattttgtgtgactgctatggaatgcattccacaagtacttgatacaatgccaaatatttatcaattaattacattgacgtatcaagcaattcgcatgaattgcatggtcaagtcg

SEQ ID NO: 1496 - DNA, 2782 bp, DROSOPHILA
cagcagccatagcgaattaatttcaaagtgtttggctattagtgattagcgataaacgatatccgagaacaataattccgccaccgatctgccggccgtgcaatctcaaatctcaaaatgcttaaaattccgctgcagctgagcagtcaggatggcatttggccagcccgattcgccaggcgactccatcaccaccaccaactggcttatcatcatcacaagcagcagcaggcgaaacagaaacaaaagcaaaatggagtgcagcaaggacgttcgccgacatttatgccagtgatgctgctcctcctaatggccacactgctcacgcgcccgctgagcgccttctccaaccgcttatccgacacaaagctgcacgagatctacctggacgacaaggagattaagctgagctggatggtcgactggtacaagcaggaggtgctcttccacttgcagaatgctttcaacgaacagcaccgctggttctatctgggtttctccaagcgcggcggcctggcggatgcggatatttgcttttttgagaatcagaatggattcttcaatgcggtaaccgatacgtacaccagtccggatggacagtgggtgagacgggactaccagcaggactgtgaggtcttcaagatggatgagttcacgttggcgtttaggcgcaagtttgacacctgcgaccctttggatttgcgactccatgagggcacaatgtacgtggtttgggcccgtggtgaaacggaactggccctggaggatcaccagttcgctctgcccaatgtgacggcaccgcacgaggcgggtgttaagatgctacagctactacgggccgacaagatacttatacccgaaaccgagttggatcacatggagatcacactgcaggaggcgccaattcccagtcaggagaccacgtactggtgtcacgttcagcgactggagggcaatctccggcgtcgccatcatatcgttcagttcgagccgctcatccgaacgccgggcatcgtgcatcacatggaagtgtttcactgcgaggccggtgagcacgaggagattcccctgtacaacggcgactgtgaacagttgccgccacgggccaagatctgctcaaaagtgatggtcctgtgggccatgggcgcgggcacctttacctatcctccggaagccggtctaccaatcggcggacccggcttcaatccgtacgttcgactggaggtacatttcaataatccggagaagcagtcgggcttggtggacaactccggctttcgcatcaagatgtcgaagacactgcgtcagtatgacgccgccgttatggaactgggtctggagtacaccgacaaaatggccattccgcctggccaaaccgctttcccgctgagcggctattgtgtggcggactgcacacgagccgctctgccggcgacgggcatcatcatctttggctctcagctgcatacgcatctgcgtggcgttcgcgtcctaacccggcactttcgcggcgaacaggagctgcgcgaggtgaaccgcgatgactactactcgaatcacttccaggagatgcgcaccctgcactacaagccgcgtgtcctgcccggcgacgctttggtaaccacttgttactacaataccaaggatgacaagaccgccgccctcggcggattctccatcagcgatgagatgtgcgtcaactatatccactactatccggccaccaaactggaggtctgcaagagttccgtttccgaggagacgctcgagaattactttatttacatgaagcgcacggagcatcagcatggcgtgcatttgaatggagccaggtcgtccaattaccggagcatcgaatggacccagccgcgtatcgatcagctgtacaccatgtacatgcaggagccgctgagcatgcagtgcaacaggtccgatggcactcgcttcgaggggcggtctagctgggagggcgtggctgcgacgcccgtacaaattcgcatacccattcaccgcaaactgtgccccaactacaatccgctgtggctgaagccattggagaagggcgattgcgatttgctgggggagtgcatctattaggggcgccgtacattaggcattaggcgaataggcgaatgggggcgtggcatagcacacactcacacccacacccacacacacacacacacatacagcacatacaacacacgcgcacggcatggataatatgagaatttcgatttcaacagtcgcctatgcaaaagctaaactcattcacgtctattttgaaagcttaactcatgaatacttttgaatatttagcaaaaaaagcttgaaaacagatctaaaaacatttaaaaaaaggttattttactcctattttggttagttagttcttactaacagtaactaactgatagcctaaatgtttctgttgactttactttgaaattcgcaacagaaatcagaggaatcactttttttttgttttgttttttacgccttatggaagtttgactgtagtcgctttgtattttaccctttatctgcatggtcattagcattatcaacgcgtttgtatgtgtgcgtgtgtgtgtgtgtgtgtgtgtgtaagggcaacagggcaaaacaaatgttttcactctttaaataactaatgcatttaccaatcctgcccatgttgttcaccctttttactttcactttcactttgctttcgcctttgactttgtttgtgccctttgcccttgttgttttggccagcctttgaaatttgccgactgac

SEQ ID NO: 1497 - protein, 659 aa, DROSOPHILA
MLKIPLQLSSQDGIWPARFARRLHHHHQLAYHHHKQQQAKQKQKQNGVQQGRSPTFMPVMLLLLMATLLTRPLSAFSNRLSDTKLHEIYLDDKEIKLSWMVDWYKQEVLFHLQNAFNEQHRWFYLGFSKRGGLADADICFFENQNGFFNAVTDTYTSPDGQWVRRDYQQDCEVFKMDEFTLAFRRKFDTCDPLDLRLHEGTMYVVWARGETELALEDHQFALPNVTAPHEAGVKMLQLLRADKILIPETELDHMEITLQEAPIPSQETTYWCHVQRLEGNLRRRHHIVQFEPLIRTPGIVHHMEVFHCEAGEHEEIPLYNGDCEQLPPRAKICSKVMVLWAMGAGTFTYPPEAGLPIGGPGFNPYVRLEVHFNNPEKQSGLVDNSGFRIKMSKTLRQYDAAVMELGLEYTDKMAIPPGQTAFPLSGYCVADCTRAALPATGIIIFGSQLHTHLRGVRVLTRHFRGEQELREVNRDDYYSNHFQEMRTLHYKPRVLPGDALVTTCYYNTKDDKTAALGGFSISDEMCVNYIHYYPATKLEVCKSSVSEETLENYFIYMKRTEHQHGVHLNGARSSNYRSIEWTQPRIDQLYTMYMQEPLSMQCNRSDGTRFEGRSSWEGVAATPVQIRIPIHRKLCPNYNPLWLKPLEKGDCDLLGECIY

SEQ ID NO: 1498 - DNA, 2947 bp, DROSOPHILA
gtcaaagggtttgggcggaatggtgaaatgctgaatggtgagagtgcgaacccttttggcctccggcgcaggtgcgcgagttaacagctccattgactacagccacataatttatcttatttttagccagcacctgacaaccctctgcccatccattcctttgagaactcacagaaactcgctaggtaggtaggtaggtacacaaattttcaggaaacgctttggcataactttgactggcttataaatgtcgaacgatttatttgcggctgtttggcgggggcgagaagttttggttcaggtacaggcatcgccattgccatggactaaccaagtttggttaacttctaccaccccccctccccacccctctctatctctctccgctcccctttttccccttttaagccacgtttttagccatcaagttaagcggatatatcgcttttaaccgggctgaaagctggtggaaaaaatgacgtcggtaacaaagtgtttcaaatttgtttactacaaaaagtggattgctttttggccatctaacaggtatgtggccaggtaattgggcgtggctcgccttctccgaatagggggcgtggcaagtttggccagcacggatgggtccattgatagcttttgtggcttttcaacttctccatcaaatggagtgcgaacaacactgttgactctttggccttacgccaacattaagtgagataaactttgactccgaatatgtaaccagcataaaatgaatccgattcgatatagaattggcatagacaatggttagtcgatttatctaagagtctccacacaagtcaatccttcgcatctccagaagttacaaatcattctagaattcatactgaaataaacaacttcgttcgttctcataaattaggtcttttgatttaataatactttctttctaaatcgcactacatgtccatataaaatctagtattaatcagacttaggctatcaaaaaaaagatacttaaatagatacactaacatagttaatcgaagtaattcataagcgtacactggacgctggtacagtcgggcagtgaagtgaacagcacgcaggataacttataatcgtagatgaactcgcaagtggggaagctgcaacaattcgcgttagaaatgaatcataaacaattggataacgagttcgccgaactcacctgacggtgaagaaccaggtgcacttgaagttgcacaatatgccatagggcttcttcagctgctcctttttgttgaccacagtgttctgcagattgtagccatcgtaacggcgccagcaatggttaatgttaccttaaacattaaaaattagaattaaaaatactttttaaggacttgattaaaccaaagcatcgaattatcgtttagatactattttagtaaaagtttatagcgaataaaaagttcttgaatgtttacaatcgaatttatgggtatgcacttgcatcatttcataattcctggtaactttggacatccggtgggttttcccctcagtgtacttacggcgaatgtggtgactgccgccatggtgatgaaagtcccgtccctccagctgacccccgtgcccgttggtggcctccacgcctctgacgcccctgccaccgaaaagcaggaggtaccagaggaccagggagctgacgatgaagatgtaagtcactaatttggccatttccggcgtgcattcacaaacacacaaacgcacaaacgcacacacaccgcctttctagctttccttcttgatcactttcttgaattctctctcccgcactctctctttttaacagtgtctgcgtttgtgttggtgatctgcgtatgtatgggtgccaggtgccaggtgacaatgtgcaagtgtataggtagatggatgggtatgctatggctgtcgctttcgttgccgctgcgaatgtcgcccctgcactgaatacattttctaaaaatgcgaaatctgaattcgctggctttgctggtctcgcagttcggcggtctaacaaagcactgccgatttgctcgatggtccgatttgctccaggtcgctccacatctgtatatgtatgtatatgtatctgtatgcccatataccaaaatgcccagatgccatttatttttggatcttttcggacatcggccgcacaaactattcaatttgagcgcgtgtttcctccctcactcgctgcctttgcctgtcactcatttcgctaatttaaataatcaaatgcgaattagctgaagctgaaactgatggtgaagctcatgctgtgtgcaagtccagtccaaaaatgggggaaaaaaaaaaatcaaaaataggggggctacgaacccgcactttgtggtcaattggtcatccaacgcctgcagttgcgactttgctgaccagcgagcagaccgaaaacaggtgggtaattcttggttttccaaaaggccttggtcaatcgatatctatcaaagatacagttccactgagtcaagtacaaaatcaaggatatatttaataatgtttcctttgttggaaattcgaaaaataatagattgttgcttgcaattgtacagtcattttacattcaattttaaatattatgcaataccatatgcattggcgtacatattgttttatttgttgcttaagacatcgtttacggctttcggaaaatcccagagttcaataaatatttacggcattcaaatgacaaaggaaatcgttcttccgtttcaattactcagatggtttttcagcagcattcacctttcttggggcagaatttccctcgctagttccgcccccttttcgcccattttccaccctttgtacaatggaaagctagtcaaaccccgttataaattaaaattttatttagctgcagttgacaatttatttgcatttcatttaccacaaaggcgaacaggaaaggcatagt

SEQ ID NO: 1499 - DNA, 672 bp, DROSOPHILA
gggcgacattcgcagcggcaacgaaagcgacagccatagcatacccatccatctacctatacacttgcacattgtcacctggcacctggcacccatacatacgcagatcaccaacacaaacgcagacactgttaaaaagagagagtgcgggagagagaattcaagaaagtgatcaagaaggaaagctagaaaggcggtgtgtgtgcgtttgtgcgtttgtgtgtttgtgaatgcacgccggaaatggccaaattagtgacttacatcttcatcgtcagctccctggtcctctggtacctcctgcttttcggtggcaggggcgtcagaggcgtggaggccaccaacgggcacgggggtcagctggagggacgggactttcatcaccatggcggcagtcaccacattcgccgtaacattaaccattgctggcgccgttacgatggctacaatctgcagaacactgtggtcaacaaaaaggagcagctgaagaagccctatggcatattgtgcaacttcaagtgcacctggttcttcaccgtcagcttccccacttgcgagttcatctacgattataagttatcctgcgtgctgttcacttcactgcccgactgtaccagcgtccagtgtacgcttatgaattacttcgattaactatgttagtgtatctattta

SEQ ID NO: 1500 - protein, 135 aa, DROSOPHILA
MAKLVTYIFIVSSLVLWYLLLFGGRGVRGVEATNGHGGQLEGRDFHHHGGSHHIRRNINHCWRRYDGYNLQNTVVNKKEQLKKPYGILCNFKCTWFFTVSFPTCEFIYDYKLSCVLFTSLPDCTSVQCTLMNYFD

SEQ ID NO: 1501 - DNA, 2924 bp, DROSOPHILA
ttatccgggcacttacacatcacattataatcttatatctcttactctcttaatccaatagtatgatattaatttttgctcgatttttatagaaaggcgattccctgaaaagatgccaaaccgtgctcatggaaagcgatgaaatggagcagaaaacctgcgttgggtatcgaagcaaagtctccatggagtccgccgttctgttctcggtactgttgtccaccaaccatgagctttctattggaaagatgctcgatatgagtgagattcacgaaagaatgcggcgcgccaaacagtcattcgaggatactgctagagttactccgttccgaacgaacattgatgacctaatctccgatttggatgtctgtgctaaggtcaaatccaaactttgtcgagtaataagtgattgtaaaaagtactagaaaggattagctatatcttttatctatatttaatacttttatttcattttaatcaatagtataaaattatttctctggattttaggtgactataagaagactatttttgtaatatttttgaaccatttaagctcaaaatacaacttactattcatattttaatatataattccatgttatcatgaatttattagaatttatatatacaagtaaagattcgaaattcagcttcgacccgctccttacgattgttatctatattatcaattaatacattaaggttgctcatcataattgttaattgtttgctcataaaagcgtttaaaaatgaaagatgggaaatacttttttagctttcccttattgtctctaaagtaagatcgtagtcatgatacaagctcttcctaaatgtgtagaaataatgatacatttgtattatatatacataaacgcgaaatattaaaaagaaacattccgaaaattaaagaattgcattagtttacaacaaaaactatcgaatctctctaatcaaaacgacgcgccaagccaaatttagtacattatctgtgctgaatcattttcgctgtgccgcaatatttaattaactgcagcgatcattgcagttttagccaccagagaagcgtaacatagaaatcaaaatgcagaaggttgcactgcttctagtcgccttcctggctgcggccgtggcccacccaaattcgcaggagaagcccggattgctgcgcgtaccgctccacaaatttcagtcggcccgccggcactttgcggatgtgggcacggagctgcagcaattgcgcattaggtacggcggaggtgatgtgccggaaccgctgtccaactatatggacgcgcagtactatgggcccattgccattggctcgccaccgcagaacttccgtgtggttttcgacaccggctcctcgaacttgtgggtgccgtccaagaagtgccacctgaccaacatcgcctgtttgatgcacaacaagtacgatgcctccaagtcgaagacctacaccaagaacggcactgagttcgccatccagtatggctcgggcagcttgtccggatacctgtccacggatacggtgtccattgccggcctggacatcaaggatcagacattcgctgaggcgctcagtgagccgggcctggtcttcgtagctgccaagttcgacggcatcctaggcctgggctacaactccatctcggtggacaaggtgaagccgccattttacgccatgtacgaacagggtttgatctccgctccggtgttctcattctacctgaatcgcgatcccgcctcgcccgagggcggtgagatcatctttggcggctccgatcccaaccactacactggtgaattcacctacttgcccgttacccgcaaggcctactggcaaatcaagatggatgccgcctccattggcgatttgcagctgtgcaagggcggttgccaggtgatcgctgacaccggtacctcactaattgctgcgcccttggaagaggccacctctattaaccagaagattggtggaactcccatcatcggtggtcaggtgagtaccatgctctaagttctcacatgaagcactgctaatcctcttaatttcttactttagtatgtggtttcttgcgatctcattccccaattgccggtaatcaagtttgtgctgggcggaaagaccttcgagctcgagggcaaggactatattctccgtgtggcccagatgggtaagaccatctgtctgtccggctttatgggcttggacatcccccctccaaacggacccttgtggatcctcggtgacgttttcattggcaaatactacaccgagtttgacatgggcaacgatcgtgtgggcttcgccgatgccaaataatcgaacaaagaaaagtatacttaaaatttaaattgtaaacattatcgatcgatcccattgcgggtttctccgaagaataatatataaattatcattttagtagattttccatatatttattagcgtaagtttattaattacaatagggcttgcgcggtctgcacttaatgagacgaatagtaagtacgtggcgatgaccgacgcttctaatcttccaaaatcgactaacttaagtatagcaagagttcttatctctaaagcttaacaagttacagtttcttataggtaaagctcgatctatagatgggaaaagcacttgaggcttacgactatatttcgggtgttttgtgattgtgttaactcctccccttctaagacgaaggctgtccacagactttttacaattggcaaatctatttgaaagcggatcttacgggtaacattggttgtgcactaagttcccatactgccaacctggtactgcgttaaaccatcgaagggaaggcagctctgcgtgtctggatgatccgagaagttcgtaaatgctgctgattctccatgtcatgggttcgcaacaaggttctggagatgatcgtag

SEQ ID NO: 1502 - DNA, 1378 bp, DROSOPHILA
cattttcgctgtgccgcaatatttaattaactgcagcgatcattgcagttttagccaccagagaagcgtaacatagaaatcaaaatgcagaaggttgcactgcttctagtcgccttcctggctgcggccgtggcccacccaaattcgcaggagaagcccggattgctgcgcgtaccgctccacaaatttcagtcggcccgccggcactttgcggatgtgggcacggagctgcagcaattgcgcattaggtacggcggaggtgatgtgccggaaccgctgtccaactatatggacgcgcagtactatgggcccattgccattggctcgccaccgcagaacttccgtgtggttttcgacaccggctcctcgaacttgtgggtgccgtccaagaagtgccacctgaccaacatcgcctgtttgatgcacaacaagtacgatgcctccaagtcgaagacctacaccaagaacggcactgagttcgccatccagtatggctcgggcagcttgtccggatacctgtccacggatacggtgtccattgccggcctggacatcaaggatcagacattcgctgaggcgctcagtgagccgggcctggtcttcgtagctgccaagttcgacggcatcctaggcctgggctacaactccatctcggtggacaaggtgaagccgccattttacgccatgtacgaacagggtttgatctccgctccggtgttctcattctacctgaatcgcgatcccgcctcgcccgagggcggtgagatcatctttggcggctccgatcccaaccactacactggtgaattcacctacttgcccgttacccgcaaggcctactggcaaatcaagatggatgccgcctccattggcgatttgcagctgtgcaagggcggttgccaggtgatcgctgacaccggtacctcactaattgctgcgcccttggaagaggccacctctattaaccagaagattggtggaactcccatcatcggtggtcagtatgtggtttcttgcgatctcattccccaattgccggtaatcaagtttgtgctgggcggaaagaccttcgagctcgagggcaaggactatattctccgtgtggcccagatgggtaagaccatctgtctgtccggctttatgggcttggacatcccccctccaaacggacccttgtggatcctcggtgacgttttcattggcaaatactacaccgagtttgacatgggcaacgatcgtgtgggcttcgccgatgccaaataatcgaacaaagaaaagtatacttaaaatttaaattgtaaacattatcgatcgatcccattgcgggtttctccgaagaataatatataaattatcattttagtagattttccatata

SEQ ID NO: 1503 - protein, 392 aa, DROSOPHILA
MQKVALLLVAFLAAAVAHPNSQEKPGLLRVPLHKFQSARRHFADVGTELQQLRIRYGGGDVPEPLSNYMDAQYYGPIAIGSPPQNFRVVFDTGSSNLWVPSKKCHLTNIACLMHNKYDASKSKTYTKNGTEFAIQYGSGSLSGYLSTDTVSIAGLDIKDQTFAEALSEPGLVFVAAKFDGILGLGYNSISVDKVKPPFYAMYEQGLISAPVFSFYLNRDPASPEGGEIIFGGSDPNHYTGEFTYLPVTRKAYWQIKMDAASIGDLQLCKGGCQVIADTGTSLIAAPLEEATSINQKIGGTPIIGGQYVVSCDLIPQLPVIKFVLGGKTFELEGKDYILRVAQMGKTICLSGFMGLDIPPPNGPLWILGDVFIGKYYTEFDMGNDRVGFADAK

SEQ ID NO: 1504 - DNA, 3085 bp, DROSOPHILA
cactcgcgacatccatcgctggcggcagttaaaactgcgaaggagacagccacgtatcgcattcgaggcatccgaggcgtccaatagccactagatacatggcaggctcaggttccgaatcaaatttatctacaaattctggcccagaattcgattctgattttggcggcggcggttgtgtttacgattgttgtgcaatggccaaatcgataacagaaacgagaaccacaaattctacggcggcaaccataactgcaatacacactcgcaaaagcaccacaacaatcgcatttgttctgctgttaatcctctgctgtttatgtgattacaaccatggaagtatgtagtcccaaccaccacctccatattccttttttttttgttgttttgatcacgttctttttttcgagtgggtgtttgtggtgaaaattcgctggtagttcatattgcttatacgccatgtggccaaacaataatacataataaataaactgacttatctactttattaagctccaaactaatacaacagagaaaataaacaacacaaacacaaaccataaattgtgctatgattcgtttatgttttttatcaaagtgaaaaccaatttaaacaagagtttaacttcaaaagacacaatgcaaatgcgtagtacttcgagtaaattaatatcgcagtgtaattaacttacattttattgtaagatataaattcgtatttgatgaatttgaagactcctttctaaactacaaccgatgtatttaatagaatttttatcaacgaagagagtgctcttgtgattcaatatttcctatagtcaatcaaaaataatccagctgagcttcagttttctgaatacgatatcaaagtacttgcaccccactgcttcgaaaacaagcattttatttcgaatcgaatttgtcgagtatcccaaaagaaccagaaaagtgaagttgagcaaatgagttggggaatgttttaggcttaattggcagtcgatgtccttacgcaacaaggacccaaggcgcaaccagattagtcactaccatactcacatatatatacatttatagcccaatacaattgatactggtaaaggataagttctgattcaagtgttacccattttcaggctgggcatcgcaatgctggaaaaagcacaattccggctcgatccaaacgccagatggagaatttaagcgaccctttggcatactctgcacatatcgctgctttctctggtttccgccaatgtaagttatacaatcattcaacccacccagtaaccagccataaaaacaccaccaaacaccatcacacatttgccattgaaatgcccagccagcacttgcaatttgcaatttatgcatgcctctgttattttgtagtgtgaattgcattttaaaataaacttgtttggcttttgcttggggtttgcttttcggacttgagcttggggccttcatgcacgtacaatatacatacatacatatgtacatatatatagtatatatatgtgtggcatttgaattgcataacaattaaaattgctggcagcattgtttcgattcgttttggctccttttcatgctgacctgccttcgccatcgccatcgccatcgccatcgcaatcggaataaatattttatcgtcgatttcttgcaaaccacaccgtgcaatgcatcaccttaccattttcatcctggcttcattggcatccaagcatcctggcttccttgcattctggcaccccattgcattcaaaatggctcgtttgccggcattcattgtttgtttgccttctgttcgactttcagttatccgtactgtgaattcatattcgatctgcgcttatcgaggcacttcacatcctttccggactgctacgagattcgctgcaacgagaccttctcctttttcggcaaggagccccattactgacctccaccacctggagggtcagttgctcagcgtgtgagcaactgacattccacatccccttcctttttttttttttttgagtactatctgtgactaagaattgtatgcttcaataaatatgggttactgcataaaacaatgcatttgtttgtcttgttcgaaagtgtgaatataaagagcacttaacgttttggtttggaaagagttgtagtcgctttggttatattgtagattggttggtttgtatataaattatttgaatttcaggtgaacagtgccctgtaatcaggcaatcattgggactgattgctttaaaatcgcacatctcctggatgctggtgatgaatggtcctcgctttctactcaaaggactcgagatcctgtaagaggtgttcatcgccttggcgccaagctgcaggcaatttccatcactttcgttttcggctggcttttagcttatttccggtttcgtaataaaggacaaacaaacaaataaacaaagggcatgggacaaaggaccagctacagatactggatgctaaacactgaataccgaatacggaatactggagttacacccgccccccacacacacacacacaacctcattcaattcacaaatatttgcatacaaattagcattctaattgactcgggcccaaaaataaagtaaccaactgggccttgggggcgtggcctgacgggggcggaccatgtgattgccaaaagtgtccgtgtaggggggaaacggaaaaggaggcgtgggagcagcgatatctgttgtccattgtcttggttttcatcgtccatggtcccatgattccatggttacctttacacgccttgtgaacattctatacttaccgaaattaatctattttatgccgaaatctttaaaaagttttaaattaaatggttctttttattattttagattttatttcatgttttattggttacaatcattaaatatttaataattcttttgttatttttttatttatatttttaaattattttaataaattattcccggtgtatattgagtccccctccctcttttgcttagccgctcgagttaattgtttgcttagtgtcataaaaatacagtttacgccttccacaacaacacgtacaggtggc

SEQ ID NO: 1505 - DNA, 703 bp, DROSOPHILA
gcagttaaaactgcgaaggagacagccacgtatcgcattcgaggcatccgaggcgtccaatagccactagatacatggcaggctcaggttccgaatcaaatttatctacaaattctggcccagaattcgattctgattttggcggcggcggttgtgtttacgattgttgtgcaatggccaaatcgataacagaaacgagaaccacaaattctacggcggcaaccataactgcaatacacactcgcaaaagcaccacaacaatcgcatttgttctgctgttaatcctctgctgtttatgtgattacaaccatggaagctgggcatcgcaatgctggaaaaagcacaattccggctcgatccaaacgccagatggagaatttaagcgaccctttggcatactctgcacatatcgctgctttctctggtttccgccaatttatccgtactgtgaattcatattcgatctgcgcttatcgaggcacttcacatcctttccggactgctacgagattcgctgcaacgagaccttctcctttttcggcaaggagccccattactgacctccaccacctggagggtcagttgctcagcgtgtgagcaactgacattccacatccccttcctttttttttttttttgagtactatctgtgactaagaattgtatgcttcaataaatatgggttactgcataaaacaatgca

SEQ ID NO: 1506 - protein, 161 aa, DROSOPHILA
MAGSGSESNLSTNSGPEFDSDFGGGGCVYDCCAMAKSITETRTTNSTAATITAIHTRKSTTTIAFVLLLILCCLCDYNHGSWASQCWKKHNSGSIQTPDGEFKRPFGILCTYRCFLWFPPIYPYCEFIFDLRLSRHFTSFPDCYEIRCNETFSFFGKEPHY

SEQ ID NO: 1507 - DNA, 3024 bp, DROSOPHILA
gaccaaagacacaagaactcaacaatcattatgtatggcgccatttgactcgactacctacgagaccactcgagtatttttggaaacacccgagtatttttggaaacacccatgtgtttaacggtatacccacaagtgtttttctcactcatccctttttaggcactgtgtgagcggcacccgcgacgcaaaacaccgtattgattcgggtgcgcacacaacggggtgtcttgtctgcatgttcagatttatactgtgtgtttgtaagtacccgcgatgtgcgtggcgagtagcacccgcacacaaaattgtagggtgtgagtcgagtggtaaaaaagtgccacccttgcagttctctggttgaaactgcaacttttttaccttttccagttgtttttagcctctcttgactgccaattagcgcctggctttctgtatttcaacgggaattgtgcgcggcttgtgtttttcgctcagtctgctccgcaacttcgaccgataaaagcggccggaaaaacttccgcttcattttgttagtttcgttgcgggagattgggaaaagtgctaacgggtgcttcactatcattatcagacattagataaaatcatggtaagaggcttttaaaaataattagtggcacatagatactttctgtgcaatgccgtacgaaaaatatatgaaaaacgtgaccatgtggcagttcagtcaccgcgacctcgagcccacgttgttcgttttaatccttgctgaaaccacaacaaactaaatcgatactagtcggtggatctacgcactttaccggtttgctcgtactatgtaatttatgcgccaaaaataggagaactgaacgtaaatgatagcaaatgaggcaaaaccagttggccaccaacgaatcgaaagtgttgggtgcaagaaaccagttcttgataccattcctgttatcgcggctccaccttcttacctgttgactgagttttaccttcagttttgcctccatcggcgtcacttgctgacgtgtgaagtccactgcgaaaatggtgcaacttacggtagtcgcaatcactaaaactcagtccatagaaagcatccctaatcagcaaatcactcataaatctagtacatatgtacaattatctcccatcttgatactattttaaagatactatatacttaaactctatactttgaattctacaggaggagacatatctgtacgatcctaatctgctgctaaagctggactttcatcgcagtcccgccaactttaagcccttcatatcggcggccaatcccggcgagccctggatgaaagtgcgtcctctcaaggacaccgactacgatcgtggattcctgcagctgctctcgcaactcacccatgtcggcaatgtgaatcgtacgcagttcttgagtgagtcgtgactttcagttaggaatgtagtatttgtactgaccacctccatcttttctagcccgcttttcgcagatgaaagccagtggggactactttgtcaccgtcattgaggacactcgcaagaatgagattattggagctgcatccttggtgatcgagcgcaagttcatccataactgtgctgtggtaagtgaagaagatgagaaaaggatccatgatttagcttaacttatgattcattcttcagcgtggccgtctagaggatgtggtggtcaatgacacgtatcgcgggaagcaactgggaaaactgtaagcgttgtatatcattttcccaacaagaaacattaatccgcggacttactattcaggatcgtggtcaccgtatcgctgctggccgaggaactgggctgctacaaaatgtcgctggactgcaaggacaagctgatcaagttctatgagtcgctgggctatgtggccattcccggaaactccaactccatgacgattcgctacgatgaggggccaacgctcaagcggaatgctacctcagccggctccagtggaacagtgggcgactcctgccaaactgtgagcctcgattttgcctcttgacaattagccgccaacgctgctccaaagtccaagctttgagtgggagcaccccatctcaaagttacaaatgcgcgaagcgcaatgcaacaaaactaaaattggattctaagaaaacattaaatgcatataggcattgccaaaattccattgcgctgagggcatgatggatttttggacagcgctggctggcggtggtgtccttgtggacggacgtgcttgtccacccacccgcgaggacatacaattagatatttagttaaagacaaccgcaacatatgttgctctctgtttttaatccctacagaactctcaattttataattttttctcccctttctgctactgaatgtgcggctcgacctctcaactccaaggtggttgtaatattaccttttaagagcaccttcatcaagtagccctaagattgaaacactcgcataactgttaaactgttattaacactaatcaacaatagcgattaaaacccaatacgaatctttcaaaaacctttaatgattgaagaaattcaataaagtggacacttttttcaaaagcccagaatgtttataaacttacttgcatcaacagacaacagttttattttccaatatttcaaaaaaagttaagtaacaaacatttgtgctatttaaagttgcagaagatcgattaaacctgtctgttaatttacttcacaaacgttgagcttattttacaagtttacatcttcgagctacatttatataaaaatctgtttagtgtctagtgcaaggtacttattgggcttaagtcttctctatttacaaggctctcaaatggggggcaaaagctgggcaaacccagcctcctccgcgtctcatgagtacgcgcaaaggtgtccgcacttggggcacttggagtgtttggcaaagtacttctgcaggtgctctatgtgaccgccgtgggagcatccttggcaccaggcgtagactccccggacgatcagaccgcagacgcagcactt

SEQ ID NO: 1508 - DNA, 695 bp, DROSOPHILA
gcgtcacttgctgacgtgtgaagtccactgcgaaaatggtgcaacttacggaggagacatatctgtacgatcctaatctgctgctaaagctggactttcatcgcagtcccgccaactttaagcccttcatatcggcggccaatcccggcgagccctggatgaaagtgcgtcctctcaaggacaccgactacgatcgtggattcctgcagctgctctcgcaactcacccatgtcggcaatgtgaatcgtacgcagttcttgacccgcttttcgcagatgaaagccagtggggactactttgtcaccgtcattgaggacactcgcaagaatgagattattggagctgcatccttggtgatcgagcgcaagttcatccataactgtgctgtgcgtggccgtctagaggatgtggtggtcaatgacacgtatcgcgggaagcaactgggaaaactgatcgtggtcaccgtatcgctgctggccgaggaactgggctgctacaaaatgtcgctggactgcaaggacaagctgatcaagttctatgagtcgctgggctatgtggccattcccggaaactccaactccatgacgattcgctacgatgaggggccaacgctcaagcggaatgctacctcagccggctccagtggaacagtgggcgactcctgccaaactgtgagcctcgattttgcctcttga

SEQ ID NO: 1509 - protein, 219 aa, DROSOPHILA
MVQLTEETYLYDPNLLLKLDFHRSPANFKPFISAANPGEPWMKVRPLKDTDYDRGFLQLLSQLTHVGNVNRTQFLTRFSQMKASGDYFVTVIEDTRKNEIIGAASLVIERKFIHNCAVRGRLEDVVVNDTYRGKQLGKLIVVTVSLLAEELGCYKMSLDCKDKLIKFYESLGYVAIPGNSNSMTIRYDEGPTLKRNATSAGSSGTVGDSCQTVSLDFAS

SEQ ID NO: 1510 - DNA, 10558 bp, DROSOPHILA
tcagcagagacgcgccccaggagcgagtctttgctagaataggaggttgcccttgcacaataggcgcagtgtgaccataacagtagtggatacgtagaatcaattaaatagccctttcccacgaaactgcgtctttctaattttgtttatttatttatactacaaattaataaaataaaatctttggcgaacggtccataaaaacgggtcattctgaaaatttttcaaccagcaaatgcaatagataaattagataattagataattagataaattagataagttttcaatgaatttggcaagtgtagggccaaataagtatgtataatcgtttgtgttttacatgcacataatctattcttttatttaactacatacatatgtattgtgaaatatatttttatcatcaatatagttgatgaaattatgtatataaaatataaccagacttcagttgtaataatattcatcgtgccctaagtttccctgtctttttaaaatatatttgatggggtggaaaatattaaattcatatgtaaaaattatatatatggtaacattttaataaaccttagctaagcttcaagtatgcctatcccgaaattgaaataaaagtgtaattttatattatatataatatataatataatatataattaattattatttattgttttcattaatttttacggaactatatatacaaaaggaaacgactagagccctctggcatcttttcataattctatacgcaataaacaatataaaattttttatttatttcttgtaataatttcttatggaataatgccttagtaaataactagagccggccggcatattttcatcgaaatataagtttgtattctcaaaatatttaatgttctataggaaggtgtatctgctagacttaaattagttaggagggtgcactcgctaagagcccgagaatgcagtgcagccctggtacgtgcaaactcaccacagtcacgcacaccaccacaaacgcagcgttacgcgtcgttcgacgtcggtgtttgtgtctacgtcacgtcggcttaaattatgttttaattacccagcggcaactgcgaatgcaactgaatcgaagcacagaatgctgtaagtaaatataatactgatgctaatttgaagtcagttaaacccagttacgccccccaaaatgttgcagccctcaattgcataacatcacttgcgcatgagtgtgtgcgtgtgtgaggaaacgccagaggagcgaaacacaccacaccgaacagcggcgtagggaaagagacggcagaagcagctgaattgcagtacaagcagggttcatcgctaacaaaaaaacaagccatgtactcctgctgaatttcgaaagcgacttattatcgcctgattaccaacgaacagtattcgcccgatcaaacgccacataaccccctaaactcaccacagcacattggaagtgggtgggagtcgccgctaagctgaaattgcagccctggaaatggacgtttcggtgcagtgctgacctggccacactgaccagcccccgatttagttgctgtttttttacataactcgccacattcgttctcttcggaatacgtgatatatatatatatatgataatacgatatatattatggccgttttcctgatcaacgtctgcaagtacaatggctgcggcatcacgtttccgagcttgagcgatctgatttcccacatcgaggacacccacataggtgagacgggtcgtaaacaccgtaaatatcgctatcatttgaccgtcgcgtgatgttctcggtgtgttttgtttattttatttactcgccgcggcataaataaaaaaacaaatcggatcgcagcggggcagaggtgtgcgagttcgtcagtgtgtgagtgcgtgaacggcttcgtggtgaattggatgttgtttctacgatatgatttgcagtttgcattcggcatttattgcacttaaaggcaaaatcgatgctggaagcctggaaatggctacctgtgcccacacacaccgctgcacgccgcacacacacgccctgttttccaggcgcgtacagcattcgttgatcggtgcgctggctggaaagtgcgggtgcgagcgagagcgcagcacaagcaaaacaaaagcaaaaaagccggtgatccattcaaaaccccgcctgtctgtgtgtgtgcgtgcgtgtgtgtttggaaggccagcacagcatctagttgttgtttgcggtgtagtggaaaccggcgagttgagcgccctttttttgacctgtccgcatggcttggcttgggttcggctgtttctggcgttcgtttccatggcaggtgtatccgcatccggtaatcggagttggaacttagaagttggaggagatgcgcttcttgtctgccccatgcgccttccccctccgctcataccacgcactcacaatcacaatcgatacttgaactttcccgtccacgtgactcccgtgggcttccaattaatcatttccacggtgtgtgtttaccggctgaaataaacaaattctaattttagtgattgtatggcgaggggcggggttttcgagggcgaaaaatcaatagagttaagctcagtagtgttgccgcattacgaaaacgggggtttgggggtggtttaaccgttaacgggctttatttatgccgaacatgccgtgcgtcttacactgagagttatttttatgtatgtacgtttgtatggttgactctttttgcttttagaatgaggtactttttaaaggtcgtgtaatttatttacaaaaacacataaaattaacgagtgagatcaccattcatccaagtcaatgcattttcatgctttaggggcaatgtaaagtggtgattgcagagctcgcctactttgtaagctgtacgtacacacgttatttaattaccctttgcacttcaatttttctctgtgcacaatcaggctctcttacacacgcgtagagagaggggttggaaagagaaagcagaggggttgctcagctgacgattacgttggcagctgttttgttgttgccactgctgcgtgataacggtcaacacacacacacgcacacttgaacatataaaatggctgcccgggcaggctttcccacctagccaccacccccttttgcgtcccggggcattacataaagcccaggcacgagcatacgcccacttggcaactgccacccccaaaatcgcccaggcccagataccaaatacgcccgaggccccgaaaacccgcatcccccgtttgcccatttccccacatccattgcgtatccattacgtgagcgagctgttctagggcttataaatgcccatcatttcattatctcgaaggacattcgatgcgtgggttccctgagtggatggatggttggatggttggatggatggctgggtgcatggatatggatgtgtgcctgttatcaggactcagtgggcgttgtcgcttcgtttcggctcgattcggttgtcatggcaacgcaaaaggcggcgagaccttcaggtttgtccttttcacagttgccaggcacctgttgtacggtcccgaaaatgcccgggataatttatttatgagtgtttctgcactcgcatttagataaccagctgcgaaaggctaactgccgcagtaaaccaaacaaatgtacctgtgcacctgtcaaatcgtttttgcaattttaccagggaatttcatctgaaagataagattctagctaactatgagtcaccaaaacgcatttggtttcatccaagattcattttcaaactaaacagtcgcataataggtacagtttcagagattatatgggatttattccagttaaaatgaggattttataaatcgggggacttaacaagaaaatcgcataaaggttgggttgccagcaaacccttttgaccttgaaatacttttggtttgcaaggttatttctgtgacttttctatttcttatgagatgagtaatttcaaccatccaaccatttatgattcaatgaactttgaaggttattaaatggttttaatgaaaaggtgtccctgcatttgccatgtcaacataattagactccagtcaatgacttgtgttcctcgaatttctttcttcacagctattggaaagtttttgagatagctgccgaaatgaaaacaaaccaaaacagcatgttcaagcaaaagaaaaaacatttgttatcgtttttaaattctgcaacaagtgcatgagtcacacgagtgcaaaagagagaggaatctgcgtttattttgtatctgaaatgcgaaaaacgtatgaaatacgacgcatgtacagatgtgggcttgtatgtggctacgatatgtacgtacgtatgtaggatatttgctcaagagctgtttgtaaaatactcgatttgataccctgcagtttcattcattgctattccagcatctcgagcgcataatcaccgatttcgtgatgttgtggaactacagggtatatgtatgtacatgtacatgcaaacatcgaggcaagagcaaaaagtcacctacagagaagtcgtgaatgtctggggttatcaacggcaaaataataataacaataacgaaggcggagcagaaatataaaaaaaaacccgaaccgggtgaactgatttgaccgttgacaaatgacgccgtgttctcgataggatgaggggcgtggcacatcaatttcatcagctagaatacgtgtatataattgcagttttaagtgacgagtgtccaaggcaattgatacttgctgaaatgttgcccaaagtacgtggaactattacgcacatatggtgtgtctgtatgtccgcatgttcgcatgtccatatgtgtcatccatcgattgccggcacgtagacatcatcgcaatcactcccgcaaatgtttttaatcgcctttcggctgataagcgagcagagtggcggggcgcgggagtcttcagatgaaagcatatgtttcgcataatagctaatttgcggcatatgttatacgtttgcctgcgagtacaaatcgaagtaagtaaactgcaacgttatcgacctttgtcacgtgggcgttgttgggcgtaaatgcagtttgtttgtgatttctattcactaatgctacgaggtctagtgcatttaatgaaagcagatgcgacttagtttggcataatggcagtagatatctgactttggcacacgtataccttgtgatctggggatttaagttgcccatctaataatcgactagctgattttaaactaactgcagtgacacaatcatttgtgagatccgcagctgatcgatgcgtgttattttatcgtttagcagcccctcgttaactgcaactgcaatcgcatgacgaatgtacagggtgcccggtggcgaatatgatgaatggcccggctgacacagttacgcaccaaaacgatttaattgggaaataaagcgtgctcatggaggttatgttgtgcgcacacacatggatcgagaagtaaataaagacggcgaaggggacaaaccgaggaggggcacctgttattatgcactcgctgattaagcaagctttgggcttatgcttgttctggcgataagataaagtacccacgccgcagaccatgtgctcctcctggtactccgtcgcagtaccagatcgaagcctccataaaccccgtggaaaatgcgtcagcaggcgcactaaatccgtcgccattccgtaccccgtacgtgcactctcgctatttacttatttcggcattttaataataaattgcccgggctgtgggccccttgaatgtctgtgaacttgttccagagcaaacacagaggttggcgtcgaattgtggatgcaggtttcgcgtttggctgcccgtattccggttcggctttcgatcccgtctcgaaagggaatacttaattgggtggtaatccagtttcggtgactttctagcagggttcctaattactaccagttttattcaaaacattacaatacacatatggtgtgattttaaattaaattgctttgcaacgaatgcatattaacatgcctatttcattgccttttcttgcagactatgacccaaaggtggtcgaacagaaggagcaggcccagcctgcctgcctgcccttaagttatgtcctgcgcttcatcaccgaggagaaccgcaaggaggcgggctcgttcctggccagcaacacaacagccccaccgaccaccaatagcggatccaatgcagctggccacgggaatggcaatgtggagctcaagcgaaagctggccatcaagcaccacagttacagtatgtcctcgtccaaccgcagcaccacgccaacaggtgagtcatatcgcaaactctgtacataaggatgactcaaactcctgattctgcacccatttaggcagcgaaatggacgaggacgaaatggtggtcacggagtcggaggatagcaacgactcctggaccaccgaggagtttagctcggagtttatcatgcgctacggcagcaggttcgtttatagctctatactttttaataaagcttaagctcttattacttgaatgttacatgttctttgtcacaatttgcttaattaatgtgtgtactttgataaatcctaaataggcattccggtggtggaagcaatggcacgcccggcaatgagaaacccttcgcctgccctgttccgggatgcaaaaagcgttacaagaacgtcaacggcatcaagtaccattcgaagaacggtcacaaaaaggacggaaggtaacaattggccacgaaattaccgattggtaaactggaagctaatagttctatgttccacagagtgcgcaagggctacaagtgtcactgcggcaagagttacaaaacggcccagggcctgaagaaccacgcgctgcacacacacaactcgcagccggatagtgtgctgaatgcccagctggccaatgcgttggccataggcgatggggccagtgcggccacgcctgtgggcagcagcaacacctcctccaatccgaacccgccgcccatcattcagcgcagcaactcgccgtctcagtcgctgggctcgttgagtccgtcgagcatcagcaacatgtcgagcagcgccagcagttgccatggaggcagcggcagtctgtcgaacgggaataatggcaacaatgggagcactactagcaacactgccattctcactagcaacgggaatgtcctgcagcagctcagtgccgggaatgtggtcaccctgaccaatcttcccacgcaacagcatcagcagcaacagccgcagccgcaacagcagcagcagcagcaactccatcaaaacactgcaacaggtaacagcaacaacaacaatttaatgcgcagcacactcggtttagtatccattaaaaccaacaacacgccgacagccaagtcggttagcaatctgatggctgctaatgccacagccagcaagatactcaagctggccaccaatgtggccaatggtggctcctctatggacattgtgcagcagcaacagcagcacaacaagaccacaactactggccaaacagtgctcaatggcagcaaaccgctgcccaatttggtcaacttgggcattctcacgccggccacctcacccaccaaaaacacccaaacgctgaccttcaccaccacgaatggtagtacccagcagcagcaggctctagtggcctcgttgtccaagaagaccaacatactgctactacaggagccaacccagttggtgcagcaggtacagcagcagcagcagcagcaacagcagcagcaacagcaactgcagcagcaggtgcagcagcaacaccacgttctgcccatcagtcccacgagcagcgtcagcgggaacagcagcaagagcagctcgcccacgccgcagcaacagcaacagcagctgctgaagaagggcaaactggaactgatagagcccatggagacggatgagggtcagagcgacggcatttcggagagcgtggctgcagcgattgccagcatcacagattgcaaggaggacataggaggagcaacagtggcgggcattgaagttgtaggcgctggcgccgtcaacgaagagacgtagcctatactcaagcagctactgatgcaccgaaaactgacgctggagccacccaaggcactaaattgaccagcttgtccgtatacgaaagacattctagactcgacagaatgccgatcttcttgggggcagtccagcccactcactcaccaaaacacacatttggaaacatttcgtagactgcttacttgttcttagtttagacttcgagtccaatcaattgtatcatacaactaaacataatggaaacaatcccacaaatcgcattatttgtgcaatatttaattctgtatattttaaagagaacattttaatcatttattcatcgattgtatgtatgactttcatgcttgtattaaactatttacaactgctgatctcctcttaatttaattaggctatgcaaaaaaaaaaacaccaacacagacgaagcacgagcaacaattgtaaaaatacgcaagaaaatgcaaatttcaaattcatttccaactgatcactttaattattgttagcattaccacttagaacttttttaatctcggctttagctttagtgactattcgtattcgactaaatccaagtattatttatgttctaagcactagcaaaatgaaatttatacgatatatatacatatacatataaaaacacacacacatctactcggatatctaaagtctgctcattagtttaagacgtccttcgacttcgtgcaatatttttaatttacttcttagtaattcttagcaattccatctctgtcgaattttgggtattctttattttcgtttcgtttgttttgtttttattttatgtttttcgttacttcttttccttttctctctacctattgcagaaacctcttactcctgctcaaacaacagcaacctcagcaatcccaacagtaaccacggcagcagcgattccagcaagccgcccacgactctcctgtccgtcaacaagaggtccacagcaatcgcttcagcgaaactgccaaccaccggcaattccctgcccatgcagatctcacccaacttcattgagcacaagtattccgcgctggacatgaaggagaagttcttcttgaatctgagggccggcaaagcggtggccagttcacagggagccgatagaatgggctcaccaatgggacaccaatcggatgttggcatttccggcggatcaggagcaggcggtggcttgcgggcggttgctgtgggtcaaatgtgcgcgctgcaaaacgagcacattcaccaaaatctcttcaagaaaacgatcaactgatcggcatatcggatgagaaggcaagagagttggctgtgatgaagtagtaactaactgactaacaaacctgacaagaggcggagaaagaggattcgtcaataaggcagatgggaaaaggatgcagaagctgcagcaattaatgaaggagggataagtgagggagttgggcgccgccctacggtccttagagaagttttccaagacaaggcaacaagaagcaagaagcaagaatttccattggcttccaaaacaccacaaaatgcaaaaaaaaaaaaaaaaaaaaaaacagaaacaaattccaagcatttcgcaactattaaaaaatatcacccactagcacacacaaaatcattaaacctaatctcaaacatatttaagctggcctgcttagaaaagcttctctaaaacagctttagataattttaaaattaaaggaaacaaaacaaagcaaacaaaaatttgaaaaaaaaaattaattatacaagcgacaacattttagtaaatacatttggagaattttcttcaactagtcattattgtagttaaattaaatttttgatttttatacgcataaaaacataactttctaacctactggttggtggaattcccgaaccctatatttataacttaagaaacctctatcctgtgtacaatttcaatgaaatcttagtgaagggtctttccccaatcagttgtttgcgtcattttaattgaaaattataaattgtctaaaagaaatccatagaagcgaaatggtgcacggaaagcgttttcgtgagaccatcggaattaggaaaattataggtcgccaacttgccaaggcaactttgagcgagggatgcaaaatttataaatgtcgaatatttcaaacataaaatagttagctacaaatttaggggaagccgggaggcgtttccacataggagccacaataactctacagtagttatagtattataattatagattacgctattgtttatagagcagagcatgcatctgtagctgtgtgagtgtttgtccgtgcatgtattgtaattgtttatttatagtgttcgaacgtcccctaagtgtaaagtccccgacaattacaaaatatacgatatgaatataaaatatatttgtccattctctcgacgattgtatagcat

SEQ ID NO: 1511 - DNA, 2879 bp, DROSOPHILA
cacaaacgcagcgttacgcgtcgttcgacgtcggtgtttgtgtctacgtcacgtcggcttaaattatgttttaattacccagcggcaactgcgaatgcaactgaatcgaagcacagaatgctccctcaattgcataacatcacttgcgcatgagtgtgtgcgtgtgtgaggaaacgccagaggagcgaaacacaccacaccgaacagcggcgtagggaaagagacggcagaagcagctgaattgcagtacaagcagggttcatcgctaacaaaaaaacaagccatgtactcctgctgaatttcgaaagcgacttattatcgcctgattaccaacgaacagtattcgcccgatcaaacgccacataaccccctaaactcaccacagcacattggaagtgggtgggagtcgccgctaagctgaaattgcagccctggaaatggacgtttcggtgcagtgctgacctggccacactgaccagcccccgatttagttgctgtttttttacataactcgccacattcgttctcttcggaatacgtgatatatatatatatatgataatacgatatatattatggccgttttcctgatcaacgtctgcaagtacaatggctgcggcatcacgtttccgagcttgagcgatctgatttcccacatcgaggacacccacatagactatgacccaaaggtggtcgaacagaaggagcaggcccagcctgcctgcctgcccttaagttatgtcctgcgcttcatcaccgaggagaaccgcaaggaggcgggctcgttcctggccagcaacacaacagccccaccgaccaccaatagcggatccaatgcagctggccacgggaatggcaatgtggagctcaagcgaaagctggccatcaagcaccacagttacagtatgtcctcgtccaaccgcagcaccacgccaacaggcagcgaaatggacgaggacgaaatggtggtcacggagtcggaggatagcaacgactcctggaccaccgaggagtttagctcggagtttatcatgcgctacggcagcaggcattccggtggtggaagcaatggcacgcccggcaatgagaaacccttcgcctgccctgttccgggatgcaaaaagcgttacaagaacgtcaacggcatcaagtaccattcgaagaacggtcacaaaaaggacggaagagtgcgcaagggctacaagtgtcactgcggcaagagttacaaaacggcccagggcctgaagaaccacgcgctgcacacacacaactcgcagccggatagtgtgctgaatgcccagctggccaatgcgttggccataggcgatggggccagtgcggccacgcctgtgggcagcagcaacacctcctccaatccgaacccgccgcccatcattcagcgcagcaactcgccgtctcagtcgctgggctcgttgagtccgtcgagcatcagcaacatgtcgagcagcgccagcagttgccatggaggcagcggcagtctgtcgaacgggaataatggcaacaatgggagcactactagcaacactgccattctcactagcaacgggaatgtcctgcagcagctcagtgccgggaatgtggtcaccctgaccaatcttcccacgcaacagcatcagcagcaacagccgcagccgcaacagcagcagcagcagcaactccatcaaaacactgcaacaggtaacagcaacaacaacaatttaatgcgcagcacactcggtttagtatccattaaaaccaacaacacgccgacagccaagtcggttagcaatctgatggctgctaatgccacagccagcaagatactcaagctggccaccaatgtggccaatggtggctcctctatggacattgtgcagcagcaacagcagcacaacaagaccacaactactggccaaacagtgctcaatggcagcaaaccgctgcccaatttggtcaacttgggcattctcacgccggccacctcacccaccaaaaacacccaaacgctgaccttcaccaccacgaatggtagtacccagcagcagcaggctctagtggcctcgttgtccaagaagaccaacatactgctactacaggagccaacccagttggtgcagcaggtacagcagcagcagcagcagcaacagcagcagcaacagcaactgcagcagcaggtgcagcagcaacaccacgttctgcccatcagtcccacgagcagcgtcagcgggaacagcagcaagagcagctcgcccacgccgcagcaacagcaacagcagctgctgaagaagggcaaactggaactgatagagcccatggagacggatgagggtcagagcgacggcatttcggagagcgtggctgcagcgattgccagcatcacagattgcaaggaggacataggaggagcaacagtggcgggcattgaagttgtaggcgctggcgccgtcaacgaagagaccaacctcagcaatcccaacagtaaccacggcagcagcgattccagcaagccgcccacgactctcctgtccgtcaacaagaggtccacagcaatcgcttcagcgaaactgccaaccaccggcaattccctgcccatgcagatctcacccaacttcattgagcacaagtattccgcgctggacatgaaggagaagttcttcttgaatctgagggccggcaaagcggtggccagttcacagggagccgatagaatgggctcaccaatgggacaccaatcggatgttggcatttccggcggatcaggagcaggcggtggcttgcgggcggttgctgtgggtcaaataggcggagaaagaggattcgtcaataaggcagatgggaaaaggatgcagaagctgcagcaattaatgaaggagggataa

SEQ ID NO: 1512 - protein, 767 aa, DROSOPHILA
MAVFLINVCKYNGCGITFPSLSDLISHIEDTHIDYDPKVVEQKEQAQPACLPLSYVLRFITEENRKEAGSFLASNTTAPPTTNSGSNAAGHGNGNVELKRKLAIKHHSYSMSSSNRSTTPTGSEMDEDEMVVTESEDSNDSWTTEEFSSEFIMRYGSRHSGGGSNGTPGNEKPFACPVPGCKKRYKNVNGIKYHSKNGHKKDGRVRKGYKCHCGKSYKTAQGLKNHALHTHNSQPDSVLNAQLANALAIGDGASAATPVGSSNTSSNPNPPPIIQRSNSPSQSLGSLSPSSISNMSSSASSCHGGSGSLSNGNNGNNGSTTSNTAILTSNGNVLQQLSAGNVVTLTNLPTQQHQQQQPQPQQQQQQQLHQNTATGNSNNNNLMRSTLGLVSIKTNNTPTAKSVSNLMAANATASKILKLATNVANGGSSMDIVQQQQQHNKTTTTGQTVLNGSKPLPNLVNLGILTPATSPTKNTQTLTFTTTNGSTQQQQALVASLSKKTNILLLQEPTQLVQQVQQQQQQQQQQQQQLQQQVQQQHHVLPISPTSSVSGNSSKSSSPTPQQQQQQLLKKGKLELIEPMETDEGQSDGISESVAAAIASITDCKEDIGGATVAGIEVVGAGAVNEETNLSNPNSNHGSSDSSKPPTTLLSVNKRSTAIASAKLPTTGNSLPMQISPNFIEHKYSALDMKEKFFLNLRAGKAVASSQGADRMGSPMGHQSDVGISGGSGAGGGLRAVAVGQIGGERGFVNKADGKRMQKLQQLMKEG

SEQ ID NO: 1513 - DNA, 3002 bp, DROSOPHILA
aggaaaaaagcttttaagctacttaaggttgttggcaggacgatgttgccacaagaagcgagttggggataaagacccagctaatgagttgacagaccacgccccgcaaaatacagtcgcaaaaagggaaaacaggcaacggaaatggctggggtcagagggcaaaggacatggaacagatggtcctcgagtactcgcatttccgagaatgcaacgaggaacattcctcgacaaatgggtcaaagtgaggtcaaccccacaataaatcagcaaaggacttgtttatcaaaataaattctacagaagcagaagattgaaataaacatgaacaggttgttttggcaaaatattaccagattttagtctccaaattatattgttgatttataccatttttagatacattgcttttttttatcaatactaattttataatttatagctttgctaatgatttcaggcattttgtgatcactttcaaaaacaatcacagcctaaaacaaacagatcaccatttccatgggctattgctgttctagtgggtcacacaacttgcacttgacattattgcgattgctggaaaacaaacgattattatgacaaactgtttgggtccaatctgggtttgtttttctcgtcgcacagcatcgcctcgcatgtacttggattggaacggtttggatgtgacgggatgggatgggatgggattggcttggatcgggggcattaatcatgggcgagagcttggggcatggacatggacatcggcctgggcaaaacgcaaaatttgcattgcaattttattcttgatttaatcaagtgccgtggcacaaacgccaatttaactacccacacactaccctcacacatacacaaacgctcacacacacccaaacatccgcagggcaatgagaatgccgtcagacgttgcgtatacgtaatgcttttggtttgtgtagcattatgggatggtgtgagcttagcgcgtagtttgcacccgccagccgagtcaccgagatgtaccagctggagaagatctgggtcctgctgtgcctggccctcgtcggtgtccttggcttcggccagttccacatgaagcactatcagctgcagcgtaactacaatacgcaggaggattccggcgagaatgacaatagtgtgctgcgtgagttttcttcttcttagattccactcgatacacagaggaaaaaagttggtaacttgcaaatatgggctggccatcttgctattatgcatttattctagcagtttttgagttttttgaatattgatacgtttatttttttccatgcaggaacctttcgccgctgcatgtgggagcagtcgaagtttctgccccgccgcctcgtccttttgagcctgtgctcgaatctcttctgcgagaacaatcacataatgccccgttccaggtctattttcgtagtggaaaaaatgtctaggccgaatgagtagttgaccaatgcaattctatatagctaagcatgtgcacccatgcccaccctaacccaacctagcatgccctagaaatccaccctctccccccatgaaatatcccaaaaaaacgcccgttgaagggaacctgaactaatgccctgtctctcccgctgttctgtgtctcctccagctgcctggacatcctgcccgagcaatgcgagcagggcgatgaggaggagctgatgtacaagcccttccccgactgctgtccggtttattgcaacctgaagcgtcggatgcagcgcctgcgcaccatgcacttccggcaccgcctgctgcgcaacaaacaggacggctcagcgggatccgctggcggtggatccgctggtggcgacggtcccaataactcgctcctcagtgagtttgtctacaacaactactaggatgacaggatggttttgctcggcaggatggccaactaggacgacgcgacgaggacaatccagcaaatcaaattattctgcgatttgtgaaccaaccggtcaaaatggacaaaaaaggaagtcgcgtcaccgcaacactgagcggaagtggatccaaaatcaaattatttggattgtgttaatctcaatatgtatgtaggctataatttagattgtaacatatataagctggtattcatcaaactgagcacaaaaaaaaaaaaaaacacaatcaaattgtttcaatgttaaactaatgagcaaaagtttttaagaacatataatataatattatatatattatgtttcaagtaactagctgctatcaatgtgaaattaagttataatttacaagttgcttaacgtttttgtgaaagtaaacaatcagatttattatgttctggagtttaaggttcccattacgcactttttctcagtggaatctctccaatatccaattgaaactgtcactcgtttggaattcgtctagacaggctctcgaaagtccaagttgatggacttttttctattgctattttgaggccgtgaccaagtagctgcagcccttttttcccaggtttccttcattagggctttttcggagtctcaagagctgtgctctgcccaaactgcgatttcttattttttttttttttggccaaagtgggcggtgaattgtggtgtggtgtggcgatatatcctgcagcagtgcttcctgtttccgcttatcgttttaacacttttatggagcagatgcagctgcagagcttcggagcttcgtgctggtgcctttgtcttcatttttatctgcaaacaagcaataaattttattttaataagcaacacttttgatagccagtgtcgagctgaaagttccttctccttctgccactcgttcccttaccatcgcttcccttcctgtttctgcacttgttctgtggcttgtccttgtcctggcagtcgctgccatcctggctgtatccttgctgtggcgcagcagtaaatacaaaggatacttggcatcatcggctcacggttagctgccataatgttgcggtacaaggc

SEQ ID NO: 1514 - DNA, 676 bp, DROSOPHILA
ccagccgagtcaccgagatgtaccagctggagaagatctgggtcctgctgtgcctggccctcgtcggtgtccttggcttcggccagttccacatgaagcactatcagctgcagcgtaactacaatacgcaggaggattccggcgagaatgacaatagtgtgctgcgaacctttcgccgctgcatgtgggagcagtcgaagtttctgccccgccgcctcgtccttttgagcctgtgctcgaatctcttctgcgagaacaatcacataatgccccgttccaggtctattttcgtagtggaaaaaatgtctaggccgaatgactgcctggacatcctgcccgagcaatgcgagcagggcgatgaggaggagctgatgtacaagcccttccccgactgctgtccggtttattgcaacctgaagcgtcggatgcagcgcctgcgcaccatgcacttccggcaccgcctgctgcgcaacaaacaggacggctcagcgggatccgctggcggtggatccgctggtggcgacggtcccaataactcgctcctcagtgagtttgtctacaacaactactaggatgacaggatggttttgctcggcaggatggccaactaggacgacgcgacgaggacaatccagcaaatcaaattattctgcgatttgtgaaccaaccggtcaaa

SEQ ID NO: 1515 - protein, 184 aa, DROSOPHILA
MYQLEKIWVLLCLALVGVLGFGQFHMKHYQLQRNYNTQEDSGENDNSVLRTFRRCMWEQSKFLPRRLVLLSLCSNLFCENNHIMPRSRSIFVVEKMSRPNDCLDILPEQCEQGDEEELMYKPFPDCCPVYCNLKRRMQRLRTMHFRHRLLRNKQDGSAGSAGGGSAGGDGPNNSLLSEFVYNNY

SEQ ID NO: 1516 - DNA, 3947 bp, DROSOPHILA
gcagggccgactacgatggtaaactgaacctgggcctggggatctgctcgccctgcttacctctaggtccatggacgatttagattccgatcccagcgcaactgttggctgtggcaggttcgaaatagtgacgctggtggatgcggccgttggatccaccacgccgccgctcgccaatgctagcggttcgctcatctcgctcacgatccgatcgatctgatctctcactgctgatttctattgccacaaggttagggtgtgtgcggggggagtgtggtatcctaacaataatgttttgccaacatttgcgcgctacatacgtgcgtacccgtcgaaagtcgagagtttcatgaatactgacacgggagtgaattcggatttgtagcactagtactgccgagttgggatgactttgtacttctgctagtgttccgcggaaagtggcctggcttgctctgattcaagttccgtgtcgcaattacatgttatctattctaatggtgaaatacttgttgttgttgctgcaagtctactgggaagagcgactaacgcatacaggcgcacttagcaggcggagtgcggtcacaccatcagctgggccgatcagctggccgccgacagtgctggtcaacggttagcagggatggcgaaagggggttttgaaaataaaagcatttaaaatgtatatattacatttatcctgttgaaaacgggttgaaatatattttgtattgcccgataaacggtgaattattaatatttaaaccaagctctcatgagacagacttttaattcatatttttgttttattcttccaattggattaaggtatatgagaaattttttgaagccctgtgtgttttattttggattcgtgcttaagtctttttttgaaaacgtacttttgatagttttatgttcaaaccagatctcatagaatatagtggcaacggaaccgactcctaaaagtgcaattttcctccgcggcagaagaagaaacatgcatcaacacggcgtatacggtcactttaaccgggtcgtgctccaagagaattcctttctgcaaatggacggcataaacaagtacaacgagtttgtggcgctgcacaagccacagctggagtcctccggtattccgctgatattttggccggctctgttccgaaaactgaccacggaaaccttcgatgccggcgaggcactccagttgatgctgatcgactacgatgaggatgaacagcagaatccggccgaggacgatgacagtcccaaccctgtgttcgcactgggcgtagcccgggagcagggcataaaggccagtgatcctcaggccatctatttggtcgatcacgcctggacgttccggctaaacggtgctcggcagcagctggaggagtatccgcaactggcggagcgactttctgccatcactggcgttgaccttgagctgaaggatcgggtcgacaagatcctgcgccgtctgtggaagtactgccacgcctactccatcggcagcgaaggcttgtcggacgaggagcgccagcccatctggtatgtgatggacgaagtcggctcggctgtgaaccactcggacgatcccaactttcgacttgttccgctgctctacctaaacacccaaaccacatacagtgtgctctttccgattcgggactgcgatgtcggagaagcggtgacccgcgatatggtggagcacgtggcaaaggatgcgccccagcggcctgcgctgcttttaccctggcgcgatgccgacctcacgggcgaaagcttcttgcaggttgaaccccgggcagattactttaccagcggtcacatccctgagacctatcccaaaggcgatactgttccactgccagccaggtcacgttgcgatccgctgaaggtgtatgcagagtacgaggtggtgcgccgtcatctaacttcgtccgagttcatcctagttaacaacgcagacgaggcggatgtcctttggctcacacaccacttcaagaatttcgaggattttgcagataggtcgcccggcaagttcatcaatcagtttccgttcgagtacgtgatcaccatcaaggatctccttagcattgtgggccgccgggcggccaaggagcaccatgatagccttacgcttgaaacgtttccggcatggctccccaccacctataatctgtccaccgaagtaaaggagttcgcggcttactaccaaacgagagcagccaagggcctcgacaaccactggattatcaagccctggaacttggctcgcggattggacacacatatcacggacaacatcaagcagatcgtacgtctaccggccactggaccgaagatagcgcagaagtacatcgagcgaccagttctctttagtcggcaggaggtggaaggcagcgttaagttcgatattcgctatgtaatcctgttgaaaagcgtcaaacccctgaaggcatatatacaccggaagttcttcctgcgtttcgcaaaccatcccttcacgctggatcacttcgatgactacgagaaacactacacggtgatgaactaccagacggaggcgcagctgcatcacgtcaagtgcgacgacttcctgacgctctggcaggaacagtatccggataacgattggtcggctctggagcagcagatctgtagcatgctgctcgaggtgcttcagtgcgccagtcaagcagatccaccctgcggcctggctccttgtgcccaatcacgagctctttacgcagccgacatcatgctgcggtggaaggacgataaggagaagttgatggagccccagttgctggaaatcaactggactccggactgcaaacgcgcatgcgactactatcccgacttcttcaacgacatcttccgtctgctcttcctagacgaagaaaacgacgatagcttccgggtactgacgccagacaattgacattaaccgagcaaataaacccagttatcccaaagtttaatgcctattcgtgtatttcatttcgtttagactatacaaaacttaaatagcttgccatttgtacaatatacaagtaggtgtgtatgcttctatgcgtgggtatctaagtcctaaaggcttaactaactaagatagcaagtcagttggtggtgtggcttatggttttatcatagcatggacaagttctagagttatgaatttagtgtaaagttcaaagagtgagcttaaagttaaggcgtttacaattctcaattgcaaatggcacttgatgaacaatgaataatggtaaatagtgaaatgacaactttacaggatgatatcccaagaacatacattagagtcgatgctaactttaacttaaggcaatttcaaaggcacccttttcaggctaggctcacggtggaacggaaacgataaagtcaatccaaacataaagtaaatatgttaaagtcttctatataactataagctcccaagggtcttgtacttggattagtttgcttcaacacgcaggatcttggcttagctttgaataatatacctacgaactaatagtgtgaaatgcagggtatgtcaatgaatgaatcttagactacctatgtggtacaactaaattaccgcttacagctaaggctcgactactaccactaaacgcagacctcgtcgaagtccaggcgtatcttctcgtcagcggaagccagcttatgtatagtctttttgatgcgcagcgctggcaagcgcacgtcggggttttggtgccagcactccttcatgagcttggacatgccagtcattaactaaaaaatgagaacaacaatgagatcaaagatctagagaatggcaatcgaaagcgacttaccgaatccgagctccagcgattgggaatggagggcctgtagttgtcgatgcagaccaccttgcgcatatcctcgaagctgggatccattggcaccacatcgta

SEQ ID NO: 1517 - DNA, 1947 bp, DROSOPHILA
atgcatcaacacggcgtatacggtcactttaaccgggtcgtgctccaagagaattcctttctgcaaatggacggcataaacaagtacaacgagtttgtggcgctgcacaagccacagctggagtcctccggtattccgctgatattttggccggctctgttccgaaaactgaccacggaaaccttcgatgccggcgaggcactccagttgatgctgatcgactacgatgaggatgaacagcagaatccggccgaggacgatgacagtcccaaccctgtgttcgcactgggcgtagcccgggagcagggcataaaggccagtgatcctcaggccatctatttggtcgatcacgcctggacgttccggctaaacggtgctcggcagcagctggaggagtatccgcaactggcggagcgactttctgccatcactggcgttgaccttgagctgaaggatcgggtcgacaagatcctgcgccgtctgtggaagtactgccacgcctactccatcggcagcgaaggcttgtcggacgaggagcgccagcccatctggtatgtgatggacgaagtcggctcggctgtgaaccactcggacgatcccaactttcgacttgttccgctgctctacctaaacacccaaaccacatacagtgtgctctttccgattcgggactgcgatgtcggagaagcggtgacccgcgatatggtggagcacgtggcaaaggatgcgccccagcggcctgcgctgcttttaccctggcgcgatgccgacctcacgggcgaaagcttcttgcaggttgaaccccgggcagattactttaccagcggtcacatccctgagacctatcccaaaggcgatactgttccactgccagccaggtcacgttgcgatccgctgaaggtgtatgcagagtacgaggtggtgcgccgtcatctaacttcgtccgagttcatcctagttaacaacgcagacgaggcggatgtcctttggctcacacaccacttcaagaatttcgaggattttgcagataggtcgcccggcaagttcatcaatcagtttccgttcgagtacgtgatcaccatcaaggatctccttagcattgtgggccgccgggcggccaaggagcaccatgatagccttacgcttgaaacgtttccggcatggctccccaccacctataatctgtccaccgaagtaaaggagttcgcggcttactaccaaacgagagcagccaagggcctcgacaaccactggattatcaagccctggaacttggctcgcggattggacacacatatcacggacaacatcaagcagatcgtacgtctaccggccactggaccgaagatagcgcagaagtacatcgagcgaccagttctctttagtcggcaggaggtggaaggcagcgttaagttcgatattcgctatgtaatcctgttgaaaagcgtcaaacccctgaaggcatatatacaccggaagttcttcctgcgtttcgcaaaccatcccttcacgctggatcacttcgatgactacgagaaacactacacggtgatgaactaccagacggaggcgcagctgcatcacgtcaagtgcgacgacttcctgacgctctggcaggaacagtatccggataacgattggtcggctctggagcagcagatctgtagcatgctgctcgaggtgcttcagtgcgccagtcaagcagatccaccctgcggcctggctccttgtgcccaatcacgagctctttacgcagccgacatcatgctgcggtggaaggacgataaggagaagttgatggagccccagttgctggaaatcaactggactccggactgcaaacgcgcatgcgactactatcccgacttcttcaacgacatcttccgtctgctcttcctagacgaagaaaacgacgatagcttccgggtactgacgccagacaattga

SEQ ID NO: 1518 - protein, 648 aa, DROSOPHILA
MHQHGVYGHFNRVVLQENSFLQMDGINKYNEFVALHKPQLESSGIPLIFWPALFRKLTTETFDAGEALQLMLIDYDEDEQQNPAEDDDSPNPVFALGVAREQGIKASDPQAIYLVDHAWTFRLNGARQQLEEYPQLAERLSAITGVDLELKDRVDKILRRLWKYCHAYSIGSEGLSDEERQPIWYVMDEVGSAVNHSDDPNFRLVPLLYLNTQTTYSVLFPIRDCDVGEAVTRDMVEHVAKDAPQRPALLLPWRDADLTGESFLQVEPRADYFTSGHIPETYPKGDTVPLPARSRCDPLKVYAEYEVVRRHLTSSEFILVNNADEADVLWLTHHFKNFEDFADRSPGKFINQFPFEYVITIKDLLSIVGRRAAKEHHDSLTLETFPAWLPTTYNLSTEVKEFAAYYQTRAAKGLDNHWIIKPWNLARGLDTHITDNIKQIVRLPATGPKIAQKYIERPVLFSRQEVEGSVKFDIRYVILLKSVKPLKAYIHRKFFLRFANHPFTLDHFDDYEKHYTVMNYQTEAQLHHVKCDDFLTLWQEQYPDNDWSALEQQICSMLLEVLQCASQADPPCGLAPCAQSRALYAADIMLRWKDDKEKLMEPQLLEINWTPDCKRACDYYPDFFNDIFRLLFLDEENDDSFRVLTPDN

SEQ ID NO: 1519 - DNA, 6932 bp, DROSOPHILA
ttcatgagtcgtgtaggttttaccttctcttcatgcggcgcttactcttaatgtgtctcctaattaaggattagcagcatggcaattaggagggaaatgagattagcaatacaaagcctttgggcggaagcgggagctacaagctatgggctcaagacttaagatataatcacctgggatgcgtctgcaccgagttctgtggcacggccggtagctccttgccattgagatgggcggatgaggcggaggagagctccatgtctaagtccggtatgtcctcccgcagatgatcgctgatttcggctgaaacataacaaatgcacattaaaccatatgcacatagcatatacatatgtacacacatggacggcccaaccaacacaaacgccaccagcactaacacacacacacacatgcacacaggcgccccagcaagttctgtatacacacacagaacggtggtgtgcgtgggtaaatcattgagaaaatgcacttatgctgcaaacgcccacgacatccgtttatataatacattctgtgggatccatcaggtgcttctttcaccaatcagcattccgagggcacttttttcgccttggcctggccaaatacgcaacgcaattggccagaaccgcagcatatgaaaacaaacccaaaacactcagtgacttttcaaggcattatatgtggctctaaaaccccataaaatcgaaatttctcttgcgcactctcttcaccaagcacttggtaattgattaacactaattgatgcccacctctggcattattgtacagcagaaacgtcaatagaaaaactaaatatatattggactccattgctagaaatgttatttgtccgagcctatcggaacctatcgatatacttctagcgggcagtgtgaccagggcccacatctgcacataacatatttcacataaaataccgggtcttcaaatttcccaaatcccctgcgtaaaaataccaaagcacaacacgcacaccaacacgagcagccggtcagcggaaaagtttctagaacgtcaaactcgaactcccatcaaagagtctttggcaaaggagcccatttaacagacaattattttattcagtgccgttgtgttcacaaagcataattgtgttcaatttaggtaagtggagaagcaggagatcttcagtggaggagttttcgtgccattaagttgttttcctgagtgaaattaacggatttacctacccggtgtcatggaatataacaaaacatttgcttagttagggttttcatgtccactgcgaccggtttgtccagaaaatcaatgggtttcagctagtatcgatcaaacgacagagttttccccctcccacagcgcaaacatgtgtttttagtcacgtaactgttataattttcctcgttttccttgcaatggagaagatacacacgccgtagggaatcatcttactgaccccccaattaccacccccgccctcctgcacatatatgtatgtacataagtttgtaatatcagttggcagacgcaatacaaacattatctttgtatatacatacatatgtgtgtagagatgtggtcgtttattgtacaattagttgggttgcgccagaaatcgcataatgtgtgtgtgagcgcaggggctgcgggggcagaatcccgctaaacaaaaacaattggggcaagtggtttttttcgcgcttatcaaaagcccctcactgcgcagaggacgctctctctgtgggccgctcgactcgcaaagagcctccaatatttgccggcgtttcgggcgtagcgctcccattctcataaaaacgctcgtcgggaaagcatcgcaccaaaactcgaaaaaaaaaacagaaaacatttacgcgttctcctagaatttcacaaactacgcagttcgtttatttatttattggccgacaagtaaaaaaaaaactcgtggtcagtttgtagtcatctacacacatgtgtatctacttacataatgcccgtaaatccggcggatagccggtgattttcgacagcgacctttctgcgtcattgatttaatatttatttgcctatctgctgattagaatttgattaaatgccagctcggtgtttttttttggctgcgaaatggtcaggacctagggcaaccttgggacctggtacttacttggcttatctcagattcgattggaaagtttccagagtttcgccaggttccgcaagatttagtcatgccctcaaggtttatttgcaaaactataaaatagccaggtatacatagaacttacatatgtatagccgaaacagaaaaactagtaatttttcccaaacgacttgtcttgttgttattgcagttatacattcgtaatataagatagctgattatcttacaagattgtccgtacttacatctatgtttatttgtactttcagaaccttccagaaatagaaacccaacgcatttgccaaggaaacgtggcccaaaactgagcaacccctaacaaatagaaacaaacaaaaaatcaaaacccgtcgaagtgataagaaaatttgtatttgtgtagtaaaagtgccgaggagagaagaggagaccgaagagatccctccgtgagtgaagtgtgcctgcgagaaagctatgtccgcatctagatcgcgtaataaacaatccaaactttgtgacgatgagcggctcgatataagcagggacgagttcaaccgattccaggaggcctttggcaaggaggagttccgcaagctcttcttcgactacgtggatgagatccaggatcctgagaaccgcaagatctacgagtcagagatcacgcagctggagaaggagcgtggcgtggaggtgaggttcatccacccgaagccgggattcgtgatcaagaccgctctagatggcgagctcaagtgcttcatcaacatcgctagctgtgaggagatccagaggcccaaaaatgaggtggccacggatccgtcgagtggtagccggggcctgagctggtccattccgatggcccagaccacgtcgcgcgatgacttcgatgcgaaaaacaaccactgcaaggtgttcgacgtcgtcttccatcccgacgcccttcacctggccatgcggaacaaacagttccgccaatgcctcatcgatacggcactggacgcaatcgaacgcgagtacaaggtctcgctggatcgcgccaacctcaagttccccaagctggactacaagggtattccccgtcccactgtgatacgcaagatggccgataatcccacggccgaggagcaggagccacatcccctggcgcacatgttccccacaaagccacccgctccggggaaacaagagccccgtgtcctgcccatgaaaacgaaaccctctccggtgccggagttcacggtgcccaggtatacgatcaagcacagccacgacgtggacttgtccgagtacacggacgagctggatgccaagctgcacgtgaccgttcctcgttctcttgtcgtggagatcgagctccccctgctccgctcgacagccgagtgccagctggacgtcacctccaagtccatatacctgttcagcgagcgacagggcgccaagtaccgcctgaagctggacctgcccttcatcgtggacgacaaggcgggccgggcccgcttcgacacggatatgcgtcgtttgagcatcacgttacctgtggtccggaagagcatccaggagcaagcccagatgcacgaaaccttgcgccacttcagccgcgaggacagcggcgtggagctgcactccaatagcgaatcgccggtggaggaggatcccgatggcgaactcagcgattccaaggcggatatttccgagacttgtaagtaaaccattaataatatcatatttaagagtctgtaaatataattaacaatgaaaacttgtaaatctcacgtacaaggggtcatccattccatccattattattaattattataataggcagttgtattatgtatgataatattataagataatattgtgtggatcgaactattttcgattaaaagcttttaagtttgtttaatttgtgcgaagagaatggttggcttttggattggattgttcttttattttgatactctttcaaataaatatattaatatatatatatttgtgtgatccctcagcatcgcccagtgtcgcacctgccaatagcccgttcctgaagagctccgtgcactaccagctgcccagcaagttcgactgcaacgtgctggacaatgtgatggcctttgtgctgcacgtgcccaacgttcaaccggactccattgagcagttgagggagcagcggagcctgcacctgaagttcgccaccatcggcagtggctactatcccacccactacgctttctacgtggaactgtcggcggagcatgaggattcctccatcgagagcgcggaggcagaggcctgggacaacaatgtggtgctcaagctttgtctgaattcgcagagcgagactccggctagctacctggccggtctagatgccacggagctcaaagagtacccagttcatgggcagtaccatgtgaagagcaagggaaaggttaacgcaaagaaggataatgctccgctcgatgtcaaattcgagcgcaaccaggagggccatgccctgaaggttaccattcgccccggaacaaaggaggaggaggaagataaggagaaccaagaccaagagcccgaaagcgatcagcagcagcagcaacaggtgcagaacaagaagcccggcaagaagcaacggaagaagaataagaaggagcgctccctatccgaatctgcctgcgcagatatgatcctccaggagccactggctaaaactaatgagcttcagccgagggccacgtttaagttgccgccgcagcgcaagcaacgcagctactcggagtgcaacgatagcactggccgctctcatcgcggcattctcaagcgtttcagccgctacgggccccgaccctcgatgtcggacagctggtcgtccattgacgactcctcctcgtactcgtgctccgtggatgcatccggaacatcgctgttctctcaatcattcggcggcattcccgaggaggaccgttcggatgccgggctctcggagagctgcaagaagactgttagatttaacgatcacattatgaagcaagtgttccggtaagtaccagctagaacccctgataatactcggtaatttgacaatttactcaatcgcacagactcgactccagcatcctgggtcagcgcaagaagaaccagaagcgacgcgatctcaagctgcgggctcagcagcgtcgcctcagcgagggcgattctgtcgactacgaggaaacccggggctctgccctcaaggtgagatcaagatctagttaattgagcgaatatcccgtccagttagcgggcagttaggctgttagcttgctaattgaattatggcccatcagcgaaatcgggcagtttggctttattttcgtcacaccagacataaatattgatcaaacctttgtttagggaattctagtacccgtgtgcgaaatctaaacaaatccgaaatgagctttatttatagcaggaatatatgcagctgcagcaaactccagggaatggaaagtttttgcacttgtagacagtaaataatcgcagaaatgttaacatcagcgtgttagcttgtgataatacatctcaatatttcaaatttgtgtgaaaattgagcgaaaaattattagttggtagtctgacattaatgcaaatgtttattctaatttacagcaagaagaaaatccgtcaaggaactgcaacgatagcggattggatctcactggagcagcaggtgcccacagcaacaacaatgaatcggatgctaagaacaccatgatgtttgaaatggatgattaggatgttatttaaaccataaatatattcatattttttgagtgatttagtggcatgttttcaaggtttttaaatgctactacataaatgttaactaacgcaacgtttttttttttttaatatttatactgtaattccttttatatcgaggcgaattgctcaattggaaatacacaaaattgtatttaggcaacacgaatcagggctaaatcagaaatcaaaatgttcattacatcaaatactaagtgttatgtaattcggttaaacattgaaattgttaaaacgcaagatgaaatcctacgctgaactgaaaaagaaacctattattatagatcgataatttcatattcattctcattgaagaacacacaacaatgatgtcttacaagttagcaaactacaagttttaagtaaacattaaaacgcttgtttattggctccatgctcagctcatataacaatcataacacgataaacctaaacaatatcaatagttaacaattcctctagtattacacacaacaaaatcacccaatgcataagtagagtataagctacgtacatgtttagaagcactggctgaatcaatgcatgtaattttaacttttataagcgagctgcaagttaaaatacatatacatctcttatgaatgagaaatccaacctgcatacgagtattgattggcattagaagtggtgttcaaggagtttgttccagtgctcgatttgctggagttcccttcgctttccctccaagacatacagcactgggcagtcgagggaatcacactgtaggctacccaggcgtccgcaacaagcctggcatatctgccgagttagttggtagcccctctccagacgcgctgtcttatctgagagcacaactacgcacgtggtggcgtttttcaggcagtctgggcaaatgcccgccttggtttggcggccacagtcgatcacgcagctggtggtagagaaatactgggagatggtggacttggcaccg

SEQ ID NO: 1520 - DNA, 2856 bp, DROSOPHILA
accaacacgagcagccggtcagcggaaaagtttctagaacgtcaaactcgaactcccatcaaagagtctttggcaaaggagcccatttaacagacaattattttattcagtgccgttgtgttcacaaagcataattgtgttcaatttagaaccttccagaaatagaaacccaacgcatttgccaaggaaacgtggcccaaaactgagcaacccctaacaaatagaaacaaacaaaaaatcaaaacccgtcgaagtgataagaaaatttgtatttgtgtagtaaaagtgccgaggagagaagaggagaccgaagagatccctccgtgagtgaagtgtgcctgcgagaaagctatgtccgcatctagatcgcgtaataaacaatccaaactttgtgacgatgagcggctcgatataagcagggacgagttcaaccgattccaggaggcctttggcaaggaggagttccgcaagctcttcttcgactacgtggatgagatccaggatcctgagaaccgcaagatctacgagtcagagatcacgcagctggagaaggagcgtggcgtggaggtgaggttcatccacccgaagccgggattcgtgatcaagaccgctctagatggcgagctcaagtgcttcatcaacatcgctagctgtgaggagatccagaggcccaaaaatgaggtggccacggatccgtcgagtggtagccggggcctgagctggtccattccgatggcccagaccacgtcgcgcgatgacttcgatgcgaaaaacaaccactgcaaggtgttcgacgtcgtcttccatcccgacgcccttcacctggccatgcggaacaaacagttccgccaatgcctcatcgatacggcactggacgcaatcgaacgcgagtacaaggtctcgctggatcgcgccaacctcaagttccccaagctggactacaagggtattccccgtcccactgtgatacgcaagatggccgataatcccacggccgaggagcaggagccacatcccctggcgcacatgttccccacaaagccacccgctccggggaaacaagagccccgtgtcctgcccatgaaaacgaaaccctctccggtgccggagttcacggtgcccaggtatacgatcaagcacagccacgacgtggacttgtccgagtacacggacgagctggatgccaagctgcacgtgaccgttcctcgttctcttgtcgtggagatcgagctccccctgctccgctcgacagccgagtgccagctggacgtcacctccaagtccatatacctgttcagcgagcgacagggcgccaagtaccgcctgaagctggacctgcccttcatcgtggacgacaaggcgggccgggcccgcttcgacacggatatgcgtcgtttgagcatcacgttacctgtggtccggaagagcatccaggagcaagcccagatgcacgaaaccttgcgccacttcagccgcgaggacagcggcgtggagctgcactccaatagcgaatcgccggtggaggaggatcccgatggcgaactcagcgattccaaggcggatatttccgagacttcatcgcccagtgtcgcacctgccaatagcccgttcctgaagagctccgtgcactaccagctgcccagcaagttcgactgcaacgtgctggacaatgtgatggcctttgtgctgcacgtgcccaacgttcaaccggactccattgagcagttgagggagcagcggagcctgcacctgaagttcgccaccatcggcagtggctactatcccacccactacgctttctacgtggaactgtcggcggagcatgaggattcctccatcgagagcgcggaggcagaggcctgggacaacaatgtggtgctcaagctttgtctgaattcgcagagcgagactccggctagctacctggccggtctagatgccacggagctcaaagagtacccagttcatgggcagtaccatgtgaagagcaagggaaaggttaacgcaaagaaggataatgctccgctcgatgtcaaattcgagcgcaaccaggagggccatgccctgaaggttaccattcgccccggaacaaaggaggaggaggaagataaggagaaccaagaccaagagcccgaaagcgatcagcagcagcagcaacaggtgcagaacaagaagcccggcaagaagcaacggaagaagaataagaaggagcgctccctatccgaatctgcctgcgcagatatgatcctccaggagccactggctaaaactaatgagcttcagccgagggccacgtttaagttgccgccgcagcgcaagcaacgcagctactcggagtgcaacgatagcactggccgctctcatcgcggcattctcaagcgtttcagccgctacgggccccgaccctcgatgtcggacagctggtcgtccattgacgactcctcctcgtactcgtgctccgtggatgcatccggaacatcgctgttctctcaatcattcggcggcattcccgaggaggaccgttcggatgccgggctctcggagagctgcaagaagactgttagatttaacgatcacattatgaagcaagtgttccgactcgactccagcatcctgggtcagcgcaagaagaaccagaagcgacgcgatctcaagctgcgggctcagcagcgtcgcctcagcgagggcgattctgtcgactacgaggaaacccggggctctgccctcaagcaagaagaaaatccgtcaaggaactgcaacgatagcggattggatctcactggagcagcaggtgcccacagcaacaacaatgaatcggatgctaagaacaccatgatgtttgaaatggatgattag

SEQ ID NO: 1521 - protein, 834 aa, DROSOPHILA
MSASRSRNKQSKLCDDERLDISRDEFNRFQEAFGKEEFRKLFFDYVDEIQDPENRKIYESEITQLEKERGVEVRFIHPKPGFVIKTALDGELKCFINIASCEEIQRPKNEVATDPSSGSRGLSWSIPMAQTTSRDDFDAKNNHCKVFDVVFHPDALHLAMRNKQFRQCLIDTALDAIEREYKVSLDRANLKFPKLDYKGIPRPTVIRKMADNPTAEEQEPHPLAHMFPTKPPAPGKQEPRVLPMKTKPSPVPEFTVPRYTIKHSHDVDLSEYTDELDAKLHVTVPRSLVVEIELPLLRSTAECQLDVTSKSIYLFSERQGAKYRLKLDLPFIVDDKAGRARFDTDMRRLSITLPVVRKSIQEQAQMHETLRHFSREDSGVELHSNSESPVEEDPDGELSDSKADISETSSPSVAPANSPFLKSSVHYQLPSKFDCNVLDNVMAFVLHVPNVQPDSIEQLREQRSLHLKFATIGSGYYPTHYAFYVELSAEHEDSSIESAEAEAWDNNVVLKLCLNSQSETPASYLAGLDATELKEYPVHGQYHVKSKGKVNAKKDNAPLDVKFERNQEGHALKVTIRPGTKEEEEDKENQDQEPESDQQQQQQVQNKKPGKKQRKKNKKERSLSESACADMILQEPLAKTNELQPRATFKLPPQRKQRSYSECNDSTGRSHRGILKRFSRYGPRPSMSDSWSSIDDSSSYSCSVDASGTSLFSQSFGGIPEEDRSDAGLSESCKKTVRFNDHIMKQVFRLDSSILGQRKKNQKRRDLKLRAQQRRLSEGDSVDYEETRGSALKQEENPSRNCNDSGLDLTGAAGAHSNNNESDAKNTMMFEMDD

SEQ ID NO: 1522 - DNA, 3254 bp, DROSOPHILA
tggtgttccactcgatggtagccatagaagggtctgtaaagagaggtcggttagagatttacgccaagaagtcgtccagaaagaactcacatgcccttgaccagctgaattttgaacacatgctgggcgttggagctgccttgacccaaggatatgttgatggccttgtccaggtgcatggccatctgcaggatgccccgctccagggactcaaaatccttcttgtcatacggaatgtatagataggggaaaactccgtgtacatgcatgcaggtcttctggcctctggagttgccgccaaacactcgaatcactggcacctggaagtggaatggatcgttataccagtttttactgtggtgaaatagaccggctcacccgcttgatttctttgccgcgcagctccgaatagcacggatccattccgaactgcggcttctccatatagaaatccgcgatgaccagccggacggagtagactccatcgattgcctctcctgcggctgccattttcgccaaaactcagattcgttttcgcagagctatttgttgtcaattcaattcaaactagagtgaccatgtatcgaaaagtatcgatctatcgattgttgctttttgaattcaaactaagggcaaaaacgtaaaataaatatttttaaattgaaagaagagctctagaacttaaagaactaacttggcaacaatgttaagaaaaactttagtgcaagatgaaggaattttatacttgacaatgctaatttttgtataaacttaattacgtaaagggtcctacaacccatatatatcattagttgttagaggctctttttaaggcgcttatataatcaaaccctttgtaaaaattaaagttttaaatggaattctaatcgatttatttcacattagctttatttaagtgtgacctacgcagaaagctagcgaaatactcatcaaccctcccccgccatcgcagcgccattctcctaatttgcgaaaaaagctccgggaaaaggaaaaagcggcagtcgtaatagcgaactgaaactgaacgagagtaaaagtgaaaagacagcaggaactcagccatgtcgaagatcggaattaacggatttggccgcatcggccgcttggtgctccgcgccgccatcgataagggcgcctccgtggtggccgtcaacgatcccttcatcgatgtcaactacatggtttacctgtttaaattcgactcgactcacggtcgtttcaagggcaccgttgcggctgagggcggattcctggtggtgaacggccagaagatcaccgtgttcagcgagcgcgacccggccaacatcaactgggccagtgctggagccgagtatgtggtggagtccaccggagtgttcaccaccattgacaaggcgtccacccacttgaagggcggcgccaagaaggtcatcatctcggccccatccgccgatgcgcccatgttcgtgtgcggcgttaacctggacgcctacagccccgacatgaacctggtctccaacgcctcgtgcaccaccaactgcctggctcccctggccgtcatcaatgacaacttcgagatcgtcgagggtctgatgaccaccgtgcacgccaccactgccacccagaagaccgtcgacggtccctctggcaaactgtggcgcgatggacgtggcgccgcccagaacatcatcccggccgccaccggagccgccaaggctgtgggcaaggtcatccccgccctgaacggcaagctgaccggcatggctttccgcgtgcccacgcccaatgtctccgttgtggatcttaccgtccgcttgggcaagggagccacctatgacgaaatcaaggctaaggtcgaggaggcctccaagggacccctgaagggaatcctgggctacaccgatgaggaggtggtctccaccgacttcttcagcgacacccattcgtctgtgttcgacgccaaggctggcatttcgctgaacgataagttcgtcaagctaatctcgtggtacgacaacgagttcggttactccaaccgcgtcatcgacctgatcaagtatatgcagagcaaggactaaactagccaaaactatcgtacaaacccggcgcccagcagctggtcgggaatcactgttgcataatccgcaaggggcgcaattgaggatgcttttttttcaaatgcacaaaatagccataattacgcaaagctacatatttattgttgttgaataaagtatcgccctgttactgtatttaaatgccagctatttgaaaaataaaacttgtgcatcgaatgaagaacgttgcttgtgtaagcccaagggcgtgtgaaggttatatcgggcggacttgctgagatatgcagtgaatacacaaataagtatctgtgcttcgcctgggagagtcatcccaatcccaaaggaacgatgtttctatttatgtacataccatatgtatgtatgtacgtttgttgttgccaactctggcagtctcgaaattcgaagataacgaacaaatatattctcttatcgctgcactttgaaacctgtgcggatgctgtttgtttgtctcggatttggattcttcggcaaaacaacataaatacacataacgaccaattgaactcagaccatataaactatatagcttatatatactttatactttttggtggataaagggtttgttttcatatatcgacctgcgttcttatacaaagcggctttcttatgagcataaccaaggtcacgaaaggtcatacacatatgcttgctgcttggtacatagcttatcggcattacagaattgaatcgattagcatcaaccagggctgcaaagagcgggatatttgaaaatgccgtcattctaaatttccaaatgctaagcttaagatatttttaaaaaatatgtagcttttattatttgagctatttctgttcaaattataaggcttaatagaatttccatttaacaatcataaaaatattgatggtaaatcaaatggaaaagtaatttcaacaaatcaaactctcagtattaatttgtatattatagaatgtaatatataaatacaataacaccactaaaaatgctcttcaccatattatatataattattgcatttagtaaagacaaaatatataaccatatctcagaagcatcatgcttttgataaaccaacaattgtaaatggcaaaatgcatcatatgggattcaccaaaatacttttgacttgcatgtcggcatacttc

SEQ ID NO: 1523 - DNA, 1254 bp, DROSOPHILA
ctccgggaaaaggaaaaagcggcagtcgtaatagcgaactgaaactgaacgagagtaaaagtgaaaagacagcaggaactcagccatgtcgaagatcggaattaacggatttggccgcatcggccgcttggtgctccgcgccgccatcgataagggcgcctccgtggtggccgtcaacgatcccttcatcgatgtcaactacatggtttacctgtttaaattcgactcgactcacggtcgtttcaagggcaccgttgcggctgagggcggattcctggtggtgaacggccagaagatcaccgtgttcagcgagcgcgacccggccaacatcaactgggccagtgctggagccgagtatgtggtggagtccaccggagtgttcaccaccattgacaaggcgtccacccacttgaagggcggcgccaagaaggtcatcatctcggccccatccgccgatgcgcccatgttcgtgtgcggcgttaacctggacgcctacagccccgacatgaacctggtctccaacgcctcgtgcaccaccaactgcctggctcccctggccgtcatcaatgacaacttcgagatcgtcgagggtctgatgaccaccgtgcacgccaccactgccacccagaagaccgtcgacggtccctctggcaaactgtggcgcgatggacgtggcgccgcccagaacatcatcccggccgccaccggagccgccaaggctgtgggcaaggtcatccccgccctgaacggcaagctgaccggcatggctttccgcgtgcccacgcccaatgtctccgttgtggatcttaccgtccgcttgggcaagggagccacctatgacgaaatcaaggctaaggtcgaggaggcctccaagggacccctgaagggaatcctgggctacaccgatgaggaggtggtctccaccgacttcttcagcgacacccattcgtctgtgttcgacgccaaggctggcatttcgctgaacgataagttcgtcaagctaatctcgtggtacgacaacgagttcggttactccaaccgcgtcatcgacctgatcaagtatatgcagagcaaggactaaactagccaaaactatcgtacaaacccggcgcccagcagctggtcgggaatcactgttgcataatccgcaaggggcgcaattgaggatgcttttttttcaaatgcacaaaatagccataattacgcaaagctacatatttattgttgttgaataaagtatcgccctgttactgt

SEQ ID NO: 1524 - protein, 331 aa, DROSOPHILA
MSKIGINGFGRIGRLVLRAAIDKGASVVAVNDPFIDVNYMVYLFKFDSTHGRFKGTVAAEGGFLVVNGQKITVFSERDPANINWASAGAEYVVESTGVFTTIDKASTHLKGGAKKVIISAPSADAPMFVCGVNLDAYSPDMNLVSNASCTTNCLAPLAVINDNFEIVEGLMTTVHATTATQKTVDGPSGKLWRDGRGAAQNIIPAATGAAKAVGKVIPALNGKLTGMAFRVPTPNVSVVDLTVRLGKGATYDEIKAKVEEASKGPLKGILGYTDEEVVSTDFFSDTHSSVFDAKAGISLNDKFVKLISWYDNEFGYSNRVIDLIKYMQSKD

SEQ ID NO: 1525 - DNA, 8807 bp, DROSOPHILA
cttattccttgttccaggctgccaggtatttcatgaggtccgtgagactctcgaaatcggtgcggctggctggtggttcgtccttggtgattcttggcagtgcattgcccatcttgaggcggaactcctggaactgcgaacgaaacgaaagatttaaagcgaaattcattgaacaaatcggaggcatgctcacatccttggctccggatagcttccagaagccgtagcagaaggcgccggtgcccatcacggcgtacagtgtgccccagcccagcgcccgcagggccagggtggcgccctcgtccatcaggatcatgccttgccgcgttccagcctgctggaggaccttgctatccgtcttcttggcggtggccagcgtgcgcgagaagccgaacagagcggacaccccgcccaccaaacccagaaaggcggcggctagaaaggaggatgaaatggagttgtacttcagtcagttgctggctgatatatatgcgtgtgtctgtatgtgtttggagaaccacctaccctggatgcggaacttgcgctccttctcggcggccactgcatccgcgctggtgccggcctcgctcatccttctcaattgcgatttattgttgtcgtaactactaatgcccgaattggatcgcacaacacagctgattgcttgaccgctcttgacaaccaacactggtgccgcagctgccactgccactgacgcgttcgcagaggtgctaagatggcgggagggaagctagaagtgaagtgctaaaagatagttcaaaatattcaacaggtactggcctttctcactgactatgagagtcaatttgattttaatgtgctgcatttaatttatttgttaaattactaactaatactaatagatatatttatataaaagatatagctaaaaaacgtcagtctggcaaccctgctacaacgaccgcaatatggtatggtatttcgccgctcgccctgcagtcacacttttcggtcggcgttgtccgcattttcacatcgcatcgcgtctgaaaaaacgggctaattcgcattcgcaatcgcctgtagggcccgactggtatagaatgcacgcccagcgtgccagcaacaaacagtgattgtttacccagccttctatttgggctttcgcgtttttcgagctccttcttttcccttcccggtcgtatcccttgccttttgcacgaggtgaaaagtgtgacgacgcagcagaaaaagcaaaagcaaaaaaaaggtggaacaaaaaaaaaccgcacacacacaccgaaagcaggctccactttggtctagtggccaccagtatcgctgacgaccaggatgagcacccccacggactcgaaggcgccgttgcgccaggtgaagcgcgtacagttcggcattttgtcccctgatgaaattgtaagtgcggctcacagattcattcgatcgacgccatattgaaaaattgaacaatattgtaaacgcaaaaatagcattccatcaattcgcaattcgtatatcgtggttttatatggtctatatgggaaatgcttatttcatgttcacatgcattccagtaacgcgagcaggacaacaaataacagatagttcaagtcctgtatctttaggatcttaagcgaaactcactaaatattcgattaactcgtaaaacccttgtatcagaaatgttttccagctgaatatcattacttctcaataaagtttatgaatatattacgtaaagaaattgtatatttgttattagtttcctgggaaagttccaagtcatagcaaaataaaacacaattataccctgcttagattttgggaacttggaatctattatttcgaatatcaagttattgatgcgtatatctaaagggttcaagacaagggaattcagatatatatattctatctatgatccttcaagcacctgttggccatatcaatatgacacgcactttaagaatttgactttatttgatccacatgtgttacttctttcctgcttgcagcgtcgcatgtccgtcaccgagggtggcgtccagtttgcggagacaatggagggcggacgaccaaagctgggcggattgatggatccgcgccagggtgtcatagacaggacgtcgcgctgtcagacgtgcgccggcaatatgaccgagtgccccggtcactttggacacatcgacctggccaaaccagtgttccacatcggcttcatcaccaagacaattaagattttgcgatgtgtgtgcttctactgctccaaaatgttggtctcgccacacaatccaaagatcaaggagatcgttatgaagtctaggggacagccgcgtaagcgcctggcctacgtctatgatctgtgcaagggcaagacgatttgcgagggcggcgaggacatggatctcaccaaggagaaccagcagccggatccaaacaaaaagcccggccacggcggttgcggtcactaccagccgtcgatccggagaacaggactggatctcaccgccgagtggaagcatcagaacgaggattcgcaggagaagaagatcgtggtctcggcagagcgggtttgggaaatccttaagcatatcaccgatgaggagtgctttattctgggcatggatcccaagtatgcgcgtcccgattggatgatcgtgaccgtcctgcctgttccaccgttggccgtacggccagcggtcgtgatgtttggtgctgccaagaatcaggatgatttgacgcacaagctgtccgatatcatcaaggcaaacaatgagcttcgcaagaacgaggccagtggtgccgcagcgcatgtgatccaggagaacatcaagatgctgcaattccacgtcgccacactagtggacaacgatatgcccggcatgcccagggctatgcaaaagtcgggaaaaccccttaaagccatcaaggcgcgactcaagggtaaggagggtaggattcgtggcaacttgatgggcaaacgtgtcgacttctccgcccgtactgtcatcacacccgatccaaatctgcgtatcgatcaggtcggtgtgccgcgttccattgcccagaatctaaccttccccgagctggtcactcccttcaacatcgatcgcatgcaggagctggtgcgcaggggtaattcgcagtatccgggtgccaagtacattgtgcgcgacaatggcgagcgtattgatcttcgctttcatcctaaatcctctgatttacatctgcagtgcggctacaaggtagagcggcatttgcgcgacgacgatctggtgatcttcaaccgacagcccacgctgcacaagatgagtatgatgggtcacagggtgaaagtgttgccctggtcgactttccgcatgaacctgtcgtgtacatcgccctacaatgctgatttcgacggcgatgaaatgaatttgcacgttccgcagtccatggagacgcgcgccgaggtggagaacatccacatcacacccagacagatcatcacgccgcaggcgaacaaacctgtcatgggtatcgtgcaggacactctgactgcggtgcgaaagatgaccaagcgcgacgtattcatcacgcgcgagcaggtgatgaatctgctcatgttcctgcccacgtgggacgctaaaatgccgcaaccctgcatcctgaaaccgcgtcccctgtggacgggcaaacagatcttctccctgatcatccccggcaacgtgaacatgatacgcacacattccacgcatccggacgaggaggatgaaggaccatacaagtggatctcgcccggtgacaccaaggtaatggtggagcacggtgaacttatcatggggatcctctgcaagaagtcactgggtacatcagccggatcactgctgcatatttgtttcctggaacttggtcacgatatcgctggtcggttctatggcaacattcagaccgtgatcaacaattggttgcttttcgagggccatagtatcggtattggtgacactattgccgatccccagacctacaacgagatccagcaggccatcaagaaggcaaaggacgacgtgataaacgttatccaaaaggcccacaacatggagctggagcccacgccgggtaatactctgcgtcagacgttcgagaacaaggtgaaccgtatcctaaacgatgctcgtgacaagactggtggttcggccaagaaatctctcactgagtacaacaatctaaaggctatggtggtgtctggttccaagggttccaacattaatatatcccaggtaagctactgactagcgattttcattcgaactcatttaatgtgctggcatttttatcttccaggttattgcttgtgtgggtcaacagaacgtggagggtaagcgaatcccctacggtttccgcaaacgcactcttccccactttattaaggacgattatggtcctgagtcgcgcggtttcgtggagaattcgtatcttgccggcctgacaccctctgagttctatttccacgctatgggtggtcgtgaaggtcttatcgatactgctgtaaagacagctgaaaccggttacatccagcgtcgtcttataaaggctatggagtcggtgatggttaactacgacggaacagtgcgtaactcggtgggccagcttattcagctgcgttacggcgaggacggtctttgcggcgagctggttgagttccagaacatgccaacggtgaaactgtcgaacaagtcgtttgaaaagcgcttcaaatttgactggagcaacgagcgattaatgaaaaaggtatttacggatgatgtgatcaaggagatgaccgacagcagcgaagccatccaggaactggaggcagagtgggatcgtttggtttccgatcgcgacagtttgagacaaatcttccctaacggcgaatccaaggtggtactgccgtgcaacctgcagcgtatgatctggaatgtgcagaagatctttcacatcaacaagcgcctgcccacggatctctcgcccattcgggtgatcaagggcgttaagacattgctcgaacgctgtgttattgtcacgggaaatgatcgaatttcaaagcaggccaacgagaacgccacgttgctattccagtgcctaatccgttcgacactatgtacgaaatacgtgtcggaggagttccgcctgtccacagaggcgtttgagtggttggtcggagaaatcgagacgcgtttccaacaggcccaggccaatcccggcgagatggtgggtgccctggctgcccagagtttgggtgagcccgctactcagatgacactgaacaccttccattttgctggtgtgtcttcaaagaacgtaacattgggtgtgccgcgtctcaaggagattatcaacatatccaaaaagcccaaagcgccgtcgctaaccgttttccttactggcggcgctgctcgcgatgcggagaaggccaagaacgtactgtgccgcctggagcataccacgctgcgcaaggttacggccaatacggctatttactacgacccggatccgcagagaacggtgatatccgaggatcaagaatttgtgaatgtctactacgaaatgcccgactttgatcccacacgcatttcgccctggttgctacgtattgaattggaccgcaagcggatgacggacaagaagctgacaatggaacagatcgccgagaagattaacgtgggcttcggggaggatctcaattgtattttcaatgacgacaatgccgataagctggtgctgcgcattaggatcatgaacaacgaagagaacaagttccaggacgaagacgaggccgtcgacaagatggaggacgacatgttcttgcgctgcattgaggccaacatgctgtcggacatgacactgcagggtatcgaagccatcggcaaggtgtacatgcatctgccacagaccgacagcaagaagcgtatcgtgatcactgagaccggagagtttaaggccatcggcgagtggctgctcgagacggacggcacatcgatgatgaaagtgctgtctgagcgtgacgtggacccaatccgaacatcctccaacgatatttgcgagatattccaggtgctgggcatcgaggcggtgcgaaagtctgtcgaaaaggagatgaacgccgtgttgcagttctacggcctgtacgtgaactatcgtcacttggccctgttgtgcgatgtgatgacggccaagggccatctgatggccatcacccgtcacggcattaacaggcaagacactggtgcccttatgcgttgctcctttgaggagacagtggatgtgctaatggatgccgccgctcacgccgaaacggatcccatgaggggcgtctctgagaacattatcatgggacagctgcccaaaatgggtaccggctgctttgaccttctgctcgatgcagagaagtgtcgtttcggcatcgagattcccaatacgttgggcaacagtatgctaggtggcgccgctatgttcattggcggtggatcgacaccgagcatgacgccaccgatgacgccgtgggctaactgcaacacgccgcgatacttctctccacccggccacggtaagtaaatctatccattatgggtttttgattttactctcgactcagcaacgctatatcttttgttaattaacttttttgatgcgattgcctaatatattcaatctctttctttcttgtgcttgcagtaagtgccatgactcctggcggtcccagtttctcgccttcggctgcatcggatgcgtccggaatgtcgcctagctggtcgccggctcatccgggctcatcgcccagttcaccaggaccttcgatgtcgccgtatttcccagcctcgccgagtgtttctccctcttattcgccaacgagtccgaactacacggcatcttctcccggtggagcctcgccgaattactcgccctcgagtccgaactattcgccgacgtcgccgctttatgcaagtccacgttacgcatcgacaacgccaaatttcaatccacagtcgacgggttactcgccatcttcatcgggatactcgccaacatccccggtctactcgcccacggtgcaattccagtcgagtccgtcgtttgcgggcagcggtagcaacatttactcgccgggcaatgcgtactcgcccagctcgtccaactactcccccaattcaccatcctactcgccgacatcaccatcgtactcgccgtcaagtccttcgtactcgccaacgtcgccttgctattcgcccacatcgccttcgtactcgccaacgagtccgaactacacacccgtaacaccctcatactcgccgacaagtccgaactattcagcgtcgccgcaatattctccagcctcgccagcttactcgcaaacgggggtgaagtactcaccgacatcgccgacgtactcgccgccgtcaccatcgtacgatgggtctcccggatcaccacaatatacgccaggatctccgcagtactcgccggcctcgcctaagtactcgccgacctcaccgctgtactcgcccagctcgccgcagcactcgccctcaaaccagtacagcccaacaggatcgacctattcggcgacgagtccgcggtactcgccgaacatgtccatctactcgccgagcagcaccaagtactcgcccacctcgccaacgtacacaccgacggcccgcaactactcgcccacgtcaccgatgtactcgccaacggctccatcgcactacagtcccacgagtccggcctactcgcccagcagtcccacgttcgaggagagcgaagactgaggaagggaggacgggggtagctcccccagcacgtcccgatctccggggcggtcaagccgtagttaagtaccgactacgctcgatcgcccgaacgggaaaggtgaatttaataatattatgtttgtatacagcaaataggtctctcatacaaaattcaatactgtttgcaaaagtagctttaaacaagttgtataaattagcctacagtttcgtatttggttttgtggtaaagtaaacattttgaattgtttgcgttaaccagaaaagcgaattcgaagccatttatatttgcacaaattgtttcaagttgcaattctcgaactgtattcgataatgcgaatctatttctttgcacaacccactgtatgaaattgtttactaactggaagactcttgtcactcttctgcaaagtactttcacatttttttgaatatccctattcttattttgcctaatgttagtataaagaccctagttattaaaaacaacaacaaaacaagccaacgtcagacactatttgtagcgttttccatataccctttaaatccctaattaacccgatcagttgttttcgcctgcacacaaatgttacttataaagcataagaatgcaggcacccacccatacactacactatatattcatatatatttttacgtccgacacatttttgtaaattatgacagaaaacaaaatagaaaattataaaataaaaaccacaaaaaaatactcaacaacattggtttatttactttactaaactgatatgctcattctggcagactactgcaattacttgtagttgatttagggatttgagagccagtgcggccactcttggatctcgttgtatagagtcagtccgggactctgggtgctgatcacctgggagccggcgatcagggcgtaatcctcgctcagctcaccctgctgcactccgcaggccagcagatctttggccgcctggagagccgcatccgatggaagtttatctatcggagatgttgggcatgtag

SEQ ID NO: 1526 - DNA, 6016 bp, DROSOPHILA
ttgtccgcattttcacatcgcatcgcgtctgaaaaaacgggctaattcgcattcgcaatcgcctgtagggcccgactggtatagaatgcacgcccagcgtgccagcaacaaacagtgattgtttacccagccttctatttgggctttcgcgtttttcgagctccttcttttcccttcccggtcgtatcccttgccttttgcacgaggtgaaaagtgtgacgacgcagcagaaaaagcaaaagcaaaaaaaaggtggaacaaaaaaaaaccgcacacacacaccgaaagcaggctccactttggtctagtggccaccagtatcgctgacgaccaggatgagcacccccacggactcgaaggcgccgttgcgccaggtgaagcgcgtacagttcggcattttgtcccctgatgaaattcgtcgcatgtccgtcaccgagggtggcgtccagtttgcggagacaatggagggcggacgaccaaagctgggcggattgatggatccgcgccagggtgtcatagacaggacgtcgcgctgtcagacgtgcgccggcaatatgaccgagtgccccggtcactttggacacatcgacctggccaaaccagtgttccacatcggcttcatcaccaagacaattaagattttgcgatgtgtgtgcttctactgctccaaaatgttggtctcgccacacaatccaaagatcaaggagatcgttatgaagtctaggggacagccgcgtaagcgcctggcctacgtctatgatctgtgcaagggcaagacgatttgcgagggcggcgaggacatggatctcaccaaggagaaccagcagccggatccaaacaaaaagcccggccacggcggttgcggtcactaccagccgtcgatccggagaacaggactggatctcaccgccgagtggaagcatcagaacgaggattcgcaggagaagaagatcgtggtctcggcagagcgggtttgggaaatccttaagcatatcaccgatgaggagtgctttattctgggcatggatcccaagtatgcgcgtcccgattggatgatcgtgaccgtcctgcctgttccaccgttggccgtacggccagcggtcgtgatgtttggtgctgccaagaatcaggatgatttgacgcacaagctgtccgatatcatcaaggcaaacaatgagcttcgcaagaacgaggccagtggtgccgcagcgcatgtgatccaggagaacatcaagatgctgcaattccacgtcgccacactagtggacaacgatatgcccggcatgcccagggctatgcaaaagtcgggaaaaccccttaaagccatcaaggcgcgactcaagggtaaggagggtaggattcgtggcaacttgatgggcaaacgtgtcgacttctccgcccgtactgtcatcacacccgatccaaatctgcgtatcgatcaggtcggtgtgccgcgttccattgcccagaatctaaccttccccgagctggtcactcccttcaacatcgatcgcatgcaggagctggtgcgcaggggtaattcgcagtatccgggtgccaagtacattgtgcgcgacaatggcgagcgtattgatcttcgctttcatcctaaatcctctgatttacatctgcagtgcggctacaaggtagagcggcatttgcgcgacgacgatctggtgatcttcaaccgacagcccacgctgcacaagatgagtatgatgggtcacagggtgaaagtgttgccctggtcgactttccgcatgaacctgtcgtgtacatcgccctacaatgctgatttcgacggcgatgaaatgaatttgcacgttccgcagtccatggagacgcgcgccgaggtggagaacatccacatcacacccagacagatcatcacgccgcaggcgaacaaacctgtcatgggtatcgtgcaggacactctgactgcggtgcgaaagatgaccaagcgcgacgtattcatcacgcgcgagcaggtgatgaatctgctcatgttcctgcccacgtgggacgctaaaatgccgcaaccctgcatcctgaaaccgcgtcccctgtggacgggcaaacagatcttctccctgatcatccccggcaacgtgaacatgatacgcacacattccacgcatccggacgaggaggatgaaggaccatacaagtggatctcgcccggtgacaccaaggtaatggtggagcacggtgaacttatcatggggatcctctgcaagaagtcactgggtacatcagccggatcactgctgcatatttgtttcctggaacttggtcacgatatcgctggtcggttctatggcaacattcagaccgtgatcaacaattggttgcttttcgagggccatagtatcggtattggtgacactattgccgatccccagacctacaacgagatccagcaggccatcaagaaggcaaaggacgacgtgataaacgttatccaaaaggcccacaacatggagctggagcccacgccgggtaatactctgcgtcagacgttcgagaacaaggtgaaccgtatcctaaacgatgctcgtgacaagactggtggttcggccaagaaatctctcactgagtacaacaatctaaaggctatggtggtgtctggttccaagggttccaacattaatatatcccaggttattgcttgtgtgggtcaacagaacgtggagggtaagcgaatcccctacggtttccgcaaacgcactcttccccactttattaaggacgattatggtcctgagtcgcgcggtttcgtggagaattcgtatcttgccggcctgacaccctctgagttctatttccacgctatgggtggtcgtgaaggtcttatcgatactgctgtaaagacagctgaaaccggttacatccagcgtcgtcttataaaggctatggagtcggtgatggttaactacgacggaacagtgcgtaactcggtgggccagcttattcagctgcgttacggcgaggacggtctttgcggcgagctggttgagttccagaacatgccaacggtgaaactgtcgaacaagtcgtttgaaaagcgcttcaaatttgactggagcaacgagcgattaatgaaaaaggtatttacggatgatgtgatcaaggagatgaccgacagcagcgaagccatccaggaactggaggcagagtgggatcgtttggtttccgatcgcgacagtttgagacaaatcttccctaacggcgaatccaaggtggtactgccgtgcaacctgcagcgtatgatctggaatgtgcagaagatctttcacatcaacaagcgcctgcccacggatctctcgcccattcgggtgatcaagggcgttaagacattgctcgaacgctgtgttattgtcacgggaaatgatcgaatttcaaagcaggccaacgagaacgccacgttgctattccagtgcctaatccgttcgacactatgtacgaaatacgtgtcggaggagttccgcctgtccacagaggcgtttgagtggttggtcggagaaatcgagacgcgtttccaacaggcccaggccaatcccggcgagatggtgggtgccctggctgcccagagtttgggtgagcccgctactcagatgacactgaacaccttccattttgctggtgtgtcttcaaagaacgtaacattgggtgtgccgcgtctcaaggagattatcaacatatccaaaaagcccaaagcgccgtcgctaaccgttttccttactggcggcgctgctcgcgatgcggagaaggccaagaacgtactgtgccgcctggagcataccacgctgcgcaaggttacggccaatacggctatttactacgacccggatccgcagagaacggtgatatccgaggatcaagaatttgtgaatgtctactacgaaatgcccgactttgatcccacacgcatttcgccctggttgctacgtattgaattggaccgcaagcggatgacggacaagaagctgacaatggaacagatcgccgagaagattaacgtgggcttcggggaggatctcaattgtattttcaatgacgacaatgccgataagctggtgctgcgcattaggatcatgaacaacgaagagaacaagttccaggacgaagacgaggccgtcgacaagatggaggacgacatgttcttgcgctgcattgaggccaacatgctgtcggacatgacactgcagggtatcgaagccatcggcaaggtgtacatgcatctgccacagaccgacagcaagaagcgtatcgtgatcactgagaccggagagtttaaggccatcggcgagtggctgctcgagacggacggcacatcgatgatgaaagtgctgtctgagcgtgacgtggacccaatccgaacatcctccaacgatatttgcgagatattccaggtgctgggcatcgaggcggtgcgaaagtctgtcgaaaaggagatgaacgccgtgttgcagttctacggcctgtacgtgaactatcgtcacttggccctgttgtgcgatgtgatgacggccaagggccatctgatggccatcacccgtcacggcattaacaggcaagacactggtgcccttatgcgttgctcctttgaggagacagtggatgtgctaatggatgccgccgctcacgccgaaacggatcccatgaggggcgtctctgagaacattatcatgggacagctgcccaaaatgggtaccggctgctttgaccttctgctcgatgcagagaagtgtcgtttcggcatcgagattcccaatacgttgggcaacagtatgctaggtggcgccgctatgttcattggcggtggatcgacaccgagcatgacgccaccgatgacgccgtgggctaactgcaacacgccgcgatacttctctccacccggccacgtaagtgccatgactcctggcggtcccagtttctcgccttcggctgcatcggatgcgtccggaatgtcgcctagctggtcgccggctcatccgggctcatcgcccagttcaccaggaccttcgatgtcgccgtatttcccagcctcgccgagtgtttctccctcttattcgccaacgagtccgaactacacggcatcttctcccggtggagcctcgccgaattactcgccctcgagtccgaactattcgccgacgtcgccgctttatgcaagtccacgttacgcatcgacaacgccaaatttcaatccacagtcgacgggttactcgccatcttcatcgggatactcgccaacatccccggtctactcgcccacggtgcaattccagtcgagtccgtcgtttgcgggcagcggtagcaacatttactcgccgggcaatgcgtactcgcccagctcgtccaactactcccccaattcaccatcctactcgccgacatcaccatcgtactcgccgtcaagtccttcgtactcgccaacgtcgccttgctattcgcccacatcgccttcgtactcgccaacgagtccgaactacacacccgtaacaccctcatactcgccgacaagtccgaactattcagcgtcgccgcaatattctccagcctcgccagcttactcgcaaacgggggtgaagtactcaccgacatcgccgacgtactcgccgccgtcaccatcgtacgatgggtctcccggatcaccacaatatacgccaggatctccgcagtactcgccggcctcgcctaagtactcgccgacctcaccgctgtactcgcccagctcgccgcagcactcgccctcaaaccagtacagcccaacaggatcgacctattcggcgacgagtccgcggtactcgccgaacatgtccatctactcgccgagcagcaccaagtactcgcccacctcgccaacgtacacaccgacggcccgcaactactcgcccacgtcaccgatgtactcgccaacggctccatcgcactacagtcccacgagtccggcctactcgcccagcagtcccacgttcgaggagagcgaagactgaggaagggaggacggggg

SEQ ID NO: 1527 - protein, 1887 aa, DROSOPHILA
MSTPTDSKAPLRQVKRVQFGILSPDEIRRMSVTEGGVQFAETMEGGRPKLGGLMDPRQGVIDRTSRCQTCAGNMTECPGHFGHIDLAKPVFHIGFITKTIKILRCVCFYCSKMLVSPHNPKIKEIVMKSRGQPRKRLAYVYDLCKGKTICEGGEDMDLTKENQQPDPNKKPGHGGCGHYQPSIRRTGLDLTAEWKHQNEDSQEKKIVVSAERVWEILKHITDEECFILGMDPKYARPDWMIVTVLPVPPLAVRPAVVMFGAAKNQDDLTHKLSDIIKANNELRKNEASGAAAHVIQENIKMLQFHVATLVDNDMPGMPRAMQKSGKPLKAIKARLKGKEGRIRGNLMGKRVDFSARTVITPDPNLRIDQVGVPRSIAQNLTFPELVTPFNIDRMQELVRRGNSQYPGAKYIVRDNGERIDLRFHPKSSDLHLQCGYKVERHLRDDDLVIFNRQPTLHKMSMMGHRVKVLPWSTFRMNLSCTSPYNADFDGDEMNLHVPQSMETRAEVENIHITPRQIITPQANKPVMGIVQDTLTAVRKMTKRDVFITREQVMNLLMFLPTWDAKMPQPCILKPRPLWTGKQIFSLIIPGNVNMIRTHSTHPDEEDEGPYKWISPGDTKVMVEHGELIMGILCKKSLGTSAGSLLHICFLELGHDIAGRFYGNIQTVINNWLLFEGHSIGIGDTIADPQTYNEIQQAIKKAKDDVINVIQKAHNMELEPTPGNTLRQTFENKVNRILNDARDKTGGSAKKSLTEYNNLKAMVVSGSKGSNINISQVIACVGQQNVEGKRIPYGFRKRTLPHFIKDDYGPESRGFVENSYLAGLTPSEFYFHAMGGREGLIDTAVKTAETGYIQRRLIKAMESVMVNYDGTVRNSVGQLIQLRYGEDGLCGELVEFQNMPTVKLSNKSFEKRFKFDWSNERLMKKVFTDDVIKEMTDSSEAIQELEAEWDRLVSDRDSLRQIFPNGESKVVLPCNLQRMIWNVQKIFHINKRLPTDLSPIRVIKGVKTLLERCVIVTGNDRISKQANENATLLFQCLIRSTLCTKYVSEEFRLSTEAFEWLVGEIETRFQQAQANPGEMVGALAAQSLGEPATQMTLNTFHFAGVSSKNVTLGVPRLKEIINISKKPKAPSLTVFLTGGAARDAEKAKNVLCRLEHTTLRKVTANTAIYYDPDPQRTVISEDQEFVNVYYEMPDFDPTRISPWLLRIELDRKRMTDKKLTMEQIAEKINVGFGEDLNCIFNDDNADKLVLRIRIMNNEENKFQDEDEAVDKMEDDMFLRCIEANMLSDMTLQGIEAIGKVYMHLPQTDSKKRIVITETGEFKAIGEWLLETDGTSMMKVLSERDVDPIRTSSNDICEIFQVLGIEAVRKSVEKEMNAVLQFYGLYVNYRHLALLCDVMTAKGHLMAITRHGINRQDTGALMRCSFEETVDVLMDAAAHAETDPMRGVSENIIMGQLPKMGTGCFDLLLDAEKCRFGIEIPNTLGNSMLGGAAMFIGGGSTPSMTPPMTPWANCNTPRYFSPPGHVSAMTPGGPSFSPSAASDASGMSPSWSPAHPGSSPSSPGPSMSPYFPASPSVSPSYSPTSPNYTASSPGGASPNYSPSSPNYSPTSPLYASPRYASTTPNFNPQSTGYSPSSSGYSPTSPVYSPTVQFQSSPSFAGSGSNIYSPGNAYSPSSSNYSPNSPSYSPTSPSYSPSSPSYSPTSPCYSPTSPSYSPTSPNYTPVTPSYSPTSPNYSASPQYSPASPAYSQTGVKYSPTSPTYSPPSPSYDGSPGSPQYTPGSPQYSPASPKYSPTSPLYSPSSPQHSPSNQYSPTGSTYSATSPRYSPNMSIYSPSSTKYSPTSPTYTPTARNYSPTSPMYSPTAPSHYSPTSPAYSPSSPTFEESED

SEQ ID NO: 1528 - DNA, 3418 bp, DROSOPHILA
tgccaacatgtatacggtgcaacagcctacggttaactacatttatcctactggctacagtctgaacagcatccagcagcatcagcagcagcaactgctgggtaagcccagtcaagcacccacgctccagccgcagacacagccgctcctgccaactgataaccagaacctcaacgcactttcccagcaagacatacttaactttttgaactagacacagccgtagttaataacaattgatagatatccatgttccatacatccgatatacaaagcaactatatttagctgtcggcgtcgatttatgtggcacaaaattctaagcgtcagtaatcattggtattaccatttttgctggcaatatcactcgattacctttttcgattagaacttgtgttgatacattggacgctgacacatatatttatacataaaatctaatctgtgcaagtgtatgagtgtgtcagtcttaatgtgtgcgtgtttgttagtaatgttttaaattatattatgtagacttaaacgcaaggcttttgagcccttgctcgttgccacattccgcaatcgatatcaaatgtgaaacgaaacgaccgcatgtagttaaatataatagtacattagctagacaaaatagccaactaactatgttctgacgtattttttacaaagcatatttaattcactttcacgcatgagttcttattgtaattctacgcaaatccaattactaagacacgaaattgtacagacatatatagttttatttatcttttattttaacgtcatgtatttttgtttattcaaaataaaggtttgttccttgagttttaattttattaataaaatacaaaatattaatgtgatttgatagtttcatggtgcaataaactaattaaaaacaatgcttgacaggttctttaaataaggtggcattcaaataataataaattataatggtaaatatcacattgaatccatagtactgactttactaatccctttaatttccttttacggacttcaatccctcttcgggcaattttactttggcaacatagtgattgaaaggcgatcccagatataagtgacccttaacttccagcacgtgggatatgcccgaagctgatctgtcaaacccatgcagggatctcacaatgtttccattccaatccacacgcaccacagtgctacgcttgggagcgttcctgatgaccaaatcgttaaaggagtgaaaaagacgagccgcaatgtcatttggatatatatggttcagaactcgaaggggaagtcgcattagagccaccaaacgagccaaaaaagatctaagcctcggatagggcgccaacacggcgaacaaattgggattctgactatctgaagccacagacaggggcacccagattccctcttcatccgcagtgaggttatccgggcagccgggcaaaccctccacaaacacttcgctttcaccggctcttgatcctttgagataatatctcctcagccgcatggccgttgtttcggcaaggataatgaaatcctcactgggacttaaggccaagccgttggcaaaggacaactcatcgagcagtacctcgtttgtcttctttacgcgatcgtacctgaaaagtctgaggaaagccaataaacccttcttatatggtagatctctccttagttcgaactcaccgacccgacgggttggcgaacgcagcaaagacaaagtcctctgaaaaggaatccgtccagaatatgtcaccctggcggctaattaccagcgaattgaacagcttagcccgacggtttgcacccttgccaggaaggatctgctccgccggcaccagcacagtcttcttcttcgtttccaagtcgacttgccatatgccgtagtatgcatcggatacaataagattgtttccctgggtgtccagggctaaacccactggatagccgcacaactcatcgtcaaatatataatctacggtgaatatcaagggcattatggatacaagttgcccctactcctttgttaccacaaggttgccctatttttgtgataggttgaaccgactcctcattgtttagtcgaataacctcgccgctgtgaattcctgtgtaaatcttgtcctcgagtactatgaggcactcgggtccaaatatttgatctttccacaacttccgggcgccatttaagtgattgttcagctccagcgttccattcagatctctagctggctttatactgggaaacgcacgtatatagattatatggcttgatagcaactgaagaaaaacaacttacaaatactgttcgaaggggaaagtggtgctaggatataagacaggtagcagaaacaaggaccccaggaataggaccaaaaacaggctggttttaagcaatgcagcaagaaaacccattattattgactgcggtaacaaagttcaattgtcaaggtattgtcataatgattagtttgatttcgaattggtcgatatatatgtaccctgctgattggagcttttaaagttaatcaacaaaccattagattaaattcaatacatttttattggcagaggcagagcgtgcttaacatgtcgatatccgcttaatctgaggcttctgcattgtacttcaattacagctttgactcctccattcccgtctagcttcttagcctagtgagtgagatatcacgatcgattcggaacgcattgtctaaggcggtaactaatcggttgcgaagcgaagtgcagccaagtataaaacacttcgagataccgactacgaaaacgattggcctacaagctaaatacaataacaaatactggcactcaggtatcaaccaggatgtgcgtgaacaaactgtgcattcgccgctccatttccgtgtacaccagtgagttgagtccatccgcgtgctggcgcagagtcgccgatctcagcagtgccacgcgattggcattcggctgctcctgtttgtgcttcagcatggtgtacttactgaactccattgcgaatcggcaaatgtcgatattcagggcctgcaggcgctcgtagaggtcatcgtcctctccgccccagccgtaatacagattggacatgccgttgatctgctggtactgggcggtgttgatggccaccacgccgccgaaaagaccgcggtaaggcagtcggaatcgccagtgatccagggcagagctcatgtgccgtggacgttcggagcaggcatatatttgacccgaattcagtggcaggaggtccacgtcatgaaggatgaggcagggaaatccatactccgcagccacctgggcgccaatgttgaagagcatcgccctgttaaacggcttatgatcgaactgttcgaccaggaaaatccgatagtggatcagctgctgcggcaggtaattgtgcatgtac

SEQ ID NO: 1529 - DNA, 1236 bp, DROSOPHILA
atgggttttcttgctgcattgcttaaaaccagcctgtttttggtcctattcctggggtccttgtttctgctacctgtcttatatcctagcaccactttccccttcgaacagtattttataaagccagctagagatctgaatggaacgctggagctgaacaatcacttaaatggcgcccggaagttgtggaaagatcaaatatttggacccgagtgcctcatagtactcgaggacaagatttacacaggaattcacagcggcgaggttattcgactaaacaatgaggagtcggttcaacctatcacaaaaatagggcaaccttgtgattatatatttgacgatgagttgtgcggctatccagtgggtttagccctggacacccagggaaacaatcttattgtatccgatgcatactacggcatatggcaagtcgacttggaaacgaagaagaagactgtgctggtgccggcggagcagatccttcctggcaagggtgcaaaccgtcgggctaagctgttcaattcgctggtaattagccgccagggtgacatattctggacggattccttttcagaggactttgtctttgctgcgttcgccaacccgtcgggtcggtacgatcgcgtaaagaagacaaacgaggtactgctcgatgagttgtcctttgccaacggcttggccttaagtcccagtgaggatttcattatccttgccgaaacaacggccatgcggctgaggagatattatctcaaaggatcaagagccggtgaaagcgaagtgtttgtggagggtttgcccggctgcccggataacctcactgcggatgaagagggaatctgggtgcccctgtctgtggcttcagatagtcagaatcccaatttgttcgccgtgttggcgccctatccgaggcttagatcttttttggctcgtttggtggctctaatgcgacttccccttcgagttctgaaccatatatatccaaatgacattgcggctcgtctttttcactcctttaacgatttggtcatcaggaacgctcccaagcgtagcactgtggtgcgtgtggattggaatggaaacattgtgagatccctgcatgggtttgacagatcagcttcgggcatatcccacgtgctggaagttaagggtcacttatatctgggatcgcctttcaatcactatgttgccaaagtaaaattgcccgaagagggattgaagtccgtaaaaggaaattaa

SEQ ID NO: 1530 - protein, 411 aa, DROSOPHILA
MGFLAALLKTSLFLVLFLGSLFLLPVLYPSTTFPFEQYFIKPARDLNGTLELNNHLNGARKLWKDQIFGPECLIVLEDKIYTGIHSGEVIRLNNEESVQPITKIGQPCDYIFDDELCGYPVGLALDTQGNNLIVSDAYYGIWQVDLETKKKTVLVPAEQILPGKGANRRAKLFNSLVISRQGDIFWTDSFSEDFVFAAFANPSGRYDRVKKTNEVLLDELSFANGLALSPSEDFIILAETTAMRLRRYYLKGSRAGESEVFVEGLPGCPDNLTADEEGIWVPLSVASDSQNPNLFAVLAPYPRLRSFLARLVALMRLPLRVLNHIYPNDIAARLFHSFNDLVIRNAPKRSTVVRVDWNGNIVRSLHGFDRSASGISHVLEVKGHLYLGSPFNHYVAKVKLPEEGLKSVKGN

SEQ ID NO: 1531 - DNA, 4044 bp, DROSOPHILA
cgccgtaaactgcaccatgcacttgtcccacttccgcatgtcccacaactggacagttccattctcggagacggcggagaatatgttttgtgtgtgtggactgaacttgacatcccgcactgattccgagttgcagaagtaggtgttgattgacttatccgatcggatgtcgaaacacttgatggtgccatcctgagaaccggagatcaggatgttgggctcgctgctgtgaaaggtcacggtatgagcggtgcgctcatgttcgttgtagacaagcagctgcttctgcctgccgaacttggagagatcccacacggaaaccactccgttcgtggccgccgtagccaaaagattgctatccaaggtggaccaggccacatcgttggcggagtagctaagattctggttctttccgcgcatattacacgattccgtgaagccattgctgtttatggagtacaccttaagcactgttcggaagcaaattatgtgtatttatagaaagaccttgggcaattctaatcttacagcttcttccggccaaagcaatctggttgttgtccttattcagggccagggcgttcgcgtgtccttccaggcatatccgcagcgagattgtggaggtgtcctccacggaatcgggcatcctgcagcagttgcaagttcgcccgcagaaagcaaaacagtgatttgataagacaagacgctatcttttattttcctttcggttcagtatgaccgtttctcgagcggcaaaccattggcgcgagtgttcccaaatgcagatgttgaatattgtttgaacaaaagacttattgtactaaagttgtattattcacatataattaatgtattctatacatatacagacagaaacattaatttcaattaagctattaaattctttgaaacttcttggaacactccaataagatctgccagttggagcgcgtcgttgccggaccatccacaccgacggagtggcaacgccattcgtgcggccttgctgtttacaaaaatcacggtcgactttttcgacaatttcatttaccagcgcaacaagtggccgcaagaaagcaggagagtggagccgggtgatcctgatcccttccagaaatgccggacatcaagataacgcccttgggcgccggccaggatgtgggccgcagctgtctgctgctctcgatgggcgggaagaacataatgctcgactgcgggatgcatatgggctacaacgacgagcgccgcttcccggacttctcctacatagtgccggagggtccgatcaccagccacattgactgtgtgatcatctcgcacttccacctgggtgagtctcggcctcccaaaggcgctcttatctggtcaactggctctaatcgtttctttatcgattgcatgcattccagatcactgcggggccttgccctacatgtcagagattgtgggctacacggggcccatctacatgacgcatccgaccaaggccatagcacccatcctcctggaggacatgcggaaggtggccgtagagcggaaaggcgagtcgaacttctttaccacccagatgatcaaggactgcatgaagaaggtgattcccgtcacacttcaccagagtatgatggtggacacggaccttgagatcaaagcctactatgcaggccatgtcctgggcgccgccatgttctggatcaaggtgggctcccagagcgttgtctacacgggggactacaacatgactccagacaggcatctgggagccgcctggatagacaagtgccggccggacttgctgatctccgagagcacctacgccactaccattagggactcgaagcggtgtcgcgagagggacttcctcaagaaagttcacgagtgcgtggctaagggcggcaaggttttaatccctgtttttgccctgggtcgcgcccaggagctgtgcatcctgctggagacgtactgggagcgcatgaacctcaagtaccccatatactttgctctgggtcttaccgagaaggccaatacctactacaaaatgttcatcacctggacgaaccagaagatccgcaagaccttcgttcaccgcaacatgttcgacttcaagcacatcaagccctttgacaaggcctacatcgacaatcctggcgcgatggtagtgttcgccacgccaggcatgctgcacgcaggtctttccctgcagatcttcaagaagtgggcgccgaatgagaacaacatggtgattatgcccggctactgtgtgcagggaaccgtgggcaacaagattctcggtggcgccaagaaggtggagttcgagaaccgccaggtggtcgaggtcaaaatggccgtggagtacatgagcttctcggcccatgcagatgccaaaggtggctacaagcttagcacttttatgctgatactaattaattttctgtattgcaggcattatgcagctaattcagaactgtgagccaaagaacgtcatgctcgtccatggtgaagcagggaagatgaagttcctgcgctcgaagatcaaagacgaattcaacctggaaacctacatgccggccaacggcgaaacctgtgtgatttctacgcctgtgaagataccagtagatgcgtccgtttccctgcttaaagcagaggcccggtcctacaacgcccagccaccggatcccaagaggcggcgactaatccatggcgtcctcgtaatgaaggacaatcgaataatgctgcaaaacctaaccgatgccctgaaggaaatcggaattaatcgacatgttatgcgatttacatccaaggtcaaaatggacgactccggaccggtcattcgcacaagcgaaagactgaagactctgctcgaagaaaagctagccggctggacggtgacgatgcaggagaacggctccatagccatcgaatccgttgaggtgaaggtggaggaggacgagaaggatcccaagcagaagaacattttgatatcgtggaccaaccaggacgaggacattggagcctacatactgaatgtgctgcagaatatgtgctaggcaacgaagaagcatcccattgaaatcccacgccttaattccatagataagcacaaagtgtagataccaccaatttctgaaagtttaaagagtatcaaaatatacataaacgttccaatagttttttggtcattagtcattgccacttgaaatttgagactttatgcacattaagttatatcaatgggtctttgcataagaatgcaatcgaatcccatgatatcaatgtgtaaaaaccaaacagacctgtgcaagtgctttcaaattccttgcctcccactccaattaggtaaggactccatggttaaagttattttcgttcgttccacgctatttattctggggtttttctgaaagagtaacattactagggctccaggcgtagctccaggtgcctggcaccatatgcaattagctgtatgaatcgttagagctgttcgaacacattccattcgcttatgtgagggcggcggcaccggagatgatttcaatcagctcgcgagtgatgaccgcctgtcgggtacggttgaaggtgagggtcagcttgtcgatcatctcaccggcgttcttggaagcgttgtccatggcagtcatacgggaggactgctccgagcaggcgccctccttcatggtgtagaagatgagcgaggccagcgagaactccagatagctcttgaccacgtcgctgtcgagcgagtcgtagacggccagcttctccgacttctccacggtggatccgctgaagatggggagggtggagcactggtaggacaccaccgacttgaaacggttgtacacgatcttgccctcggtgtaatcgtaaccggtctgcagaacctcgttggcaatcttcgaggcgtccaggaaagtggggggcagtcggcccacctcgttggccaccatcaggatgttcttgccgtacagacgggacagaatcgcgcgcgacttgtcgcccacgcagaacaccttagtgttggcctcgtcctgggccagttcgccg

SEQ ID NO: 1532 - DNA, 1910 bp, DROSOPHILA
gccttgctgtttacaaaaatcacggtcgactttttcgacaatttcatttaccagcgcaacaagtggccgcaagaaagcaggagagtggagccgggtgatcctgatcccttccagaaatgccggacatcaagataacgcccttgggcgccggccaggatgtgggccgcagctgtctgctgctctcgatgggcgggaagaacataatgctcgactgcgggatgcatatgggctacaacgacgagcgccgcttcccggacttctcctacatagtgccggagggtccgatcaccagccacattgactgtgtgatcatctcgcacttccacctggatcactgcggggccttgccctacatgtcagagattgtgggctacacggggcccatctacatgacgcatccgaccaaggccatagcacccatcctcctggaggacatgcggaaggtggccgtagagcggaaaggcgagtcgaacttctttaccacccagatgatcaaggactgcatgaagaaggtgattcccgtcacacttcaccagagtatgatggtggacacggaccttgagatcaaagcctactatgcaggccatgtcctgggcgccgccatgttctggatcaaggtgggctcccagagcgttgtctacacgggggactacaacatgactccagacaggcatctgggagccgcctggatagacaagtgccggccggacttgctgatctccgagagcacctacgccactaccattagggactcgaagcggtgtcgcgagagggacttcctcaagaaagttcacgagtgcgtggctaagggcggcaaggttttaatccctgtttttgccctgggtcgcgcccaggagctgtgcatcctgctggagacgtactgggagcgcatgaacctcaagtaccccatatactttgctctgggtcttaccgagaaggccaatacctactacaaaatgttcatcacctggacgaaccagaagatccgcaagaccttcgttcaccgcaacatgttcgacttcaagcacatcaagccctttgacaaggcctacatcgacaatcctggcgcgatggtagtgttcgccacgccaggcatgctgcacgcaggtctttccctgcagatcttcaagaagtgggcgccgaatgagaacaacatggtgattatgcccggctactgtgtgcagggaaccgtgggcaacaagattctcggtggcgccaagaaggtggagttcgagaaccgccaggtggtcgaggtcaaaatggccgtggagtacatgagcttctcggcccatgcagatgccaaaggcattatgcagctaattcagaactgtgagccaaagaacgtcatgctcgtccatggtgaagcagggaagatgaagttcctgcgctcgaagatcaaagacgaattcaacctggaaacctacatgccggccaacggcgaaacctgtgtgatttctacgcctgtgaagataccagtagatgcgtccgtttccctgcttaaagcagaggcccggtcctacaacgcccagccaccggatcccaagaggcggcgactaatccatggcgtcctcgtaatgaaggacaatcgaataatgctgcaaaacctaaccgatgccctgaaggaaatcggaattaatcgacatgttatgcgatttacatccaaggtcaaaatggacgactccggaccggtcattcgcacaagcgaaagactgaagactctgctcgaagaaaagctagccggctggacggtgacgatgcaggagaacggctccatagccatcgaatccgttgaggtgaaggtggaggaggacgagaaggatcccaagcagaagaacattttgatatcgtggaccaaccaggacgaggacattggagcctacatactgaatgtgctgcagaatatgtgctag

SEQ ID NO: 1533 - protein, 597 aa, DROSOPHILA
MPDIKITPLGAGQDVGRSCLLLSMGGKNIMLDCGMHMGYNDERRFPDFSYIVPEGPITSHIDCVIISHFHLDHCGALPYMSEIVGYTGPIYMTHPTKAIAPILLEDMRKVAVERKGESNFFTTQMIKDCMKKVIPVTLHQSMMVDTDLEIKAYYAGHVLGAAMFWIKVGSQSVVYTGDYNMTPDRHLGAAWIDKCRPDLLISESTYATTIRDSKRCRERDFLKKVHECVAKGGKVLIPVFALGRAQELCILLETYWERMNLKYPIYFALGLTEKANTYYKMFITWTNQKIRKTFVHRNMFDFKHIKPFDKAYIDNPGAMVVFATPGMLHAGLSLQIFKKWAPNENNMVIMPGYCVQGTVGNKILGGAKKVEFENRQVVEVKMAVEYMSFSAHADAKGIMQLIQNCEPKNVMLVHGEAGKMKFLRSKIKDEFNLETYMPANGETCVISTPVKIPVDASVSLLKAEARSYNAQPPDPKRRRLIHGVLVMKDNRIMLQNLTDALKEIGINRHVMRFTSKVKMDDSGPVIRTSERLKTLLEEKLAGWTVTMQENGSIAIESVEVKVEEDEKDPKQKNILISWTNQDEDIGAYILNVLQNMC

SEQ ID NO: 1534 - DNA, 4002 bp, DROSOPHILA
gctcttttcgccgttccgctcttggttttcctctagtttcctttaaagtcctacgccgcgggctatcctgcacatgctactgtggtttttgggccgctgaattacggttttgttgtggaaatattcggttttctattttctattgtgcatgagtttttccacagcagcttttggtgtgaccgcggttcgagcgacaaaaaataccttggtggccaaggaagaataccagaaagcttagcgttggcaacgcgttgacagggttgtcagcgtttgtcacattaatttaaattagcgcggttttttaaaacagaacatgtatttatttatttatacttttagtaattgaactgcatgacacttctttagtatgatccaaaatttccattcatatacttggtaattttccttcattagcaatcttaagtgtaagtgctcacaatttacagttcttatctgtttaaaatgtttaattatatcatgtaatctgggctggcttaatctaatgttttcttatcgtgaattcattgttggcttaatcttatgttttcttcttgtccatcgaagatagatgcatttgtacgagtatgtaataaagaaaaataaaaacatattctgaattttgaatttgtaatgatatattttcccattacttaagcttagttaacttagcttatttaacaagtaaacacgaggaaacgcaggtcaatatttgaaacattcgtttgaaatactactgatacaaaataatatcaaaacacttttcgaaagtgtgcgcgtaacagttttgaaaggtttgtgaattatagagtgggcgtgccaatcttacatagcgtagaatctatgtacataccctctagcttatatagttttttatttgttgatcgggatgtttatacggacaatcgcttcaaatggttacacatgcttctcaacgaatcaagtatcaggtgtaaaatcttcattttctgcagcccaacttaggaaagttaccccaagacaaatgtttgtggctacgccgctgcatttcgttggcttcccgcagcaacatcaaacaaccatagataccatttactgcccatctgacataatctcttggttaaacatttccccagccagttgcctggcttccatctcgattccatcttcatttcgctgccaacgagccagcagaacggtcatgagcccaggaatcgttagccaggaggtaaacggccgccaggagccaacagaagctgcgagggacgagagacatggacgacggcgccgggtggcggttattggagcaggacttgtgagtgtaacaaagttatttgaagtatacaattattactctgcgaaagcataaatagattgtgggtctataaatatagcgaatgaaatttagtgttaatcattaacaaaataatatatagtctatatttagagtagaccgtagtacggttataaacaggcaataattctagttaagcttcataatatctaaaactaagctttgctaatttgctaaaatacacatcatagtagtagaattatagaattcgaattcttttcgaatcattcctaagtaatctttaaattatgctgcattttgatgtgtcttcacatatgtagttagatgcgttatctttagtgtttttaaatccctgcttccagatataaggctcttatcacgctttctacgcatcttattctccataacactaggtgggttctctggcagccttgaactttgcccgcatgggcaaccacgtggatttgtacgagtaccgggaggatatccgcgaggccctagtggttcagggcaggagtattaacctggctctttcgcagcgtggccgtaaggcgctggccgccgtgggtctggagcaagaggtgctggccaccgccatacccatgcgaggcagaatgctccacgatgtgcgaggaaactccagtgtggtcctatacgatcccattaacaatcaatgcctgtactccgtgggacgtcgacagctgaacgaagtccttttgaatgcctgcgataagctgcccaatatacgctgccacttcgagcacaagctgacaagtgccaatctgcgagagggatccatggagttccgcaatcccgccaaggaagccgtagctgcccatgctgatcttatagtcggctgcgatggtgccttcagtagtgtgcgccagcacttggtccgtttgccgggcttcaactactcccaggagtacatagaaacggggtatctggagctctgcataccctcgaaatcgggagacttccagatgcctgccaactatctgcacatatggccgcgtaacaccttcatgatgattgccctgccgaatcaggataagtctttcacggtcacgctgtccatgccctttgagatcttcgctggcattcagaatcaaaacgatctcctggaattctttaagctgaacttccgggacgcactgccactgattggagagcaacagctcataaaggacttcttcaagaccaggccacagtttctggtgtccatcaagtgccggccgtatcattatgcggataaggcactgatcctgggcgatgccgcccatgcgatggttccgtactacggccagggtatgaatgctggaatggaggatgtcacgctgctcaccgacattttggccaagcagctgccactggacgagacgttggccctgttcaccgaatcccgctggcaggacgccttcgccatttgcgacctggccatgtacaattatgtggaggtgggtttttggaactagaatttatatagtttcaaattatatttcattcttttttctctaccttgcagatgcgagacctgaccaaacgttggacattccggctggacctactactcaaaagctctaaaagcttttcttcgccgaaggtagaaagacatggatggtttcgagtatttaaagagggggagcttagtatggtcagagagcgagagagacagcgagctgctcatttccgacttaattgttgttgctaattccgtttcgcgaacttttcgatggcactctctagaattgtcggcgcctccgctttgcccacactcactacagtggaacgtcgacgagaataagatttatatgatatgcagttaatcacgtacataatcctcttacaaaatggcgtgtacataaaacttaaggtatgaaaacgtatttaaactctagaaacttccagatagtgacaaaccattatttactaatgttaattatacaatgaacggtgccgaatgtcttgtttatggttttgtattcaactagcgtaaaatgtatcgaacgttaatagagattagactttaagaacgttgaaaattaacctattaatggaatcgaataataactcttatttttctgaacccaatagctgtgaaataaaaatatacatatgtatgtgttttagccactttttatttaaaacaaatggccagtgatttcaatgagtgccctttctaagtgaaagtacttttaggcaggccttactgtacccactgtaccgctgccgccgtcgcgcgtcttcgcctggccggcggaccaatggagcaggccagcgccatcagttgctcgtcacatgttcgacactcaagtagaccaaacacagggagctgtacagtgcccaccgagatccgatcgaacgcagagcagccgttagacagaatattgactttagcaactcaccaggagttcagttaaacttgcacaaactaaaaattcccataatccaaccggaatatcgctctttttaggcaggtgcaagtgcaactttgttcagccctttttgctgttaaatcgaaaaaccacattctcgaagcttttgggcaagcttccgcaaaacgaaacgatcgaaacgcgtggtccgaaagcaacgaagcaaatacggcaacaggcgagcgaaaaagtgaaattgaaataattccaaatcaaaaatcaaattccaaatcgaaaatcgcaaatcacaaagttggaagttgagtgagcgaacgc

SEQ ID NO: 1535 - DNA, 1521 bp, DROSOPHILA
atgtttgtggctacgccgctgcatttcgttggcttcccgcagcaacatcaaacaaccatagataccatttactgcccatctgacataatctcttggttaaacatttccccagccagttgcctggcttccatctcgattccatcttcatttcgctgccaacgagccagcagaacggtcatgagcccaggaatcgttagccaggaggtaaacggccgccaggagccaacagaagctgcgagggacgagagacatggacgacggcgccgggtggcggttattggagcaggacttgtgggttctctggcagccttgaactttgcccgcatgggcaaccacgtggatttgtacgagtaccgggaggatatccgcgaggccctagtggttcagggcaggagtattaacctggctctttcgcagcgtggccgtaaggcgctggccgccgtgggtctggagcaagaggtgctggccaccgccatacccatgcgaggcagaatgctccacgatgtgcgaggaaactccagtgtggtcctatacgatcccattaacaatcaatgcctgtactccgtgggacgtcgacagctgaacgaagtccttttgaatgcctgcgataagctgcccaatatacgctgccacttcgagcacaagctgacaagtgccaatctgcgagagggatccatggagttccgcaatcccgccaaggaagccgtagctgcccatgctgatcttatagtcggctgcgatggtgccttcagtagtgtgcgccagcacttggtccgtttgccgggcttcaactactcccaggagtacatagaaacggggtatctggagctctgcataccctcgaaatcgggagacttccagatgcctgccaactatctgcacatatggccgcgtaacaccttcatgatgattgccctgccgaatcaggataagtctttcacggtcacgctgtccatgccctttgagatcttcgctggcattcagaatcaaaacgatctcctggaattctttaagctgaacttccgggacgcactgccactgattggagagcaacagctcataaaggacttcttcaagaccaggccacagtttctggtgtccatcaagtgccggccgtatcattatgcggataaggcactgatcctgggcgatgccgcccatgcgatggttccgtactacggccagggtatgaatgctggaatggaggatgtcacgctgctcaccgacattttggccaagcagctgccactggacgagacgttggccctgttcaccgaatcccgctggcaggacgccttcgccatttgcgacctggccatgtacaattatgtggagatgcgagacctgaccaaacgttggacattccggctggacctactactcaaaagctctaaaagcttttcttcgccgaaggtagaaagacatggatggtttcgagtatttaaagagggggagcttagtatggtcagagagcgagagagacagcgagctgctcatttccgacttaattgttgttgctaa

SEQ ID NO: 1536 - protein, 506 aa, DROSOPHILA
MFVATPLHFVGFPQQHQTTIDTIYCPSDIISWLNISPASCLASISIPSSFRCQRASRTVMSPGIVSQEVNGRQEPTEAARDERHGRRRRVAVIGAGLVGSLAALNFARMGNHVDLYEYREDIREALVVQGRSINLALSQRGRKALAAVGLEQEVLATAIPMRGRMLHDVRGNSSVVLYDPINNQCLYSVGRRQLNEVLLNACDKLPNIRCHFEHKLTSANLREGSMEFRNPAKEAVAAHADLIVGCDGAFSSVRQHLVRLPGFNYSQEYIETGYLELCIPSKSGDFQMPANYLHIWPRNTFMMIALPNQDKSFTVTLSMPFEIFAGIQNQNDLLEFFKLNFRDALPLIGEQQLIKDFFKTRPQFLVSIKCRPYHYADKALILGDAAHAMVPYYGQGMNAGMEDVTLLTDILAKQLPLDETLALFTESRWQDAFAICDLAMYNYVEMRDLTKRWTFRLDLLLKSSKSFSSPKVERHGWFRVFKEGELSMVRERERQRAAHFRLNCCC

SEQ ID NO: 1537 - DNA, 2864 bp, DROSOPHILA
aatacaccgttgccattatcctaacccttttcgttgccagtggatgggcccaaccgctggacatgcccagccagctggacgcccaggtgcgcagcgtggtggatgagatgaccagcattggcaaggcgaccggcgaggtactgttgagtcagtacgaagagatcgtcctggagccgcaaaacgaattggaggcagccgtcgagcaggtggagtcgcgtcgcgaggagagtcccgaatgcgtggccgccgaggatgaggagatcacccgcatcgtgaatgccgcccatgaggatctgtacgcctgcggcgttgtggccgcccagacatccgccgaaattgcctccgatgtgagtgccgccacccagcaactggtctacggtggctacagcctggccagcacctacaacaaatgcaactcgtacaagaactccgtgctgaagcagacctgcttggccaagttctatgtccaggccaccgtctatttggtcagtgcgcgctcctccatcaagaccatccgtcagtcgaccagcgaacgcatcccggacgtcttcgccgatggcaatgtgtgcacccactccgcatcctcgcaggcggtgctcggtctccaggaggtgaacaacaacatcgacgcctgcgtctaccgtcgtcgctaggtgaacacaaacttatttacctggattctgcaaataaaaattatgcatgttctatgccaaatgttatttagttattttttttttttttgcagtgttgcttgttgcagtgtgatttgtgtgctaacattttagaaagaatttattttaaagttcaatttttgtgtacgaaagtataaataaataacggagttaatcgaaaaacttacattattatacatagaatgaaaatacaaaattttaaattcaaaccggttttccggtctgttatctggcatggtcaccttaaccgtacgctagtttcaatttcaagtggaaccagtttcggttccgcactgttaaacggcaagatgttcggattgctgcgacacctgttcaaatttcaatttcttttcgttgtggcagccgttctgggcggaatttatcacacagagattaggcagttcctgcgtcgccaaacggacaactacctggaccaagctgggcaggatgcgagcattcccctggcgttccaagctggtgacgatatcggcacgctctttacaccggccgagttggccaaattcaatggcgaggaagagggtcgtccgctttacctggctctactcggttccgtcttcgatgtgagccgcggcattaagcattacggatccggctgcagctacaacttcttcgtgggtcgcgacgcctccgtatccttcatttccggtgattttgagacgtacgatccggaaacggccgacgatgtgttaaccctaaagccggacgacctgattggtttggccggatggcgggatttctatcaaaaggactacgtctacaagggacgggtaattgggcgcttctacgatgagaagggcgccctgaccacctatcatcataagtttctggagctgctggagcaggcacgagatgccaagcgacaggtggaggagctgcgtgcccggtatcccggctgcaatatcgagtggagcgaggagcgcggcactcgcgtctggtgcaccacgaccagtggcgatggcaaggagcgctcctggatcggttatccgcgcaagctgtacagtcgcggcaacaagagtttccagtgcgcctgtgtgccggatgcggagctggacgagatcgatgccggcggcaaggtggctcacggtgatgccatgctgaaaccctacgacaattgcgagccacaggccagggagtgcttctacagggtgtagcagcagggccgggatttgtaaatagtaattagtgcatttggatcaataaattattaggtggagttaacatggctggcggaactagttccggttctcttctgttaaatttttagttgcgctacatcgacaacaacaattgggaaatgttgacattcaagctaaatacttgagcacacttatttctatctgtaaaaccaaaccatttatttgctatcaacagctcaactttatttaaatcgttggatattatttgttgtatctgtaaatcaataccctttaatagacataccaatgaacgggacttggttctcttttcaactttagcgaggccgcactgccttaacagtaacatttcacacttaaaagctgctgttaagaccgttagctgtgctgttaggcgcatatcttgtttacaagcggtttaattttataaatatagctttgttttaataaatatccaagaaatttaaactattacacatggacacattgccgggaagttcctccgccctgagcacagacgacgagcaaactgccctgatttcccccactgtggtggccggcttaaagaacctgggtgccatcatttcgctgccactcaccaaactgctcattgccaattccttgaaactgacgctccatccagatgccagtgagttggaagctggaaattggtgtttcgcgtagacctaatcctaatatgtacacccccacagccattgctccggtgcccgagctgtatgccaagaacgccgcctgcgccaaacagagcgagtacgcggtggtcaccctcttcgccctgggcaccaagcacggctgggatggccttcaattgcgccagcagctggagcaactcaacctcgatgcagctgccgtcgacgagctgagtcgcgtttacgaggacagccgcaaggatctaattctccgccaactgcaaataggccatagctttccgcacattaccgacatccagtggcgcatcgtgtgcgacgtgaagtct

SEQ ID NO: 1538 - DNA, 864 bp, DROSOPHILA
atgttcggattgctgcgacacctgttcaaatttcaatttcttttcgttgtggcagccgttctgggcggaatttatcacacagagattaggcagttcctgcgtcgccaaacggacaactacctggaccaagctgggcaggatgcgagcattcccctggcgttccaagctggtgacgatatcggcacgctctttacaccggccgagttggccaaattcaatggcgaggaagagggtcgtccgctttacctggctctactcggttccgtcttcgatgtgagccgcggcattaagcattacggatccggctgcagctacaacttcttcgtgggtcgcgacgcctccgtatccttcatttccggtgattttgagacgtacgatccggaaacggccgacgatgtgttaaccctaaagccggacgacctgattggtttggccggatggcgggatttctatcaaaaggactacgtctacaagggacgggtaattgggcgcttctacgatgagaagggcgccctgaccacctatcatcataagtttctggagctgctggagcaggcacgagatgccaagcgacaggtggaggagctgcgtgcccggtatcccggctgcaatatcgagtggagcgaggagcgcggcactcgcgtctggtgcaccacgaccagtggcgatggcaaggagcgctcctggatcggttatccgcgcaagctgtacagtcgcggcaacaagagtttccagtgcgcctgtgtgccggatgcggagctggacgagatcgatgccggcggcaaggtggctcacggtgatgccatgctgaaaccctacgacaattgcgagccacaggccagggagtgcttctacagggtgtag

SEQ ID NO: 1539 - protein, 287 aa, DROSOPHILA
MFGLLRHLFKFQFLFVVAAVLGGIYHTEIRQFLRRQTDNYLDQAGQDASIPLAFQAGDDIGTLFTPAELAKFNGEEEGRPLYLALLGSVFDVSRGIKHYGSGCSYNFFVGRDASVSFISGDFETYDPETADDVLTLKPDDLIGLAGWRDFYQKDYVYKGRVIGRFYDEKGALTTYHHKFLELLEQARDAKRQVEELRARYPGCNIEWSEERGTRVWCTTTSGDGKERSWIGYPRKLYSRGNKSFQCACVPDAELDEIDAGGKVAHGDAMLKPYDNCEPQARECFYRV

SEQ ID NO: 1540 - DNA, 4677 bp, DROSOPHILA
tgcaaattggggattctcaactctatttccgacgttttattgtgctcgaagggttctgggaagtcgcagcctttgacaaacgaaagtcaaaatatttttattaaaattaaaatgcttacgcagacaaaggtttgtggttccattttttcattttcggttgcaatggcaacccttggagcctttgtctatgcatgaattattatggagcataccccggctgacgcatcccatacatacgacgtatattattaatatgcaacgcagtctagccgcaaaattttaatccttttaagtgaggccgccagacatcgggcaaatcgtttaatctttttattgaatagcccttggagttttgggcaatcgaaggaaagagtttcacatctgtttggcggacataaatctaatttcgaatgtcccgcctgtgtgtgactgactgagacatcccaactcctccttttggcgaatgcaaatcgtcgtcggcttactgttgtcataacaattccattaacgaggactgtctgtctgatttggcatatttatgagcttaggaaattgaattgaattattcagagcgacaaaaaggaggcctctaatacatgatggtatcatttgctgaaaatgaattctattggcggggatttccttctttcttgactcgcaaaatgattgttaaatgtattctataccagatcgatccaatcggccaaataatgaaaacattttggcatttggcatttggcaaatgccccaaaaccgcacgaatgcaatgtgtctggtctggtctggtctggtcggcgccccacgcaccatcgagcataataaatccgattcgaatctgatctatcccaacatcaggggttgacatttaaattaacacccatgtggtatggctgcatgggggttggaatcaggacctgtgcgacaggacttggctcagtcctttcgcttagctgctggcagttggttggattcaaaggctcttgctttggttttgacatttagttttatttttcgctgtaaattttcatcggtacaaatgaaaatggaaacttgagtataactaacatactattcaatttcgtttaaattacataatattaaactagatgcttgccattagatttatctgctttagttccctctttgtttgctgctttagtttcagttgtagttgatttgtttccctcaattgtctagttggtgttttccatttttacacaaatcaaaaggaggatcatcactccaactaaacactataaagcggtgccatcgcggctggctctgtgtaagggtgctatatatgtataggagatatggggacgacagagggtcgaacacgacagaaatgcaacgataatacggcaaaagtacgtacagagttgactaaaccgaaacgagtgtgtgtgtggtgtgtgtgtgtagtttgtgggagatgtcggctgccttggcgaacaaacattttggttgttgctgcttcgcaaccgctggcttttggaattggattaagtttttttttttctttagagttgcagtgtttgttttcggattcggcatgtggggatgcccgcttactccttgcgcgcttgacgcttgcgtgtttttgtgttagattcctaaagagaataacgttgagattagttctggtggtggacacaagcaagcttatttttgaacgcacctcagtctgtgcgggctctcggctctccgccgccttggactcctcttcgttatcatctaaatcagacttttggttcttcttgggactagcggacagcggtgtgctctccttgctggtatcgccagcggccctttcgtcgctctcctcctcggcctcgggctcatcgtcgggctgaggatcgtcggacttcttggcctcggcagcagcctttttggcagccgagtcctaatagcaaaagtgggattagtaaattccttatgaagatctcaagtgaaagctcgagcatcattacctgactcttagcggtaccaaatctacagtagatggtgagggcaaccagcgccacaatggccaccaagccaatgccccagatcgagggattggccttggctagctcgactaccttattcacgaatgagtcctattaatgagaaagccaaagaatagcagtagcaattacaggtgcacggtgcagggcaaatatgagaggtgttcatgtggttgtactgtaggcacttctaattaaaatttgaaagcgtaagacaagaccggagccaacctctttggcgcgtcggtagagatagaagacataacaactggccggaatgagcaggtacacgaagtacagggcccaccagccgggcttgtagttcatgcggcgcattaggcggtgccagaaggttttcttcgaattggatagagaagtctctcgattacgaatccctgtgtttatttgtgaagggaaaacggaagaggttaggggttttaaacttaccgattcacgatcgatgtagcgacgcttgatgtcgaagctgttggcggcaaagtcacgggccacctccacgtcgtccgtgatgattaggttgtcgaagagaatatcgctggacatggaccacagttccagacccacagcgctctaaatagagttagtttggctatagcaaagtggacaacgaaagccatgcaaattgcacttacgatgggcgtcatttggaagggcttcagatcctcaaagaagtctggattgggaatcttcctgggtgcccacttgccctggtagttggggttctcgatcattggtgcacgccacttgcccttgtagttgggattggggatgagcggagccttccacttgccacagccgggagccttctcgcacactggattgtccaccaatggagcctcccactcgccatcgatttcggcatcccaatcctcgggtttggtggcagttggatcgaaaatcatgtcgggctcatcttcgagccagccattgggcatgacggcatcggtatcgggcaactggggtggagcatcctcatcccaatcctcgggcttgtgggcagtgggatctgggatcttctctcgctcatcccacgattcgggcttgtggtcattggggtcgtcgatctctgccggcgggttgactggtggcttgaaatcggttagcagggaaccctcattgatgatcttgtggtcaacgcgaatctcaaagctgttatcgggacggaccaccagctggtagagatggggtagcttgtccttgaatggctcttccaaacggttcctgaaagcaaagaacaaaagaatattattcatcgatgggattataaatatacggtttatctgcctcttcagaaattcagctcatcaatgggggcaatagtccaccatcggtgacgaagagccaaacgggtgataaaggtgagcaaaggtgatttcggagatattacacgtatgcgcaatgtcgaacaccaattttgtttctatacaacgctcggaaactttcaagcaagatggttagagtggtgattctattgatagcgataacgcttgaacgagctgctcatttccaatctgccaaagagttgcgttcatttaatggactcactttggcttgttgcagtgcttctcggtgatggtgccattaattggattgacgtgccggaatatgaagtgcattttcacatcgttgccgcacttgtccggtccaaacatgatggtatagggtgtcttgtcattgaactacgagtaaacagattcggtttcgggggttgtttacgatgtatgttctttggggttcaggcgagtgtgatctatgagggcattggcccccgcacttaccgcttttagttgctccgtgtcttttccggcggacaaaagcttcagatacgagccaccgcactcctgaccctcctaaaaacaaaaaaacaaaaacaaaaaaacgagaataagccgggggagaacgagaattgggtcagtaagcgggtattaattggatttgcccggcggctgatgcaatcccagagcgtttcgctaggtgacgaacctgcaacgtgacctcgtactgcaccaccagcggcttgtccgacttgaactcgaacggtttgcggaggggggcggctatggccgcgtgtttggccttcgacttgagcaccagacccaagtcgttagcccaaacgatgcgctgcggcgactcccagttccagatgccgtcgtacttggagatctcctcggcgatgtcgtccttcttggcctgcgacagcacccacctcttcctggactcctccacgtcgtcgaagtgatccgcgaagtggaacttcttggcatcgataaccgggctctcgtaggccagcttctcatcgccaccgatgacggcgggctcctcctgcaaagcatatgtggaaacattagataaggtgccataaaatccgaagcacgcggttgtcagtggggaaagtgataaagagagggagagaaagatgggtggccagcatgggtttgaattggagagcgctacacctgggcccgccagactagttatagctatataataacatgttttatgttgctcttagcttgacctcatctgtagcagtaactcccctagaaacataaatgactggcataatttctagagaaacaagcacgttaaatagaagctctgctcaataaacctctgatgtaacctgtggagcaacagattagcgcattcttgg

SEQ ID NO: 1541 - DNA, 2206 bp, DROSOPHILA
atgccagtcatttatgtttctaggggagttactgctacagatgaggaggagcccgccgtcatcggtggcgatgagaagctggcctacgagagcccggccaagaaggacgacatcgccgaggagatctccaagtacgacggcatctggaactgggagtcgccgcagcgcatcgtttgggctaacgacttgggtctggtgctcaagtcgaaggccaaacacgcggccatagccgcccccctccgcaaaccgttcgagttcaagtcggacaagccgctggtggtgcagtacgaggtcacgttgcaggagggtcaggagtgcggtggctcgtatctgaagcttttgtccgccggaaaagacacggagcaactaaaagcgttcaatgacaagacaccctataccatcatgtttggaccggacaagtgcggcaacgatgtgaaaatgcacttcatattccggcacgtcaatccaattaatggcaccatcaccgagaagcactgcaacaagccaaagaaccgtttggaagagccattcaaggacaagctaccccatctctaccagctggtggtccgtcccgataacagctttgagattcgcgttgaccacaagatcatcaatgagggttccctgctaaccgatttcaagccaccagtcaacccgccggcagagatcgacgaccccaatgaccacaagcccgaatcgtgggatgagcgagagaagatcccagatcccactgcccacaagcccgaggattgggatgaggatgctccaccccagttgcccgataccgatgccgtcatgcccaatggctggctcgaagatgagcccgacatgattttcgatccaactgccaccaaacccgaggattgggatgccgaaatcgatggcgagtgggaggctccattggtggacaatccagtgtgcgagaaggctcccggctgtggcaagtggaaggctccgctcatccccaatcccaactacaagggcaagtggcgtgcaccaatgatcgagaaccccaactaccagggcaagtgggcacccaggaagattcccaatccagacttctttgaggatctgaagcccttccaaatgacgcccatcagcgctgtgggtctggaactgtggtccatgtccagcgatattctcttcgacaacctaatcatcacggacgacgtggaggtggcccgtgactttgccgccaacagcttcgacatcaagcgtcgctacatcgatcgtgaatcggactcattcgtgaataaggtagtcgagctagccaaggccaatccctcgatctggggcattggcttggtggccattgtggcgctggttgccctcaccatctactgtagatttggtaccgctaagagtcaggactcggctgccaaaaaggctgctgccgaggccaagaagtccgacgatcctcagcccgacgatgagcccgaggccgaggaggagagcgacgaaagggccgctggcgataccagcaaggagagcacaccgctgtccgctagtcccaagaagaaccaaaagtctgatttagatgataacgaagaggagtccaaggcggcggagagccgagagcccgcacagactgaggaatctaacacaaaaacacgcaagcgtcaagcgcgcaaggagtaagcgggcatccccacatgccgaatccgaaaacaaacactgcaactctaaagaaaaaaaaaaacttaatccaattccaaaagccagcggttgcgaagcagcaacaaccaaaatgtttgttcgccaaggcagccgacatctcccacaaactacacacacacaccacacacacactcgtttcggtttagtcaactctgtacgtacttttgccgtattatcgttgcatttctgtcgtgttcgaccctctgtcgtccccatatctcctatacatatatagcacccttacacagagccagccgcgatggcaccgctttatagtgtttagttggagtgatgatcctccttttgatttgtgtaaaaatggaaaacaccaactagacaattgagggaaacaaatcaactacaactgaaactaaagcagcaaacaaagagggaactaaagcagataaatctaatggcaagcatctagtttaatattatgtaatttaaacgaaattgaatagtatgttagttatactcaagtttccattttcatttgtaccgatgaaaatttacagcgaaaaataaaact

SEQ ID NO: 1542 - protein, 545 aa, DROSOPHILA
MPVIYVSRGVTATDEEEPAVIGGDEKLAYESPAKKDDIAEEISKYDGIWNWESPQRIVWANDLGLVLKSKAKHAAIAAPLRKPFEFKSDKPLVVQYEVTLQEGQECGGSYLKLLSAGKDTEQLKAFNDKTPYTIMFGPDKCGNDVKMHFIFRHVNPINGTITEKHCNKPKNRLEEPFKDKLPHLYQLVVRPDNSFEIRVDHKIINEGSLLTDFKPPVNPPAEIDDPNDHKPESWDEREKIPDPTAHKPEDWDEDAPPQLPDTDAVMPNGWLEDEPDMIFDPTATKPEDWDAEIDGEWEAPLVDNPVCEKAPGCGKWKAPLIPNPNYKGKWRAPMIENPNYQGKWAPRKIPNPDFFEDLKPFQMTPISAVGLELWSMSSDILFDNLIITDDVEVARDFAANSFDIKRRYIDRESDSFVNKVVELAKANPSIWGIGLVAIVALVALTIYCRFGTAKSQDSAAKKAAAEAKKSDDPQPDDEPEAEEESDERAAGDTSKESTPLSASPKKNQKSDLDDNEEESKAAESREPAQTEESNTKTRKRQARKE

SEQ ID NO: 1543 - DNA, 1911 bp, DROSOPHILA
attagggtagaaataaatacagtataattcgcttagctgtatcgatagttagctgcatcggcaagatatctgcattatttttccatttttttgtgtgaatagaaaatagaaaatagaaaaaaaaaaattaagttagctgcatttttaagttacctgcatcgaggcattgtgcaaagtactcgaggcagctaagcgaattatactgtataagccaaaagcaaaccgtcttacaatctctgagtcttaatttaatttatcaatatctacaattcacatatgtatatttatgcatagcttagggtcaccgttggttggccatattctggtgtatagcgttgttgatcatggtgttccgcatgaataggtagtgatcgtccatattgcactgcagctccatcatgtcctcgtgctccgcctgaaatcggatggccgcgtttgtgaaagccaacgagcttcgcacgaagttttgcaaattgggtccctgatctaggtaacgctgctgctccttgtttggcttgaagctaaccttgcgattgtccgtgtccagtgccgcatgcattacaaagtcgaagaacttttgctgctccttctgggcgcgctccttgtactgctgcacctcgtcctcctgacagctaggatcccagactgaaagtctgtacgttaagtaaatggcaatttaattaaccacaaggattgcacttactatcgtccaggtcaatgttaaacaaagtgcttgcttcatagcgacgcggtttcaaagtggcctccagttgggccggcacgtccttgagatcgatgtcggagagatcaccgctcgatagatcgacggcactcgtgttgcccacgtattccagtacgtcactgcggcgtacgaatttcattaatttttctggactttcggctggctccatcgcgtcgcttcgtttgttttcagtttttaaatccgtaaacgcttgccaacacccatcgctgatccagtgatgccacatcttttgaacgtaattcgctctggctcttttcaagccaaaaccttttatacaaattaaaatatacgatataaaaaattgcacttttaatattaataaaaagatatatactcattgaaaaaaagctgaactaaaaaaggggaaaagggttatagggcataagtcattttatgaatgctaagcaggccttgcgtttagaatcacatttcaatttattgtatttgttcaagtagtcaaaccaaatgaacaaaatcgagaaccgaatacacagctatatatatactttctcaaaatccaaaattttaagattatccaaaatttccaaataatgatttatgcgatcgtgatacacatactgtcccttctggtgggctgtttctatccagcattcgcgtcctacaagatcctgaaaagtcagaattgtagcgtcaatgatcttcgcggatggttaatctactggattgcctatggagtttatgtggcctttgattatttcacagcgggtctgctggcatttattccattgctaagtgagttcaaggtgcttctcctgttctggatgttgccctctgtgggcggcggcagtgaggtgatctacgaggagttcctgcgatcctttagctgtaacgaatccttcgaccaggtcctgggacgtatcaccttggaatggggcgaattggtgtggcaacaagtttgctccgttcttagccatttgatggttttggcagatcgctatctcctgcccagcggtcatcgtcctgccctccaaataacgcccagcatcgaggatctggtcaacgatgccatagccaaaaggcagttggaagagaagcggaaacagatgggtaacttatctgataccatcaacgaggttttgggagaaaatatcgatttaaatatggatctgctgcacggatccgaatct

SEQ ID NO: 1544 - DNA, 761 bp, DROSOPHILA
atggagccagccgaaagtccagaaaaattaatgaaattcgtacgccgcagtgacgtactggaatacgtgggcaacacgagtgccgtcgatctatcgagcggtgatctctccgacatcgatctcaaggacgtgccggcccaactggaggccactttgaaaccgcgtcgctatgaagcaagcactttgtttaacattgacctggacgatatctgggatcctagctgtcaggaggacgaggtgcagcagtacaaggagcgcgcccagaaggagcagcaaaagttcttcgactttgtaatgcatgcggcactggacacggacaatcgcaaggttagcttcaagccaaacaaggagcagcagcgttacctagatcagggacccaatttgcaaaacttcgtgcgaagctcgttggctttcacaaacgcggccatccgatttcaggcggagcacgaggacatgatggagctgcagtgcaatatggacgatcactacctattcatgcggaacaccatgatcaacaacgctatacaccagaatatggccaaccaacggtgaccctaagctatgcataaatatacatatgtgaattgtagatattgataaattaaattaagactcagagattgtaagacggtttgcttttggcttatacagtataattcgcttagctgcctcgagtactttgcacaatgcctcgatgcaggtaacttaaaaatgcagctaacttaatttttttttttctattttctattttctattcacac

SEQ ID NO: 1545 - protein, 183 aa, DROSOPHILA
MEPAESPEKLMKFVRRSDVLEYVGNTSAVDLSSGDLSDIDLKDVPAQLEATLKPRRYEASTLFNIDLDDIWDPSCQEDEVQQYKERAQKEQQKFFDFVMHAALDTDNRKVSFKPNKEQQRYLDQGPNLQNFVRSSLAFTNAAIRFQAEHEDMMELQCNMDDHYLFMRNTMINNAIHQNMANQR

SEQ ID NO: 1546 - DNA, 4443 bp, DROSOPHILA
ctggtaaataacaataagagtagcccgagaactgttttatttctatacccttacagagggtatcgtaactattctcataaattcattggattggttctgacccatttgtacatacaatttacatacttacatatatccatatcctattgctactgataaacttcagtagatgctagcgaattttgaacttaaggcgatttaaagagtataaaatatttagacggatttcgcgcacttttaaagagtttaatgagcaatcttagcagtttatggggagtcaaagttattgatcttgtggtcagtttagcaatcatcacacatttactcggcgactcggtgtcgaaaggaagagcaaggggaaaaaataaagcattccgatacgaaaacttacatcatcggtctgggggatagaatgagatggagggatcaaaagagggagaaccaaatggcaagcatttacataccaacaaacatggcacaacggcatatgtacatacatatgtacgtatgtatgtacatgtttttatatattatgcgctatttttcggctttttgtttttgctttttcgaatgaacgcaagaaataagtaatacgaattgcgcgtttgaaaatggtggagacttttatacttttagctcctttaggaacccacagcagttaatcaaaaacaaaatgtgtgataaagactcacaaaaaaaaggggtggatgggcacatgtgaggaatacgctttcataagtgattttggcttcattaaaataaatcaaatgcatttagtacaaataagcaaagtctcgaacggaatggcgaaaacaattgttcgagaaagcaaataaccaataactaattttgtttcttcccctttctcttttctctctttacatggtgatcgctgccgctctctccctctctcacttgcttatcttgcggtaaatgtcatccaaaccaaaaggggtagcaaaacgaagaacagcaatttcgccgaaaagacgcagttaaaaaaaagtgttagcaagtgagaaacaacattcgtgaatttcgtgattaaaaacatttcaaaaggtgtacaacaaaagctcatttaatataaaaataaaaagaacgtaagcgaaatatacaaaatataatatcgcagcgcgccaacaacaaaacgtggcaccacaaactaaaaacacaaaaaaagctcaacgaaaacgagagcgaatgcgcgagcgcgagtgagagggccagataagcggagacaagagcgacaacaacaaaacacaagcgcaagcacgatccaaaagccaattgcgcacggaacgtagaacgcagagaactaacggaactgtagaagcgcagcacggataacagttaacaggggcaatccaaaaatggtaaacaagaaggcggacaaggacaaggagaggcagcaagaggcaatgttgccggcggcgggcaagaatagcagcaacattgaaaacagcagcaaacttagcaacaacaacaactacaacaacaacaaaacaaacaagggccaatccacaaagcctaacagcaataacaacagcggcaacaacaaaaagaatgcaggcaaaggaaatcagcagcagtcgcagcgcagcggcaagaaagcgaagccgcaacgccaacagatattcctacagtcgctgccacgcgacagcagcaactacagaagcaacagcttcaggaacagcatcgacataaacagcaacagcagcaacatgagcagcaagagcagcagcaacatgagcagcaacagcagcaacatctcggacacattggcaacattggacagtggagtgggaaaaattaatcccgctgaactgctgacagccgccttggccgtgccctgtgccaaatgctccaagccatcgatgatctccggcctgaccaccgccgtaaccgcatccacagtccccgcatccgcatccagctcttccgcttctgcctcctccttttcgtcgtcgtcaaccagttccggatcggagaccgccagcaatcacagcgatctccattacccggagccggttgtctactccgccaagcagtatcgcaagtccaagtcctacatgggcgtatcccagtacaacagctcacaaaatggccatcaagcgggtcgggcgcccaataccgctggcggtggtaatggcaaccacgtggcctatagacgctcccacagcgaccgacgcaactcgttcgatcgcagcttcgccgaaaggaatcgtgactttgtgcccatcgtcccaccgccgcgtccggtcctgtcctcctccaacatcgccggagtcatggccagcaccaccaagctgacgatcatagagcggctcggcaaaggacgtctcgcgtatcccataatgcaggtgagtccagaacggttagcacagatattgtctagaagtaagtttaagttatttattattcgatgggcggggtgtgtgctgtttatttgcgttgacgaacttatttattggcacagttggcagtttgactttagtgtatctgctatctgctatctttagaatatagagtttgaaaacctgcaggctaggtggtgaacttgaatagtagatcttagcttaagcccaaaaaaaaaaaaaacgacagaacctttgactcggggaaaaacgtggaaagaaatcaccgcatttcttggaaaatttattgatttatatcacaatatattctgaaaacgaaagtactcaattatgggtttagaacaggaaataccacagaaaaatgcacattgaaatatgataaaatgtagttatttatagaatatcttcgaacttagttgtgattttcaagtgcaaatggtatgattttgataaggtaatgcgcattgcatttatagttcggctagacggtcaccattaggcattagagatgcttgggagtacatattgatggaatggatagacttaaaactaataatggcccccaaactttcgtaactttccatacgtgaactgttgacacctttcgagaagtttgcgctctaatcagcttctagcggctaccgaaggaagcagccataattaatggcacacaaacaagaactttgataagggaaaagaggcagcaaggcaagtgcttagtcatccatatatttttgataagctgatttcatttcgggagttgcgaaatggagcccaaactatactgcacaacttgaggcgaacaatctaagacttctcaccctgatttgtgggcttttttttattttttgcaattgttttgcagtttgttatctcctccctttgtacgagtagtatattctttttgtttgctatttacggttatgcacttggcagaatattacgtatacgccctggccgacagcggcattttgtcggcagcgattttgtgcaatcgagagaggcgaatgcgatgctaatatacggaaataccgatgtctcgccttgaatctccgtcactcttaatcgctgtccgcttatgtatgtatgtatatatgtatattctggcccaacaactcaagacatcccccctaatatggtaaccaaatctctgccagaagttcgaatctcgaactcgcgactcaggtattttatgcaaatttcccgctgacgtctctgacttttgagttcgattttattgtggaaaaatatcagccgaaagtggtttgattagcatgtgtcgcggcacttagctagttaccaaaactagttctaaacgaacctcctaaattcaggaaaaaagacaaacttatgcgaaaagtgaaacttgtttgtgttttgctaagcattgccaatgaaatgggatgatttagaaagcttggcgcagacaaagggactcatttactagaccctaagcgcctaaaactgtcataaatttcaccaattaccggcatttttggccgaattgccttcgttttgccttaccgccttaccttaccaactgattcaacaatttgcttagccttagcattgcctttgctggccttcaaacggtaactgtaaactagacgaaaacattgaatatttgagaaaaacaatccgaacatacattttctaatgaatcattagaattagatctctcgccgcttgttgatgtttactctttgggcgcagacacacacacacacacacacaagcaaagttgcatacgcgtacatacacatacgcgacccacgtgaatttgtttgtggcacagtggggcagattgttccactgactggtgaaattgttttggcttggaaacaaatctcttcacacgtggccaccacttggacaacggaagcgagccagttgataagataagtgcaaaagttgtcatacagaaaaagcttcgtttgtcagatgtgcaatctaagcaggaggaacgtctttagaaagttaaataaacattttaatacctaatagacatccactaacttaattctacaatacctatttccatttactatgggccctcggaagtcat

SEQ ID NO: 1547 - DNA, 1492 bp, DROSOPHILA
aaaaagtgttagcaagtgagaaacaacattcgtgaatttcgtgattaaaaacatttcaaaaggtgtacaacaaaagctcatttaatataaaaataaaaagaacgtaagcgaaatatacaaaatataatatcgcagcgcgccaacaacaaaacgtggcaccacaaactaaaaacacaaaaaaagctcaacgaaaacgagagcgaatgcgcgagcgcgagtgagagggccagataagcggagacaagagcgacaacaacaaaacacaagcgcaagcacgatccaaaagccaattgcgcacggaacgtagaacgcagagaactaacggaactgtagaagcgcagcacggataacagttaacaggggcaatccaaaaatggtaaacaagaaggcggacaaggacaaggagaggcagcaagaggcaatgttgccggcggcgggcaagaatagcagcaacattgaaaacagcagcaaacttagcaacaacaacaactacaacaacaacaaaacaaacaagggccaatccacaaagcctaacagcaataacaacagcggcaacaacaaaaagaatgcaggcaaaggaaatcagcagcagtcgcagcgcagcggcaagaaagcgaagccgcaacgccaacagatattcctacagtcgctgccacgcgacagcagcaactacagaagcaacagcttcaggaacagcatcgacataaacagcaacagcagcaacatgagcagcaagagcagcagcaacatgagcagcaacagcagcaacatctcggacacattggcaacattggacagtggagtgggaaaaattaatcccgctgaactgctgacagccgccttggccgtgccctgtgccaaatgctccaagccatcgatgatctccggcctgaccaccgccgtaaccgcatccacagtccccgcatccgcatccagctcttccgcttctgcctcctccttttcgtcgtcgtcaaccagttccggatcggagaccgccagcaatcacagcgatctccattacccggagccggttgtctactccgccaagcagtatcgcaagtccaagtcctacatgggcgtatcccagtacaacagctcacaaaatggccatcaagcgggtcgggcgcccaataccgctggcggtggtaatggcaaccacgtggcctatagacgctcccacagcgaccgacgcaactcgttcgatcgcagcttcgccgaaaggaatcgtgactttgtgcccatcgtcccaccgccgcgtccggtcctgtcctcctccaacatcgccggagtcatggccagcaccaccaagctgacgatcatagagcggctcggcaaaggacgtctcgcgtatcccataatgcagaatattacgtatacgccctggccgacagcggcattttgtcggcagcgattttgtgcaatcgagagaggcgaatgcgatgctaatatacggaaataccgatgtctcgccttgaatctccgtcactcttaa

SEQ ID NO: 1548 - protein, 204 aa, DROSOPHILA
MISGLTTAVTASTVPASASSSSASASSFSSSSTSSGSETASNHSDLHYPEPVVYSAKQYRKSKSYMGVSQYNSSQNGHQAGRAPNTAGGGNGNHVAYRRSHSDRRNSFDRSFAERNRDFVPIVPPPRPVLSSSNIAGVMASTTKLTIIERLGKGRLAYPIMQNITYTPWPTAAFCRQRFCAIERGECDANIRKYRCLALNLRHS

SEQ ID NO: 1549 - DNA, 11259 bp, DROSOPHILA
tagctctgtaatcactaacttaaaaggaaagtgtctgcgcaaagctttgaatccctggccaaatcataaaaaccaattatagtctaattaaaatcaataggcagccatgaacttaattgtactcctcatatatctgataatcaatggttatttccaagtaaaatactaccatttctggttaaatgtttaactacctcggcggaaatgtgctcaaataaaaaaaacaaattatttcattgaatttattcaatttgttcttgaatgctgcaatgtcacttgggatcttgataaattattctggaaataaactcttgcaactattgatggcataaacgaacgcatatgaatgtcaaatttgataaaaatgcgtggaaaaaagcattcgattggtgaaatatatagcagcagaaagtgctaaataaataatgaaattacatttatatgccgaaagtttgcacctttgaggtaagaaaaaactgcacaattttttcgcttaaattcatatgtactccatatatattccaggagctaaaaaaaaaaacaacagaactttatagtttttcccatttttaaccgcacaatgtgcacgccatcaaccatacatagatggcgccaccaagcgaccatcaaacccacatcatcattgtgatcaatgatattcctttcagtttcatggcttcgtaaccccagccaatgcatatacatatatatgaatcaaagtagctggaaaaagaacaatacaaaaaaggcgaaaaaagaaaccaaatataaagtaaaatcgctaggtgcaaccaacaaacgagaaggcgaagtgcaaaacacaaaacaaacaagcaaaacacaaatcgcgcacatacagaacgaaatcgagtagaaggataaaaaaaaaacaaaaaaaaaaataaaaacgagttgcacaatgtgtgtgatgtaagtgggtgggtttttgatggttggaagtggtaaggtatggtatggcatggtatacggtgcgtatgggttatatgcttgggctatgcagagaagtgcaaaatatgccaatgacacaggcagcggcagcggcaacggcaacggcccagagccaaagtgaaaggtgaaagataacaagagcctgggaaaatgacaagcaacaaaaacaaaggacacgaaaagggattccagtgggtggtgctggtggaatagggatagagtgaaattgcctgtgtttgacagtggtgatgccaatggaagtagcttaagagccctaaattggaaggaatgcgtacttaagctctgtactctatttaaatatttgtgcagtactttattattttaaagttgataaacgcatagccagagagtttgtagtaaatgccattaaagttaacgttttgcattttggtgtaaaagtgaaaacaaaatcaaataataaacactatgcagagaataataagtgttatagaatcaacattatggaaactttgaaattaaacatggcatattggcatcactgttgtgctggtatgtttgcgtgtagtggtaacatgaaaaagtggctgtttggcagtgttttgagtgtttgttttgcattcgataaccgacagggttgcaccttaccttcgacgtgttgtcctgcacccatgcatctggcttaccatagtccggcggattcgcgtacggatcgtagccgagcacggacagcatgggcgctatgtcggccatgtcgcgcaccacgtcgccgggtatttggccaacccatttggacatcgcctccagattaaccggcttgataacctggtccgacgaacgttccaccctgcaattcggttcaatgttgaattaatggacacagtcctttcgcaattctacgattttcacttacttggacagaggcacaccgttcggtttatttatgaactcctcgtggtgcagcaccgcatcgttccatggcacgtccaggaatttcagtatctttcgcatccactcctcgggatgcagtaccagctgctcatagtaaacctggcagagagaaagaaatacaaatgataagtatacataatactaaaaaacatggtttttttaaatcacagtttaagagttttgactgttttgtgcagctaactttccctatcactgcttagatgatttccaaaaaatgttgcattttttctaattggtaacatcataaaaagttgcaaaaaaatgctaaaaaaaacacgatgatatccaaatttgaatgccagtcgattggaaattaagttacgagcttaacgaggtataatattccccattcagactattattttcattgttacggctaaaatactccaattttattgcggaaaataaaaaaggcactttaggcgaataatgcttacataaatggctttaaaatgcactacaaatacttaacactttaaatgccgcccgaacacatttaaatatacactgttttttttttttaagaccccgccatcagcggaatttaaaagtcagctcgcttaatttcctgtgccagactgcagcaccccgaccaagttaatcatcgttgattgcgatgggtggatggcgtggtggccaaatggcatggtggccaggtgggcatgtgagcatctgactactgggtgactgggtgactgggtggctgggtggccaggggactcactcaccatcatgcagcggtccttgccgatgtcccggcactgctcgtgcatcacctcgatggcgtggttccacttctgcatgcactgccggtagctgctcaaatcgaagccggtgattgtcaccttgcgcgatataatcgaatgaactgtcgcccggccgtcgcgcaccatgaataggaatttagcctgtaacgagcagaaaaacaggtaacaggtgcacccggaaaaaaatatgattaacactttgaatacaaatacaaaaaaaaaaaaaacatagtcaagtgtatatgcatttcatttaaatgttacatttctactttgatggtaaatataaatactacgttttaatcacattataacacagcaaagatgagattttaaatcgcttgtcgcgacagcttaatatgtttaatgaaatatttgttgctatctctacccagcattcttttggtccaccccagttaatttcgattaaaagggatatttctgtgacaacagccgcggatggcttaaatgctcagactcagatatgctaaatgaaaatggtattgcattactgatatggttatgttttttatgctccgcgtgtggatgcttgttccaggatgcggcgggaggatggggaaattgtatcgccgcgggtgcttacgttcggaaatagctcgatgacataggagcccattttcagcgtcagcggatccttgttgcataagcgcggcgccggctcgccgtgtttggcgatgatttccagacagaactgcgcgatggcactgttcatgacctctttggtgatgccggcctcctgcaggcggagcgactccttctcggacttcagccagtgcgagcgcagctgcaggatgcgcggaatgacacgggtttcctgcccgcagctgcaaggattccaaaaagcaaaaaaacaaaatatacagatgagaatatatacacacaaagcggcggaatagtagtgactgcggggcagcctctgttcacgtggggatagggtgcattgttggccatgttggatctatggattttgaaatctaagctttcagcagttggggcaaaaagtgcagcacaaatggataacactattgtaatcatttcaatgttgcatttgtttgtacttggtagtttggtagctttttagtatgtgtatattatcttactatattgatgattacaactcgtcagcagaattaactaacataaagtttactagtaacccgttctaatgaaaatccaactcaagctccacttcaaaagagtgacgccccaatattgtagtttcgtatcgcctggcaacatgtgatggtgcttccacctccattgtgcaatcctgctcctccacctccacctccgccactgactcctcctcttccttctgctcttctaatgcaatcgacaaaacgaaatggtatgccatccgctgttagctctttgggttaccctccagcggatgtggatgtggaatctcccgtcgcgtttccatgtctggtgcataactcccatttgaatcccctttctcttctctctgggtcccgttccgatttccaggactgcaaaaaccactgaactataaagggcttcaaacgattcgtttgccgctctagaattttccaccggcagtgctccgtaatcaagttcagagcacacacaaaaaatgactgcctgattgcgtaaattatcataaatatcccacactgcagcgccagtcaaacggcaatggaaaaaaaaacgaaggagagcgactcgaacttatgaccccaaaggaaagtaatcaaagtcgatcaaagccttgtttattcaactatttttgtagcccactgaaatgcgtcagatttcatacgaaattatttaatcaacgttgaataaaaaacagtagcgggcggtaataaactaattactacatgtttatccattgctcctaaatgtcaaagatacaaatcaaatatttgatttcatttgtgtgaccgcacaattttgagagcaattaaatcaaagttaattgccttttttaattgaatgaaattgagcaatagtttaagcaattacgatatacgcttgagttaataacaaataatttgtgttggattctaattaacatattctatattaaaaatgttttaacacactaatacaccattttttttttttacattcgacttattgtgcagaatttcagtgagcacttaaagttatcgcccactttccttgtcaacttatcattttaattatatgcacttttaagttgtaagtcaactggtattatctatttgttaattaaagttgttatctgtaaacttatgtgcttgcaattactaagaaaactattactactagttgcctgttgaataatccagaaacttaacaagataaacatacaagttatcaatcccaaaattaccctacattatttaccggctaaattttcaaaagttttccattaaaaccgcaattttatagcccgaaaacatggagtcacctattttgcaccatctaaatcggggtcacaactttatctggccccaaccaattacatttgttcgcacctcaccaagggagtccaccatctcgtcgggtatccctctatcctcaatcctctatccccattcccattcccattcccatttcagtgccaacgccatgcaaatcccacaaaattgtttcggggcttacaccagactcaattagttgatgccaagtctaaatgctaaatgctacaaatactaaaaccagatttaatctaaaaaccagtagggtatgtggagcggcactgggcgaggagacgcggaaacgaggatgacctactccacatacgcttaggcaagttttacactttgcaccgcccacgtttttggagtcctgcaaaggcgaacaaaggacgaggacccattctgtaactaaaatccgtgagatccttgagggaaagggaagtcggtttttaaatagcggaaattgcgctgtgcagccatcagaaaaagcgaacccaactgcctgccagccagctagcaagtcaaccagccaaggcatcccagcatcctgatgtcaggatccaggacgcaggataggccacggacgacaggatggagagaaatggtctggaaatgggccgggctcaaaggcaaattgttaataaaataaggggctaacaaaaaaaaagaaaaaccccttttgctacttgaccatttctcattttcagattgcgccaaattccatggttaattactcatgcgtaagggagacttaagaaattattatattaatatatcgcagcagccagaaggtaggtatgcccgtaaagataaaacccggaccagatacagatacgcaaatggaggccaggccaggatgaggagtaaaaaaaaaaaaagaagagaaaatattaaaattgccaaagggcagaaacggaatatatcgaattggtttgcctgcctgatactggctgctggagattgaagggagagtcaaattgggtagttgaaccgaaccgaaccaaaccgaaccgaaccgaccgagaggaacgccccaaaaaatgtacacattaaaatttacaacattttccccatagagagcggtgtggaaatacactttatggcagtgcaaaaagccgaagctgaagctgaaaaggtcccccaaaaacggaagaggaaattatttggaattcgaatgtttttccaaggcatcgttggcaaatgtttgattctgctcagagtaggtgtgaaatttggttagcagatttcatggcttaaaggatttggaaaatatggtaaacaaacttttgatgagatgtcaaggtggcggaaattgccatctgagatgagtatatattacccattgaatcacttctaaatgaacgtaatggaattcgcattgaattgaaagccctcattttaaaagcatgagcattattaaaatgtaagttgaagtatttcttttgtattcaaaatcaaaagaaagctaagaaataaacgacatcagcttaaacacaaataaattgattgtgctatgcgatacgtgtgaaatatctgaactactaaagtgaaagtagttttcttcgaactacttctcgcaatttagtgaaatgaaaattccaactaaaatttcggcagtcattgccttggaatgcatttcgcatgaaaattcaattttaaattgggcgtttcgttgcaaaggcgagaaatacaagccatgctcaaagcaaatataacaaaaaatacacatttgaataataaagatttgtgataagtcaaagttctcaacaactcgaggcaaagaagtggacttctcccacgcaaaagtgacacaaactttaaattgagtttgccctttgataaaaattaattgttaattgaattgacagcattgatttcgagtcatttaagaaaacatcgccacggggatacatttatgaatgaaattcaacgatttcgatttccatggaaaatgttattcaatacgagtatttgactaacaagtaatgtggaagaacaactgatcaagttattaattatgacttaacatcttgaaaccctcaacgtatcactatacaaccctttccgtgttcaatggcaaaccaataaatcgcttttgatatccgatatgtgcaagactcctccgtcttcacccgggattgggaggagggaaggaaggaagaaaggaaggaaggaagtgaagcattcgcccccgagaccgcggcattgtggcaaacaatcaaatcgaacaggcgacgcgccaagggaaagggtattatccggttaccgggcgagcccagtagccaggcttcgggggactcaggatgcaggattctggagctggtgagcagggcaacagggcagctggggtttccgggcagcttacttaccgcacatcgggatgggcatccagcatggcgcgcatcaaagtcgtcccagatctcggcacgccgcctatgaatattaatggcatctcacggttgtatgaataaacgcgttgattgtcatctgtgaggtatttctgaacgtgtccgtattccgtatccgcagcatccgcatccgtatccgtaaccgtaaccgtgtccgggttttcgcatccgcgacagcaatgggagttggtgaaggcaaaacataaaaaagaaaagagaagaggaatgaaaatagagaaaagttgcaggcgtaaaataaatggcatggctcctgctgacggccatgatgattattattatgattattattatttgtattataataatgatgatgcgaactagagtcgagaggattgtgggtgatggcttctgtggctgaatgagcgcaggtgtcaacgccatcgtgggcattagcgtcagaagacatacaaaatggaggcgacaggtgatgggcattactaaaaatagatgcgagctatccatatggagccccaaatggggacgaagccttatctttctctagcccaaaagccagtgataaattggtaccttaccttatcaatgcaaaggtaaatacggcaaccgcctaatggaaaatcgatcgactttcatacatcataagcattcaattagaaaggtgataaaactggcatagcactatttcgtatctaatcaaagtgttttgtaagataaattaaattgtgaactaacacagatttaatattgttcgtgataacaataattaaacgaactcaaaagttcgtactcattcctcatatcagtttcttacttgtttgttttccccaaattaagctacaaaattgatttttgcttctgcaaaataaagatggattaaattatcaatcacttttgctgctcatttgcatgctgaactgaagtctatgaaatttaagcccattgttcgtagtgctttgtttataaatatactacttggtcatcgcccaaccaatttaatccctggattacaattaatttgcctttctgtgttgcacgtcagccaatttgagagggttaattaagtcacgttttgatttcgcatttccaaagaggctgtctggccttccaaattttccatatttcgcagcacaaatgtccggaatttaagcctatttttaattatatccttcgttccttaattacccgaatgcaggggcatttgcattaatttatactatttgttttggctgaacactgtgatttccattaaataagatgaatttctgttgccatttgctattgctgtgtggcattgcattaaatttaatgcaatgccatataaatcgatgggttcaaataattataattatgcatgcagcatgcagcatgcagcatgatagccgaattaagccatgtctacacatccccacataattggacccacaaaatccccggaattaaagcccctttcatgtgtaaaaccaaggaaccaaggatgtgggatgtgttaatgctctgtggaaatgatttggccatttcggacgcattgcattgtcttccattttgtggagtcgtcatcttcatctgatgggcccatcccctccagctttgctacccatttcgaaagctgcttatgacctccgccttcgatattcccaatgctaatcaatggatataaccccccaacaccatcgaccatttcaattccaacgagaccattttggtctcgactaatgtttacaaaatcgtgttcggtcatccgataaccagttaaattccctgaatgacttttgctttggttttgcgtgtgcggttggtgtttttccgggatgggggcggctggattttcatggctgtgctcagccaacatgaaattagttatccagctaaggttctactcccatgcatttttttcctttgatttatcattgcaaatgttttgtgtttggcttggtcagcacgaggggcagtggacgtcacagtgcgtcacaaaaatgtagagctctatgggctaagagagtagaacaaagctggtttcggggaatcactcctaaatgaagatatttggatataccaatagtagtagctccctttcaaagctcaaagtcccattcatttgttcaaacttaaaatcatcatctctgtttaacaatgtcctggaatcagcatcctgctcagcatcccattgatttcggaatcaaaaatggattatcaaatcaggcaagcctagaatctgtaaggaactgattgctgcttgccgccccaggtatatcagcccttttaccatttgattcaatttaaatatttcgtatttcgtaattcgtattattcacatccttacatttttgcgacgcaacttgaagcaaaggaagtagatgttgcgggggggtgtgactatgtgtgcttttccaatttttttctttttgttccggaacggaaaggatggaatgatgtgagaatgggaggatggatatgctggttgggtgtggggcaaacagattgtgttcgatttgggggtacatacctcaacgcgaaccatttgggaggagagctcgttggcggcgtccaccttgaagaggcatgtgggccgcagttcggtgaatttgaataggaacatggtgatgacgatgatgccgaagagcacccacagggtgaccttcttatttcgatatggcagtcgcattctggcgatggtctaggtgtcgcagataactggcctttgattcggatgacggcgaatgacgatgatgtggtctactcctggccttctccaatctgatctgatctggtgtgtggggtggagtggtgtggagtgctgctctcttcttcccggaggcgcccactcgtcggtattttttcttatcccagctcctattgattgcgtctagttgctactccgcatctacgtttgcccaaagcttaaatatgtaaattggttttcttgaggtcctcaaagcgagagttttgctttggcttttgcttttgctatagcaaggcagttgctgttgctgttgctagtgccccgtttgccgtgttgctccttgtgatgccagctcctcttgtttgccaaggatgcggagggtgggaatatcgggaggatgcggtatgttgggtgttggacgggctggcggtgatgtgcctatagtgcaggatactgctgatgctgatgctgatgcggcggcggcttggcggtgccaccacaataactccgtccacggtcttggtggtcctgttccggtctgtgttctggtctctgttcctgtttctggtgctggttctggtcctgctgctgctcctgcttatgacgttgattgctttgcatcgcctcgccttttgtttgctcctttttggccagccagaagcagcaacaacaacggttggcttggccaacaacaacgcagcataacacaacagaacacgatcctggcaatcctggcagtgtcccgactgtccaactggcaatcctagcagctgccgcaggttcccctatttatcactcctcttgttctgccgccttctagtcctggctttccatttattgcattcttacaaaatatatatacacattgataacacgctgcaacggaaagagcaaagactacgttaagcatatttaaatggtttgccacgagttattgtttgccgccaagatatacgatactctgatgtctacgagaaaaacatcgctatggcaaacagattgcaacatggatgtggatttttttctatttaaatgatatacgctactttatgagcaca

SEQ ID NO: 1550 - DNA, 1234 bp, DROSOPHILA
agtagaccacatcatcgtcattcgccgtcatccgaatcaaaggccagttatctgcgacacctagaccatcgccagaatgcgactgccatatcgaaataagaaggtcaccctgtgggtgctcttcggcatcatcgtcatcaccatgttcctattcaaattcaccgaactgcggcccacatgcctcttcaaggtggacgccgccaacgagctctcctcccaaatggttcgcgttgagaaatacctcacagatgacaatcaacgcgtttattcatacaaccgtgagatgccattaatattcataggcggcgtgccgagatctgggacgactttgatgcgcgccatgctggatgcccatcccgatgtgcgctgcgggcaggaaacccgtgtcattccgcgcatcctgcagctgcgctcgcactggctgaagtccgagaaggagtcgctccgcctgcaggaggccggcatcaccaaagaggtcatgaacagtgccatcgcgcagttctgtctggaaatcatcgccaaacacggcgagccggcgccgcgcttatgcaacaaggatccgctgacgctgaaaatgggctcctatgtcatcgagctatttccgaacgctaaattcctattcatggtgcgcgacggccgggcgacagttcattcgattatatcgcgcaaggtgacaatcaccggcttcgatttgagcagctaccggcagtgcatgcagaagtggaaccacgccatcgaggtgatgcacgagcagtgccgggacatcggcaaggaccgctgcatgatggtttactatgagcagctggtactgcatcccgaggagtggatgcgaaagatactgaaattcctggacgtgccatggaacgatgcggtgctgcaccacgaggagttcataaataaaccgaacggtgtgcctctgtccaaggtggaacgttcgtcggaccaggttatcaagccggttaatctggaggcgatgtccaaatgggttggccaaatacccggcgacgtggtgcgcgacatggccgacatagcgcccatgctgtccgtgctcggctacgatccgtacgcgaatccgccggactatggtaagccagatgcatgggtgcaggacaacacgtcgaaggctcttgttatctttcacctttcactttggctctgggccgttgccgttgccgctgccgctgcctgtgtcattggcatattttgcacttctctgcatagcccaagcatataa

SEQ ID NO: 1551 - protein, 385 aa, DROSOPHILA
MRLPYRNKKVTLWVLFGIIVITMFLFKFTELRPTCLFKVDAANELSSQMVRVEKYLTDDNQRVYSYNREMPLIFIGGVPRSGTTLMRAMLDAHPDVRCGQETRVIPRILQLRSHWLKSEKESLRLQEAGITKEVMNSAIAQFCLEIIAKHGEPAPRLCNKDPLTLKMGSYVIELFPNAKFLFMVRDGRATVHSIISRKVTITGFDLSSYRQCMQKWNHAIEVMHEQCRDIGKDRCMMVYYEQLVLHPEEWMRKILKFLDVPWNDAVLHHEEFINKPNGVPLSKVERSSDQVIKPVNLEAMSKWVGQIPGDVVRDMADIAPMLSVLGYDPYANPPDYGKPDAWVQDNTSKALVIFHLSLWLWAVAVAAAAACVIGIFCTSLHSPSI

SEQ ID NO: 1552 - DNA, 3967 bp, DROSOPHILA
gccgctggtggacaagctgctcgagggattccagtgcactgcactcgcctacggccagacgggaacgggcaagagctactcaatgggcatgacacctccgggagaggtgggtttttcgtttagccatcagtggcttaaatctttcccactgatctatcgcttctattcctttacagatactgcccgagcacctgggtattctgcctcgcgccctgggcgacatttttgagcgcgtgaccgcccggcaggagaacaacaaggatgcgattcaggtgtacgcctccttcatagagatctacaatgagaaacccttcgatctgctgggctccacgccacatatgcccatggtggcggcgcgttgccagcgatgcacctgccttcctttgcacagccaggcggatctgcatcacatcttggagctaggcactcgcaatcgacgcgttcgtcccaccaatatgaattccaatagttcgcgatcccatgccatagtcaccattcacgtgaagagtaaaacccatcactcgcggatgaatattgtggatctggccggttcagaaggcgtgcggcgaactgggcacgagggcgtggccaggcaggagggcgtcaacatcaatctgggcctgttgagcatcaacaaggtggtgatgtccatggcggcgggccacacagtgataccataccgcgacagcgtccttaccacagttctgcagggtaagtgctacgttttggatcgtctcatgctcaattagttagtggaccatttgggttcaagcctttattgattagcgacttagtgactactataaatattgactgcaacttcttgccgttttcattctttgcagcctcgctaaccgcgcagtcgtatctgacctttctggcctgcatcagtccgcatcaatgcgatctcagcgagacgttgtccaccctgcgttttggcaccagtgccaagaagcttcggctgaatccgatgcaagtggcgcgccagaaggtgagccatctatatgtaattaaagtccacacagtcgaggatcacctcgcgtatacgctgtttaaatgtagcctcgttgcccgcgcccaggaaaccagctccatggagatccgtagtggcccccgcctcgatgcgctcgctaattgcctgaaggtcgggcacatcctgaccctgcatcgttacaatgggtagaaccatcatggcgagaagcaggcccacagccgctttggtagccacctgttcatcgaatgcaggacggggaaaaagttgctccacccgctcgcctagtctgttgcgaacacaacaatacaatagttgaagctctaggattcttatacttttacttacctaatcagctgcaggcccaactcttcatagtaatcctcgagcatattttcgaggtgtcgctgccggaatcgccgcgaagtgcaagtgaagaggaagtaagctagatcggtgaccggcgaggcatatcgcatcagttgccagtcgatcaggcgcacgtcctcgagctcgccccgctctgtactcttgtagagaatgttgttattccagcaatcgccgtggcaaataacagcgaagggttcgcaattgaatccgctgaccaaaggcagcagcagctcaaagtacgatcctctggcgaagtacgcctccagacgaactctgtatgcatcatccgccggtgcgagcagtgcggatagggcgctttccttcagattctcgaagtagacccccaaggcatgatcatcgcgtcgctgctcaaagatatccaccagctgctgcagttgttgcattttctcgggcaactgccgtttcccggccaatgatatagcatgtaatttggcataggtgagcattacgcgacgcacatgctcgacggataggtcgagaaagcgattgtgcagtgagaagccggcacaagacagatcctccagcacgatgcactcgttgggctcatcctggcgagttccgaaacagagcgcgtgctgccggaaacgatcatctccgattatcttccacttatcctgaattaacgcagtcagcggcagaaagacctcatatgctgccgtctcgcgcaggaaacatggtcgtgcaaagaattgcttgcggcgcacgcgattctgtggcggcagtttaaccaccaggctgcgtttcgaatcggatgccgcctgtaggcgccacaccacgcccaaatagttgtcgcccttggcactcgccctttccagacgcagttccggattggcgcccagctctggccacagctggctgaccagttggcgaaggaactgtgtaacctgctcgttgggcagatcttcgtctggcttggctgtgtcctcttgttgctctacaggactctccatcctgtctgggtgctctctattcacctccccatttcgttcatcttcggtgtcttcatgtggatctggttcggcttccttctgatcaacttgctctgctggagctgctaggttgccagtgagctgaatctcactcgcagagatttctgctagtttttccctgtccgcattctctgccagctcatcctttgatttcgcctcaggctcatcatctccttccaacaactgatctccaaatgtttgattcaactggggaatttttttatcaagctcctctatgcctttgagctcttgtttgtcgatcactttcgaatcaatctctttggctagttgtttttcaatgtgctccacctcagcacctctcggttcctccaactctgccaccaattcctcctttttcacacgattatcttctaaatcctgcactgcttcgctgttatttgagttctcctcctttggttcctcaacatcaattcgtttaggtgacttctgatcgacatctggataactttctgttgagtctggtgaatttccttgatcggatgccacttctatcacttcctgactttggcgatctttctgctccccctcctgcgtcttctcactgggctgttccatggcacactacgccaccgccgcgagtgtggatcgtttatatagagaaaccaagccgtaccgaaccgaactcattccaaccgcactgaccgcaaatcgaacgatgcagttactcgagtttcatccacccatcttgctctgattgcagcaatcgctggccgcacggacaacacacgtcttccgccaagcgctatgcacctcgacggccatcaagtcaaacgcagccaatcataatagcatagtggttccaaaatccaaatatagcacaaccaagccgctgagcgccgtgctccatcgaactcgctccgaacttggcatgacgcccaaagctaagaaaaggtgagtaacacggaatggaccaaaagcgaagatgatctaatcctcccatatcttcctccatagggctcgcgagctattggagctggaggagaccacgctggagctctcgtctatacacattcaggacagcagtctgagtctgttgggtttccatagcgatagcgataaggataggcatttaatgcctcccccaacagggcaagagccaaggcaagccagcagccagaactctacgctaatgggcattgtcgaagagaccgagcccaaggaatcgtcaaaggtgcaacagtcaatggttgcccccacggtgcccacaactgtacgctgccagctgttcaacaccaccatcagtcccatcagtctacgggcatccagctctcagcgagaacttagcggcatccagccaatggaggagacagtagtggcttcgccacagcagccatgccttcgtcgttccgtgcgtctagcgagtagcatgcgttcgcagaactatggagccattcccaaggttatgaatttgcggcgcagcacgcggctggcgggaatccgggaacatgccacctccgttgttgtgaaaaacgagacggatgcgataccgcaccttcgaagtacagtgcaaaaaaaacgtacgcgaaacgtgaaacctgcgcccaaggcctggatg

SEQ ID NO: 1553 - DNA, 1908 bp, DROSOPHILA
atggaacagcccagtgagaagacgcaggagggggagcagaaagatcgccaaagtcaggaagtgatagaagtggcatccgatcaaggaaattcaccagactcaacagaaagttatccagatgtcgatcagaagtcacctaaacgaattgatgttgaggaaccaaaggaggagaactcaaataacagcgaagcagtgcaggatttagaagataatcgtgtgaaaaaggaggaattggtggcagagttggaggaaccgagaggtgctgaggtggagcacattgaaaaacaactagccaaagagattgattcgaaagtgatcgacaaacaagagctcaaaggcatagaggagcttgataaaaaaattccccagttgaatcaaacatttggagatcagttgttggaaggagatgatgagcctgaggcgaaatcaaaggatgagctggcagagaatgcggacagggaaaaactagcagaaatctctgcgagtgagattcagctcactggcaacctagcagctccagcagagcaagttgatcagaaggaagccgaaccagatccacatgaagacaccgaagatgaacgaaatggggaggtgaatagagagcacccagacaggatggagagtcctgtagagcaacaagaggacacagccaagccagacgaagatctgcccaacgagcaggttacacagttccttcgccaactggtcagccagctgtggccagagctgggcgccaatccggaactgcgtctggaaagggcgagtgccaagggcgacaactatttgggcgtggtgtggcgcctacaggcggcatccgattcgaaacgcagcctggtggttaaactgccgccacagaatcgcgtgcgccgcaagcaattctttgcacgaccatgtttcctgcgcgagacggcagcatatgaggtctttctgccgctgactgcgttaattcaggataagtggaagataatcggagatgatcgtttccggcagcacgcgctctgtttcggaactcgccaggatgagcccaacgagtgcatcgtgctggaggatctgtcttgtgccggcttctcactgcacaatcgctttctcgacctatccgtcgagcatgtgcgtcgcgtaatgctcacctatgccaaattacatgctatatcattggccgggaaacggcagttgcccgagaaaatgcaacaactgcagcagctggtggatatctttgagcagcgacgcgatgatcatgccttgggggtctacttcgagaatctgaaggaaagcgccctatccgcactgctcgcaccggcggatgatgcatacagagttcgtctggaggcgtacttcgccagaggatcgtactttgagctgctgctgcctttggtcagcggattcaattgcgaacccttcgctgttatttgccacggcgattgctggaataacaacattctctacaagagtacagagcggggcgagctcgaggacgtgcgcctgatcgactggcaactgatgcgatatgcctcgccggtcaccgatctagcttacttcctcttcacttgcacttcgcggcgattccggcagcgacacctcgaaaatatgctcgaggattactatgaagagttgggcctgcagctgattagactaggcgagcgggtggagcaactttttccccgtcctgcattcgatgaacaggtggctaccaaagcggctgtgggcctgcttctcgccatgatggttctacccattgtaacgatgcagggtcaggatgtgcccgaccttcaggcaattagcgagcgcatcgaggcgggggccactacggatctccatggagctggtttcctgggcgcgggcaacgaggctacatttaaacagcgtatacgcgaggtgatcctcgactgtgtggactttaattacatatag

SEQ ID NO: 1554 - protein, 635 aa, DROSOPHILA
MEQPSEKTQEGEQKDRQSQEVIEVASDQGNSPDSTESYPDVDQKSPKRIDVEEPKEENSNNSEAVQDLEDNRVKKEELVAELEEPRGAEVEHIEKQLAKEIDSKVIDKQELKGIEELDKKIPQLNQTFGDQLLEGDDEPEAKSKDELAENADREKLAEISASEIQLTGNLAAPAEQVDQKEAEPDPHEDTEDERNGEVNREHPDRMESPVEQQEDTAKPDEDLPNEQVTQFLRQLVSQLWPELGANPELRLERASAKGDNYLGVVWRLQAASDSKRSLVVKLPPQNRVRRKQFFARPCFLRETAAYEVFLPLTALIQDKWKIIGDDRFRQHALCFGTRQDEPNECIVLEDLSCAGFSLHNRFLDLSVEHVRRVMLTYAKLHAISLAGKRQLPEKMQQLQQLVDIFEQRRDDHALGVYFENLKESALSALLAPADDAYRVRLEAYFARGSYFELLLPLVSGFNCEPFAVICHGDCWNNNILYKSTERGELEDVRLIDWQLMRYASPVTDLAYFLFTCTSRRFRQRHLENMLEDYYEELGLQLIRLGERVEQLFPRPAFDEQVATKAAVGLLLAMMVLPIVTMQGQDVPDLQAISERIEAGATTDLHGAGFLGAGNEATFKQRIREVILDCVDFNYI

SEQ ID NO: 1555 - DNA, 4926 bp, DROSOPHILA
ggatctcggatcggataatactagaaactagagactaagtcatcaaataccgcataacatctacagtgaaaatggagtcgagctgcgtagtgaaagaacctatatatacatgtatgtggatgtgcacgagtgtatctgtctaatcgttagttccccccgactcgcaagcatatagcacacacacgttctacacataacataacatatatgatacatttgtcaaaagcaaatgattaaggcccacaatttttggttacccaactggcagacaaccctctggagtcggaattaacgtttggatcttagtattaatctggattttaggtacacacgaatgtcgaaataattattataattataattaaaccaataatgagatcattcaataaagaacgagtataattttaaagtaaaccaatgttgtctttgaacatttaccaatctagagtcttgagccatcctggtttatctacaacttgtttggtgactcgatcgtcagtgctgcacagtgggtcgaaagtaattgtaaaataaaataaaataaatagtttttgggcatataaaaagaaacatttaatagttaatgctattaaagcatttaatagattggatatgtaggcatatagatctttatagtataattacattattaatttaaaattgtttcagattttatttatttcctgattttgtggtacaagttttcctagttttcttctttttcaaagtgtagagtggtccataaaaaccatatctggacccactgtgcttgagtactcagctgttttgggtttaccggttgacccaattaccaccaatggtcggttaggtgcctttcagcgctctttctctggctttgcctctcggcttcgaggcttgagttcacggtgaaggccagaagaatgacagagagaagagcgaagacttgacttgacttgacttaaagaaagagtcgagaatcggccagaggcagctggtccgacgaggcggctacttgattagtcccaaagcgatcgcagaccgagacggaccgacgacaagaagctgcagtcttaaccgttaaaagtaattcttttgcatttgcattcttcaagtttcatttcttctcgccagtggtgattcatcaagaaatcggttgtttggttgtcgggttctctgtcggcggtgtgattcccgttctttttggttcggccgcgaagaaagttgtcttcaaacatgttaattgcgacgaggggccgtgggccgtcgatttcttttaacggtctaagtttggccaaacgaaaacacttttcgtttaagccgataatcgaaaacatctagacatttgacaaggcctacacttaggttttctttattcagtcataaagttcagcacattaagttggtttaaagtctaagaaactttttttgtgaagaggtcgttagatccgacttagatgatcttgctttttatgtacacataaaagccattatttgcagggaattttaacggagtagtcaaacgtataatattaataatattatatttattaatagaaacaacaaacacttattatattattattaaatcggacttagatatgttgtcagacaaaaaggcggctctcctgctggtgaccgcgattaccgccctcaaattggaggaaatgaatgcctatagacgcaacttcgatgcgcggcaaagtagtaattcgaatattccactctggaaacagcgagtaagttggagaacctaacgttcataattttctcgaaccaattccgaaaatattcgattacctaaggcctgtgagaaatcacagaaacagcggcaaaatgcacactatgtttgcgatgaaaaaggtgacttcaagtgccttcctgggtggcagggtgatctttgccaggtgcctatgtgtcgaaggggctgtgacccgatgaatggtatgtttactccttcagatgattccctatcttgtgacccctgaactcacattcacacaggttattgccagcgacccggtgaatgcaggtgtcgcatcggatacagcggcgaactctgcgacaagtgcattccgcttccaggttgccaacatggcggatgcaccaagccattcgagtgcatctgtaagcctggctgggcgggactcttctgcacggaacgtaagtagttaccggaaaaggataagcctgattacaatcttacatttaaagaacggagcatttagagaaggagttaaaacatagggaactaatatcgttttgggggttgtacttgttatatgacatttccaatcaaatcaaacattcctaactctgtccaatccgattactcaattgcctgtttcctccaatccgcgcgcaaccaaagcaagttgccgtaccggatgccacagcacccgtggatattgcgaagcgcctggggagtgccgctgccggattggttatgctggacgcacctgctccgaatgcgccacgatgccgggctgtcagcacggcacctgcaacaagccactggaatgcctctgcctacccggatataccggactactttgccagacgcgtaagtcctgcaaccaccaaaggaatccgccattcaccctactaatcccaaactccattccgccattccagcaatctgtgacccagattgcagcaagcagcacggatattgccgcaaacctggcgagtgccggtaagtaggagcagcatttcaataaagaaaatgcagaaaatgtggtttcggcaagctggagtgccccttttcggataagtcaactatttttatccttaatttaacattcccaagcattatggctcagttagctaacagcaaactaacagcaaaacgaacccatatctgtcatcaattttcacggacatccccttcttctccagctgcaaggtgggctggacgggtagccagtgcgacaagtgcttcccgtatccgggatgtgccaatggggattgcgaggcgccatgggagtgcaactgccatcccggctggggcggaatgctgtgcgacgagagtgagtatatccgtatatgtgaccatgccaacgggaaattgaccgagttgacccacagagctcacctactgcgtggagcatccggatacgtgcgaaaacgggggcaagtgcacatcgctgagtcgcgaggatgggagctaccagtgccagtgccggcagggatttctgggcaagaactgcgagatacgcgatgactttctgctgacctcagaggcgccaccgcgaatcacaccgcccacacccgctgagctcgtactggaactagatggcgaactggaccagaacgggcagcaggacatcggtgcaggtgtgcccgatgacagcgagccaggaggcgggctggttggagaaaagttgccagcgggtaacgagccggagcggcggaaaaatgacacggtagccaacgtggcaaccgcaggaactggagctggagcaggacccatgaattcactacccggcaacagcaacgccacaaggacgacattggtggtggcaactgaaactggcagcgacaatgcgactaatgaagcgttaagcgccgttacaacgaggcgtgccaccccgattcccctcacatctggcgaaaaaaccgtaaagggtaatgcaacaagcgtgtcggtagcgacaggacctcagccacgccccccgctgcccatcgtcgctagccaggagcaaacaatagcaaatttggcgccagctggaacagtaacagtaacagcaacaacagcaccaacggctacaacagccgcaacatccgtgaccagccacaaggataagccaaatgtggcagacgaggaggaggacgaagatgacgacgatgatgaggaggatgaggatggcgagtacgatgaggaggaggatgaggacgaggacgacgaggaggatgacagcgatcaactcataccaaatattatatagttaagaacctgacaaatgacaagtaatccctcttatatatatatacacattgttcagttaagggcccacatatgcagcatctcaaagcaatttttttttttttctgaatatttattattaactaatgaatgaaacatccaattaaaaaactccatccattgcgatagatatacatatataaattgtatttatttatgataattttagggattaagctaagcaattttcgatttaacaaatgtcaaaaaaaaaaaatgatattattaaagtttgctaatcttaagtgctacaagaaatcgttgaatcgaaatatgaataggggaccagaggattggactcagagcctgtgggagttcaattcctgcactcggattgcacttggttcgcttaaacttaagacaaatgggggactacgagctcgggtttgaatggggatctatatggccatcttagcgccaccgagttgggggtagtacgattggattgggtatcgaaaattggaatatggaaaccagcacatcatagacatctaaacatacatatggactcttgcatatgggcgttaataaatatatgtagtaactggtatgggagacttacgaatcgacaaaaaaatatgtagaagtatgggagagagagagaatgactcaatacaatatcgatacgaataataataataataattataataataataatgggtattgcaagagcgagtagctaagcaatcctggttgccttagttgagctcccgcttgtcgcgctgactgatctgcgccatggtgatatactggcgcaccaggcgcgagatctcgtgggcctgctccgtttggacacggatcacgcgctgctgcatcagattgcccaccttcatgtccaggaagagggcgccatcctccgaacgaacctgccagaatatattttcagtaagcaatacagtttgccattggcaggcaatttcaactccatacctttcgcgtggaaatgacctccatgaagc

SEQ ID NO: 1556 - DNA, 1747 bp, DROSOPHILA
agtcccaaagcgatcgcagaccgagacggaccgacgacaagaagctgcagtcttaaccgttaaaaatatgttgtcagacaaaaaggcggctctcctgctggtgaccgcgattaccgccctcaaattggaggaaatgaatgcctatagacgcaacttcgatgcgcggcaaagtagtaattcgaatattccactctggaaacagcgagcctgtgagaaatcacagaaacagcggcaaaatgcacactatgtttgcgatgaaaaaggtgacttcaagtgccttcctgggtggcagggtgatctttgccaggtgcctatgtgtcgaaggggctgtgacccgatgaatggttattgccagcgacccggtgaatgcaggtgtcgcatcggatacagcggcgaactctgcgacaagtgcattccgcttccaggttgccaacatggcggatgcaccaagccattcgagtgcatctgtaagcctggctgggcgggactcttctgcacggaaccaagttgccgtaccggatgccacagcacccgtggatattgcgaagcgcctggggagtgccgctgccggattggttatgctggacgcacctgctccgaatgcgccacgatgccgggctgtcagcacggcacctgcaacaagccactggaatgcctctgcctacccggatataccggactactttgccagacgccaatctgtgacccagattgcagcaagcagcacggatattgccgcaaacctggcgagtgccgctgcaaggtgggctggacgggtagccagtgcgacaagtgcttcccgtatccgggatgtgccaatggggattgcgaggcgccatgggagtgcaactgccatcccggctggggcggaatgctgtgcgacgagaagctcacctactgcgtggagcatccggatacgtgcgaaaacgggggcaagtgcacatcgctgagtcgcgaggatgggagctaccagtgccagtgccggcagggatttctgggcaagaactgcgagatacgcgatgactttctgctgacctcagaggcgccaccgcgaatcacaccgcccacacccgctgagctcgtactggaactagatggcgaactggaccagaacgggcagcaggacatcggtgcaggtgtgcccgatgacagcgagccaggaggcgggctggttggagaaaagttgccagcgggtaacgagccggagcggcggaaaaatgacacggtagccaacgtggcaaccgcaggaactggagctggagcaggacccatgaattcactacccggcaacagcaacgccacaaggacgacattggtggtggcaactgaaactggcagcgacaatgcgactaatgaagcgttaagcgccgttacaacgaggcgtgccaccccgattcccctcacatctggcgaaaaaaccgtaaagggtaatgcaacaagcgtgtcggtagcgacaggacctcagccacgccccccgctgcccatcgtcgctagccaggagcaaacaatagcaaatttggcgccagctggaacagtaacagtaacagcaacaacagcaccaacggctacaacagccgcaacatccgtgaccagccacaaggataagccaaatgtggcagacgaggaggaggacgaagatgacgacgatgatgaggaggatgaggatggcgagtacgatgaggaggaggatgaggacgaggacgacgaggaggatgacagcgatcaactcataccaaatattatatag

SEQ ID NO: 1557 - protein, 559 aa, DROSOPHILA
MLSDKKAALLLVTAITALKLEEMNAYRRNFDARQSSNSNIPLWKQRACEKSQKQRQNAHYVCDEKGDFKCLPGWQGDLCQVPMCRRGCDPMNGYCQRPGECRCRIGYSGELCDKCIPLPGCQHGGCTKPFECICKPGWAGLFCTEPSCRTGCHSTRGYCEAPGECRCRIGYAGRTCSECATMPGCQHGTCNKPLECLCLPGYTGLLCQTPICDPDCSKQHGYCRKPGECRCKVGWTGSQCDKCFPYPGCANGDCEAPWECNCHPGWGGMLCDEKLTYCVEHPDTCENGGKCTSLSREDGSYQCQCRQGFLGKNCEIRDDFLLTSEAPPRITPPTPAELVLELDGELDQNGQQDIGAGVPDDSEPGGGLVGEKLPAGNEPERRKNDTVANVATAGTGAGAGPMNSLPGNSNATRTTLVVATETGSDNATNEALSAVTTRRATPIPLTSGEKTVKGNATSVSVATGPQPRPPLPIVASQEQTIANLAPAGTVTVTATTAPTATTAATSVTSHKDKPNVADEEEDEDDDDDEEDEDGEYDEEEDEDEDDEEDDSDQLIPNII

SEQ ID NO: 1558 - DNA, 3176 bp, DROSOPHILA
atatatatgttataagaactgcatgttcaaatttgagtttgaattcgagtttaggctcagacaacattataaactaattaagtattggcgtagatttgctctgctctctttttttttttttttgaaactgctgaactggatctggaacagcgtttacgcgtcgtaattttctctagagggcagttggcaacgtttcgagtgtaaatcaggcagagtcaagcgaaggatacttaggcttagaaattatccgggggcgtgtagatcttaggactaatgactggcggcgctggcaagccgttttgctcttgaggtaacttccattcaatgaacggcaaacgaaggcgaaggcaaattgtctacaaactagtgggatgccatgcctaaagtagcaagtctgtctatggctaggcatttatttgctttacaattttgttcattttcggaagggggaccacctacgtatataaataactacagtacaattatgagggttgcagaaatcccagtggattttaatagcatttaggtgcctaaaaatagctaacaaattcgaagtattaactaactcgtttacctaaatttaatcgtaacaagttctatttttaagaataatcatcgcaaactaatataaccaataacggttcatattaagaagaaaaaattaaattgaactttaaaactaatttacaaagaatgcattgctattcaataaaaactgcaacttgttgtgtccaaatccctaggatttctgcatagctcgcgaatttctagacttaggcaagttataaaaacttctaaaatcgaaataaagcgtttaggcgcgtgttttgtgtatctgtatgtgtatgtgtatgtgtttttgtttgtgtatgtgtatgtgggtgcaatatcacgtgtctactcaatgccgaacgtgttggtctcctcgacggccagcagcagcttctcgtacagcagttcgggtgttggatacggcggcaaatccagccgattgaagcatgtgtgggcacggggcagtgcatttggcttgccccacttctcgatgcagaaacgcctcgggccagtcgatccgcgtaatgccgagaatccttcgtacggtatgctcgacgtgccagtcacgaactgaagcagacgaagacgctgctcgttgctaaagcgctcgataacctgccagaaccaaacgatcacctggtggttatcatggtaaccagaacgatactctgtgttcaggcgccaatcgtttgtgtctatttctgcagtgccggcaataaccagctccaactctcgggcatcaaagacggaaacgaggcgcgagtcgatcacctcgtaaaagccgcgcaccagcgactcggtctgctcctgaacaccgcgctccagacgccacttaatcatgcgctccaagtactcctttttgttcttctcgttgatgatgatattcttgccaccgggcttcagttccctgtccaccacactgccaagcagctcctctgtgacacagaacgttaggccaagatccacgcccgtgccgatgtcattgtcgcgtatccattggagcgactgatggaactcattgtccagcgactccaaatcactgagagccacgggcaggcgcagcagcgccttgtaaaagggacgcgtaaagaatgcgtccagtagatactgatgtaccagtgccaatcccaaaactcgtccactaaagcggaaccaatcgtggcaattatccacgaacgccgacaatggtgacacctgcacggtgtacgtatcgttggctgagtactcgaacagtccgtagtacggattaaacagttcgcgcgaaagtaggaagaagaactcgcgtgatggtccgccatagtccaggccctcctccgtatcccagagcacggcgagtcggccgcgttgcaggtccttcttgttggcggacatgatgcgccggaaggcgtcctccagcaaatggctgcgacgaatgtgcagtcttcaaaatgataacgcagtttagtatggtttagtcaacagtttggtaatgcgattcttacttaagcttgtgtggtccttgtccgtagcccttggactctagtttgcgatagaaactgcgcagtttggcctcgaaatctctgcgaaatggtggcggcgcacgctgtggcatccgggagttgaggaccggcgatccctgcggactgcgctcttcaataggaacaaagcccatgatctcctgctcgaacaggctgtgtgaaacatagaaattcaaattagctgcactcgtcgcaaacagcaattaagtaactcataaatctatggccagaacacttcgcttttggtggcgtcactttcgctccagcggcccccggcggtgctattgatgcctcatggctaatccggcaattgattagcgcgcgcggcagagcaacagcacatacgacaggccggaaaggacaccaatccaaatccacatacggtatgtgcgttgatagcggattaaggagataaatgcgctttggacttgtgacttgatcatatgggataactgagataaaatctaagatcattgcatttcccctgactaaagctaataagactaaatattttgcatactgatgtgccaaatctttaagaacccaatgaagaaagacataaaattacaatcaattaaaattcaagaactaattgatctgcataattatgacaacatttgtaacttcgcatatgtaactataaacacttgttcaggctgaaaaatcatgcgattgcagccagctggctgatacgtcactcgatgcgacatatagaaccgattctggtgtcgacccatttgcatcgaaattcagcgctgatgaaatcagaccacagatgagaagatgaaaaggtcagcggggcaagtgatttgtcatgggcattaatatgcgacttgaatacattgctgaagagcgatcgattctttcttccgcccctggatggccacgcccacgcccatagccccttgcataggccaaaagaccgtcaaagttttctcaacgccaggcggaagaattgctcgatttccaatcaatgcaatcgattaggtaaaaaatgcgaccttcgcccaaaagccagaacacacttttccttccctgttttttttcttcttttttttttgaatagtattaactattccgattctaagtagttaatccataatttaa

SEQ ID NO: 1559 - DNA, 1204 bp, DROSOPHILA
agtccgcagggatcgccggtcctcaactcccggatgccacagcgtgcgccgccaccatttcgcagagatttcgaggccaaactgcgcagtttctatcgcaaactagagtccaagggctacggacaaggaccacacaagcttaaccatttgctggaggacgccttccggcgcatcatgtccgccaacaagaaggacctgcaacgcggccgactcgccgtgctctgggatacggaggagggcctggactatggcggaccatcacgcgagttcttcttcctactttcgcgcgaactgtttaatccgtactacggactgttcgagtactcagccaacgatacgtacaccgtgcaggtgtcaccattgtcggcgttcgtggataattgccacgattggttccgctttagtggacgagttttgggattggcactggtacatcagtatctactggacgcattctttacgcgtcccttttacaaggcgctgctgcgcctgcccgtggctctcagtgatttggagtcgctggacaatgagttccatcagtcgctccaatggatacgcgacaatgacatcggcacgggcgtggatcttggcctaacgttctgtgtcacagaggagctgcttggcagtgtggtggacagggaactgaagcccggtggcaagaatatcatcatcaacgagaagaacaaaaaggagtacttggagcgcatgattaagtggcgtctggagcgcggtgttcaggagcagaccgagtcgctggtgcgcggcttttacgaggtgatcgactcgcgcctcgtttccgtctttgatgcccgagagttggagctggttattgccggcactgcagaaatagacacaaacgattggcgcctgaacacagagtatcgttctggttaccatgataaccaccaggtgatcgtttggttctggcaggttatcgagcgctttagcaacgagcagcgtcttcgtctgcttcagttcgtgactggcacgtcgagcataccgtacgaaggattctcggcattacgcggatcgactggcccgaggcgtttctgcatcgagaagtggggcaagccaaatgcactgccccgtgcccacacatgcttcaatcggctggatttgccgccgtatccaacacccgaactgctgtacgagaagctgctgctggccgtcgaggagaccaacacgttcggcattgagtagacac

SEQ ID NO: 1560 - protein, 388 aa, DROSOPHILA
MPQRAPPPFRRDFEAKLRSFYRKLESKGYGQGPHKLNHLLEDAFRRIMSANKKDLQRGRLAVLWDTEEGLDYGGPSREFFFLLSRELFNPYYGLFEYSANDTYTVQVSPLSAFVDNCHDWFRFSGRVLGLALVHQYLLDAFFTRPFYKALLRLPVALSDLESLDNEFHQSLQWIRDNDIGTGVDLGLTFCVTEELLGSVVDRELKPGGKNIIINEKNKKEYLERMIKWRLERGVQEQTESLVRGFYEVIDSRLVSVFDARELELVIAGTAEIDTNDWRLNTEYRSGYHDNHQVIVWFWQVIERFSNEQRLRLLQFVTGTSSIPYEGFSALRGSTGPRRFCIEKWGKPNALPRAHTCFNRLDLPPYPTPELLYEKLLLAVEETNTFGIE

SEQ ID NO: 1561 - DNA, 6382 bp, DROSOPHILA
ctgcagaacctcgttggcaatcttcgaggcgtccaggaaagtggggggcagtcggcccacctcgttggccaccatcaggatgttcttgccgtacagacgggacagaatcgcgcgcgacttgtcgcccacgcagaacaccttagtgttggcctcgtcctgggccagttcgccgcgaatgagacgggccacaccagtgtggacggcaccgcaaagaccacggtccgaagtcactgcgatgagcagcttcttgggctccgccttctcgtccggctggatctccgtcttctcgaagaactgctgggcgccgatgccgtaaggacgagccgccttcaagtctcgctcggcacgagcgtacttggcagcggacaccatcttcatcgattgcgtaattttctgaatgttcttcaccgacttcaggcggatggaaatcatcttcagggtggccatgccacgctgctgctgggccagcatggtggcctccatggccaggggcagcaggagctgggtgcgttgcatcatcatcctgtgagttgtcgaagattccctgtcgcgaaaattagctcgattcactcggcaaaaattgagaaaattcacctaccttgcgttaagttggctgcgccacaacgagtgttataacaccgagcagagttgccacccagttcgggttaacgcggtggcgattcgtggtgaacggtaaaatattatattaaataatttattttaattatggaaatttcggataatggatttgtgctacatataactattaatattggataaaatacaaaacttctttggaaagcttcagaatgcacaataaagcttgaaattaatttgaatttatgtaactcataattatgacaatagagttaaaaacagaataataattgataaggattaagaggtttgccaaagatgccagcttgttttctaccctcgaccagagttttccttctccttgccagctctgttttggaatcagctgctcacgcacgagccacgaagttccgtcactaacgcctcacgcaaaaaaaagctgacgtactcgggaaaaagattaggataattcgacggagacgagcgcccgatccgatctactgactcccccgacccgcagcagagccacatagacacgatcgccctgtccaggacacccgggatcccagggatgagacctctggggacgaaaaacagcggataagttagctgtgtgcgtgtgtgtgtgcgtaagcaaagctggaaaattgttgctgcgcatcggaggaaaataaaggacatcaggcggctggattggcatgaggaggatagggctcaagccaaggctaaagacagaggcatagtgcttgaggataaaccgagaatcggggctccaccgatttcagtgcctttgtgtggcagcaacaaggtgtgcgtgtgtgtgagtgcgtgcgtgcgtgtgtgcgtgcgtgtgttgcctgcgcagtgcgttgttgttgcagttgcaatcgccagttgttgctgttgttgttgctgttgctgtgtgacacaacagtaacaaaatattgagccgccgagcaaaacacataatgtggtcgttcttctcgcgcgactcctcgaaagacttcccctacgacattggcgaaccggtgggcggctttgaccaatactccatatggacgctgcacaaggccaagcgcaagacgacgctggaggaggtgtctgtgttcgtctacgacatccgtagcggatccgacaccaagtgcgagctggccaaggcggcgctgaagcgcctcaagacattgcgtcaccccagcatcctgcagtatctggactcgctggaaacggacaagatgttgtacgtggccaccgaggcggtggatccgctgggcacttacttttccaagctgggcagcgacaatgtccaaaagggcctctacctggcctggggcatcttccagatcactgtgggtatccatatccctgatattttgccctagctaaccaagtcaccaatccctttcagcgcgccctgtcctttctcaacaacgatggcaatctgcgacacaacaatgtttccgcctggtcggtgtttgtcaatgcctccggcgaatggaaactgggcagcctggagtacgtctcagcggcggatggtaatcccatgccgcccgccaaaatacctgtgaccctggaggtctacgattcccccgaaaagaacgatccgagcaagctcaaggcggccaccaaatggtacgtaatcctctcaccttagactattttaataatccttcaaatcggattctctaccagctccgtggacatgtggggcctgggctgcctcgtgtgggaagctttcaacggtgtgctcaagcaacgctccaacctcaaggatatagaacacatacccaagtccctgcaatcgctctattgtgagctggttggcgcctcgccttcgaatcgtcccaacccggcggatataatcacacgttgccgcaagcctggaggctttttcaaaaacgatttggtggacacactgctcttcctagaggagatccaaatcaaggacaaggcggagaagaatcgcttcttcagtggtctgaccacgcatctcgacaactttccggacaacgtgtgcaggcataagattcttccacagctgataacagcctacgagtacggagatgcgggctctgccgtgctggctcccatgtttaaggttgtctattgaattggcatactcctatatgacttgatttcacaaagagttataatcttgcagctgggcaaactgctggacgaggtggagtaccagaaacgcattgtgccctgcgtggtcaaactgttcgcttccacggatcgagtgacgcgatcgcgcctgctgcagcagctggatctgttcatcgcgcacttgcagccacaggtggtcaacgatcagattttcccacaggtggctcacgggttcctagacaccaacgccaccatacgtgagcagacggtcaagtcgattatccacttggcgcccaagctcaactacaacaacctgaatgtggaggtcctgcgtcactttgccaggctgcaggcgcgggatgaccaaggtggaattcgcaccaatacgacggtctgtctgggcaagattgcgccgcatttgcatccgcaggtgcgtcagcgtgtgctggtctccgctttcattcgtgccatgcgggatccttttccgccggcaagagtcgccggtgtcctggcgctggccgccacacagcagtactttttgctcagcgaggtggccaaccgcgttctgccatcactgtgttccctcaccgttgatccggagaagacggtgcgcgatccggcgttcaaaactatcagaggcttcttgggcaaactggagaaggtctccgaggatcccagtttgcgggaaacgatgggtgagtactttacaatattgttaattaatgaaatcctaactaggttactaatcaaatatttcgttcgcagaggcggatgttcacacggccacgccttcgattggcaatgcggcggccacatgggcgggatgggcggtgacggccgtcacagcaaagttctatcgcagccaaagtgattcgtctcgaccacgaccgcctttaactggacgcaatctgtccaagccagcgtcgcttggtaagtattcgcctcgcttatgcaattaccacaatgcaattaacccggcctgcatttgcgagcagaacaaccatcgagcagcagtttatcgaccaccacgagcagtgttacctcaatgacgtcgctggagcatgaaagcaatgacacctccgcctcggcctccgattatggcaacaacgattgggacaacgaaaactggggcgaaatggatgtaagtagtggtgttcgaatcgactggcttttgaatgctgctaattatgctcgattattttaattttagacctctcaggatcccagcagtccgctggcggccagctccaataatggcgccttgatggcagccaatgccttgagcgaagtgcgcgacggctgggacaacgaggagtggggcagtctcgaggaggatccggtgagatctgatcaaactaactaactcaaacttgttactaactcaattgggtgggtttcagtgcgaggaggaggagcaggcggagcaggagcagcagcaacaacagctggctagacaatcgatatcatccacgtcatccagtcagccaaatcagcgcccgctgctgccacatcagcagcagtatccacatcagcagcagctgcagcagcacgagctaaacgatctgatcgagccgctggccaagctcaactcgcacgtcacctcgccgtcgaagcagtcgatgctccggccaaaggagctgcccaatctatccagcagcaacacatcgcccacgtcggccactgccaattgcaataacattagcccgccttcgtcgcatttgaataattcgacgcataatgccaattggaatagcgattcgtgggccgacggggagtttgagccactggatgaatcgggattcggtgagttcctcacgctaacatgcctattgccatatcagatttcccttctggcgacccacttggtgaatcgacccactaacgaaaccgatacttttcaggcaatgccaaactggacgaggcccgacgcaagcgggaggagaagaagctgcagcggcagcgggagttggaggcgcgacgggcccagcgggcgagcggccccatgaagctgggcgccaaaaagctttaaaagtaatcagccgataacagcgacgtgtgttgcttagctgttattcgcatcgtacatctaagcccaaagtgtattttgtatatttccgtgcgtgtgtgtcttgtcccggccccgatttgtccaatttgtcccattggtcccatttgccccatttggcccatttggccgctctgtgtgtgctttgtgtttgtattgggtgccagtttgcattaaatgcaatctcagtgtctcgagcctccatttcgattccgtaaaatatagccgttttgtatttctaatgctggcacgatattagctaatatattcagcgtctctaacgaaaattccaatgtaaagcactgtaattaaacctgtaatttatatttataaaccaaccagtagctagtaaattacttcaaatttataccctaattaatcgactaaataagcgtgattgtcagagtgacaggattgagagtcggggactcaatcgatatcagcgaggagtggatacgaggtccttttccaatcccactatcaatgagcgaatggatatggatgtgcgtgtgtctgatttcaaaacccattttagtcgcccctttccaaaggctaacacttgatggatggatggatgccaatccacgcgattttcgagggacagtgaatatttagaaatctaaactaaacgtatttttgcgaatggagcgtaaccaaaattgtgaattttaatacataaatgatagcagatatttttatatagtgcataataaaggggaaacgaaaacgatatagaaccaaccaaatagaaacaaccgaaatcgaaacaaccgcaagcaattataaaaggaaacaattttaaagcctttcagcgatacatttgtagtagaattgcacttgttatattacatagatgtcctacgttgccataaataggaacgatcaggaatcgatgtcctcccggtcggttcgctgcggcaactggcccactttccgttggacactcctcgatttttacccagtaagaacagcaccaagcgcaaggccatttttgcatgtcgaactagtagcgttacctagcgtaatcttacacttttggatgtcctgtacatacacttagatacagatacagatacagatacggatgcaagtgcatatgcagatacagatatacatatacctaacatatatgccgattttttccaatacctcaatatcagtgtacaatttttccataatatatttttgaaatacaaacgaaactaataacccgcagcgaggaaatacgatgtgaaaatgttgactttttaaaaatctcattgttgtcgccgcgtctgtttgcatttggagcaaacgccacacatacatatgtatatttgtaattaatgcaactctcgattccaatatgccacgcctaccccgcgttccgccctccccgccaccaaccacacctattggcattcattttcttatagcaaattctctcagcaaatttaacattagcgtaacgaactattcaaaaaactcattgaaaaataaacaagaaattgaagcaacatggaaaatgtattgtttagacaaatttttaagactgcaaaagtgaaaaacaagaaaaaccaaaaatcaattgaaagtggtaatggtaaattacaagaaaactaaattatttagtac

SEQ ID NO: 1562 - DNA, 3837 bp, DROSOPHILA
cgaagttccgtcactaacgcctcacgcaaaaaaaagctgacgtactcgggaaaaagattaggataattcgacggagacgagcgcccgatccgatctactgactcccccgacccgcagcagagccacatagacacgatcgccctgtccaggacacccgggatcccagggatgagacctctggggacgaaaaacagcggataagttagctgtgtgcgtgtgtgtgtgcgtaagcaaagctggaaaattgttgctgcgcatcggaggaaaataaaggacatcaggcggctggattggcatgaggaggatagggctcaagccaaggctaaagacagaggcatagtgcttgaggataaaccgagaatcggggctccaccgatttcagtgcctttgtgtggcagcaacaaggtgtgcgtgtgtgtgagtgcgtgcgtgcgtgtgtgcgtgcgtgtgttgcctgcgcagtgcgttgttgttgcagttgcaatcgccagttgttgctgttgttgttgctgttgctgtgtgacacaacagtaacaaaatattgagccgccgagcaaaacacataatgtggtcgttcttctcgcgcgactcctcgaaagacttcccctacgacattggcgaaccggtgggcggctttgaccaatactccatatggacgctgcacaaggccaagcgcaagacgacgctggaggaggtgtctgtgttcgtctacgacatccgtagcggatccgacaccaagtgcgagctggccaaggcggcgctgaagcgcctcaagacattgcgtcaccccagcatcctgcagtatctggactcgctggaaacggacaagatgttgtacgtggccaccgaggcggtggatccgctgggcacttacttttccaagctgggcagcgacaatgtccaaaagggcctctacctggcctggggcatcttccagatcactcgcgccctgtcctttctcaacaacgatggcaatctgcgacacaacaatgtttccgcctggtcggtgtttgtcaatgcctccggcgaatggaaactgggcagcctggagtacgtctcagcggcggatggtaatcccatgccgcccgccaaaatacctgtgaccctggaggtctacgattcccccgaaaagaacgatccgagcaagctcaaggcggccaccaaatgctccgtggacatgtggggcctgggctgcctcgtgtgggaagctttcaacggtgtgctcaagcaacgctccaacctcaaggatatagaacacatacccaagtccctgcaatcgctctattgtgagctggttggcgcctcgccttcgaatcgtcccaacccggcggatataatcacacgttgccgcaagcctggaggctttttcaaaaacgatttggtggacacactgctcttcctagaggagatccaaatcaaggacaaggcggagaagaatcgcttcttcagtggtctgaccacgcatctcgacaactttccggacaacgtgtgcaggcataagattcttccacagctgataacagcctacgagtacggagatgcgggctctgccgtgctggctcccatgtttaagctgggcaaactgctggacgaggtggagtaccagaaacgcattgtgccctgcgtggtcaaactgttcgcttccacggatcgagtgacgcgatcgcgcctgctgcagcagctggatctgttcatcgcgcacttgcagccacaggtggtcaacgatcagattttcccacaggtggctcacgggttcctagacaccaacgccaccatacgtgagcagacggtcaagtcgattatccacttggcgcccaagctcaactacaacaacctgaatgtggaggtcctgcgtcactttgccaggctgcaggcgcgggatgaccaaggtggaattcgcaccaatacgacggtctgtctgggcaagattgcgccgcatttgcatccgcaggtgcgtcagcgtgtgctggtctccgctttcattcgtgccatgcgggatccttttccgccggcaagagtcgccggtgtcctggcgctggccgccacacagcagtactttttgctcagcgaggtggccaaccgcgttctgccatcactgtgttccctcaccgttgatccggagaagacggtgcgcgatccggcgttcaaaactatcagaggcttcttgggcaaactggagaaggtctccgaggatcccagtttgcgggaaacgatggaggcggatgttcacacggccacgccttcgattggcaatgcggcggccacatgggcgggatgggcggtgacggccgtcacagcaaagttctatcgcagccaaagtgattcgtctcgaccacgaccgcctttaactggacgcaatctgtccaagccagcgtcgcttgaacaaccatcgagcagcagtttatcgaccaccacgagcagtgttacctcaatgacgtcgctggagcatgaaagcaatgacacctccgcctcggcctccgattatggcaacaacgattgggacaacgaaaactggggcgaaatggatacctctcaggatcccagcagtccgctggcggccagctccaataatggcgccttgatggcagccaatgccttgagcgaagtgcgcgacggctgggacaacgaggagtggggcagtctcgaggaggatccgtgcgaggaggaggagcaggcggagcaggagcagcagcaacaacagctggctagacaatcgatatcatccacgtcatccagtcagccaaatcagcgcccgctgctgccacatcagcagcagtatccacatcagcagcagctgcagcagcacgagctaaacgatctgatcgagccgctggccaagctcaactcgcacgtcacctcgccgtcgaagcagtcgatgctccggccaaaggagctgcccaatctatccagcagcaacacatcgcccacgtcggccactgccaattgcaataacattagcccgccttcgtcgcatttgaataattcgacgcataatgccaattggaatagcgattcgtgggccgacggggagtttgagccactggatgaatcgggattcggcaatgccaaactggacgaggcccgacgcaagcgggaggagaagaagctgcagcggcagcgggagttggaggcgcgacgggcccagcgggcgagcggccccatgaagctgggcgccaaaaagctttaaaagtaatcagccgataacagcgacgtgtgttgcttagctgttattcgcatcgtacatctaagcccaaagtgtattttgtatatttccgtgcgtgtgtgtcttgtcccggccccgatttgtccaatttgtcccattggtcccatttgccccatttggcccatttggccgctctgtgtgtgctttgtgtttgtattgggtgccagtttgcattaaatgcaatctcagtgtctcgagcctccatttcgattccgtaaaatatagccgttttgtatttctaatgctggcacgatattagctaatatattcagcgtctctaacgaaaattccaatgtaaagcactgtaattaaacctgtaatttatatttataaaccaaccagtagctagtaaattacttcaaatttataccctaattaatcgactaaataagcgtgattgtcagagtgacaggattgagagtcggggactcaatcgatatcagcgaggagtggatacgaggtccttttccaatcccactatcaatgagcgaatggatatggatgtgcgtgtgtctgatttcaaaacccattttagtcgcccctttccaaaggctaacacttgatggatggatggatgccaatccacgcgattttcgagggacagtgaatattta

SEQ ID NO: 1563 - protein, 873 aa, DROSOPHILA
MWSFFSRDSSKDFPYDIGEPVGGFDQYSIWTLHKAKRKTTLEEVSVFVYDIRSGSDTKCELAKAALKRLKTLRHPSILQYLDSLETDKMLYVATEAVDPLGTYFSKLGSDNVQKGLYLAWGIFQITRALSFLNNDGNLRHNNVSAWSVFVNASGEWKLGSLEYVSAADGNPMPPAKIPVTLEVYDSPEKNDPSKLKAATKCSVDMWGLGCLVWEAFNGVLKQRSNLKDIEHIPKSLQSLYCELVGASPSNRPNPADIITRCRKPGGFFKNDLVDTLLFLEEIQIKDKAEKNRFFSGLTTHLDNFPDNVCRHKILPQLITAYEYGDAGSAVLAPMFKLGKLLDEVEYQKRIVPCVVKLFASTDRVTRSRLLQQLDLFIAHLQPQVVNDQIFPQVAHGFLDTNATIREQTVKSIIHLAPKLNYNNLNVEVLRHFARLQARDDQGGIRTNTTVCLGKIAPHLHPQVRQRVLVSAFIRAMRDPFPPARVAGVLALAATQQYFLLSEVANRVLPSLCSLTVDPEKTVRDPAFKTIRGFLGKLEKVSEDPSLRETMEADVHTATPSIGNAAATWAGWAVTAVTAKFYRSQSDSSRPRPPLTGRNLSKPASLEQPSSSSLSTTTSSVTSMTSLEHESNDTSASASDYGNNDWDNENWGEMDTSQDPSSPLAASSNNGALMAANALSEVRDGWDNEEWGSLEEDPCEEEEQAEQEQQQQQLARQSISSTSSSQPNQRPLLPHQQQYPHQQQLQQHELNDLIEPLAKLNSHVTSPSKQSMLRPKELPNLSSSNTSPTSATANCNNISPPSSHLNNSTHNANWNSDSWADGEFEPLDESGFGNAKLDEARRKREEKKLQRQRELEARRAQRASGPMKLGAKKL

SEQ ID NO: 1564 - DNA, 4054 bp, DROSOPHILA
atggcgttggtggaagttccgtgaacggattcacgttggcgcgacttgatgcgcggtggctatgttttgaaactggacctgctggcaaaggtatgcgaatcgggaactattttgttcttggagagctaaggctgagtgtgattgggcatagtttttaatgtgaaatagtcaccttaggttgatcagttgctggaactgttcggacgaattatatatttgatattatgttctttaaataactgtcattgctttgtttttcccacgtttttccgccacgatttacatgcgggggggttgaggagggcgatgtttttaatatttttttatgatatgttatcgataacagcagacgtttttgtctgggctcattgcttctcgatagcactagcgcttgcttaagctggtcactttacattcgctgttgtcatcggaatctaagttattaaaggctgatcacactgtgcaagttaaccgttttttaaagtaacaaaaattaaaatattacagatccagttattaacgtatatttctgttctctattatatcgtattatgtttaaccacttgttatttgttatattattttcattcatcaaaaagtaatgcactctaactatacattgagctaaaaccatggactaaacaggtgcgctgggtcacctttccatttgtccccgaatatgcttagttggattttcttatttagtcaaatgtacataacacacaaacataaaacacaaaatacgaacgggcactatccaaaaaaaaaaaacttaaaaacttaaaaacttaagacaggagtaggaggaacagaagtacactggattctgcagcagaactatttgggaaaggcagttaaatctcttcagactgctcgaaacatctgaatgcccttcacgctgcaatccaatcacatagaactccttctctgcagctttagctttggattccctgaagaattggcttaaatcccttgaaaaagtagttgtgcttttgacgacatgtaccagaatcagttcatctattcccgcgagaggcgtcgctttgggcggcagtgccggttccaggatcgcaatgaactgatggtcagcgtacatcccagtggccgccagcgtctaaagtacatcatggccaatccgtccgagaagtccacccaactgagccgccaaatggcgctgaccgtcatggagacggagaacgtgactctcgaccagcacggaatgtatcactacgagggcggttggcccaaggaggttaacttcaatgacgaggagcagacgcagcggcatcgcaagaaagtggaacgcgaagatagctggggtgagcaggtcctgtctatgattcgcaccacgatgtcggtggcggagcagaacaataccctcaatatctaccagaacttctttgcggatctgccgccggagttgggacatgacatcaagatgaggtttcgcgcccgggtggccaatgtgttccatgatctctggctgccagcacgccaattgaggtccattgagtggatgcccaacaatagccgacagtttatgacccagtataccaatcactttgcaaagggagagcgactgcggccggtcacggatgaaccatttggcgggacaaatggcttctatgtgtgggatgtgaagaatccactcaagccgaggatcacctacgacagcaagcagcaggtgtcgttggccaagatttgtcccaaggatgagaacaacatggtcggtggcacggggctggggcaggtatgtctgtggggcacctttaagggcggactacccataaggaattgccccctggaggtgtcccacagggagaccacttcggccctctgctgggttcattccaagtccaatacggaattctattcgggctccctggatggctccattaagtattgggacaccagggatctgaagatgcccatgcaggagctgctcctcgaaccggaaccgcaggagcgtcaatcgcgcatggattcgcatggagtgacggtgttggagttcgaatacaccatcccggtgcgcttcatcatcggcagcgatatgggtcacgtttttgtcggcaatcgcaagggtatgactccgatggaaacccttctggctcactatcaactttttgtcggacccgtgcgcagtatcaatcgaaatccctttttcgtcaagaactttctggtcacgggcgattggcgggcaaggatttggtcggaggaggtcaaggacagtccgtctaccatgtatttccggaagaatgcacagattttatgcggcgcttggagcacaggtcgctgctcccttttcgtcactggcgatataaacggcgtggtggacttttgggatctgttgcttcatcaccgtaagcccattcgttccgtggactttaaggtagccattgcggatttggtcttccggccggagggcgatctgctggccattggcctgaaaaacggcgacactcacatcatgacactggatgagtccatgcgacaggcaactggcaaggagaaggcactcatggccgccgtaagaattgaacattctgtaatgtaatcccctctctctaattaacactatatcttctggaagatgttcgagcgggagatcgtgcggtgtaaactactggaggctcgctatgatgaagttaggctaaagcggaaaacgcttcaaatggccgaggaggaacgtgtccggaagcagcaacaactggcgcccactctcgagctggatcccgacaatcccgatcagtttgtgatgatgatcgagggcgatgaagaatttcgcacggccatcaccgaattccaggacatcatactcagtgtggagaggaagcgttccaagcggcaggtgatcatggagcgtacggtctttgaggaatggaatccggctgacgaaaagcttcagggtgagcccgtcgtatacaccaagcccgagcgaaaggttcagacgtcgggaaactatgacaagaggacttcgggagagccaagagcttcgcaaggatccatgaagcaccagtaaaaaaaaatatgaatatgaactattggatatgttgatatgatgtgcaaattgaaataaagttatcatttaaatacaaactgtttgccaaagctgcgggaaacagatgaaaccccatacgatgagcaccattaagaccatgactagcgggtcaaaccacatttaatcacattatggagtactctttggagacctttattacgaccaacacaattagcccgactacgtgcgactttttaattaagtaacaacctttctaacagctaaatttagttcgttaaattcacttttcatatagcattagttgcacttctctacacagcaattaaatggagttaatagtacactgggaaaaaaaaaataagcaaaataaagtgaacaaatggggggggagaagattaaagctaaatcatccacttttagatggataatggggtgttcaatttggccacttggagctgagctctaggacttatcggtatccacacccgtgtcgaagaaatcgttgaccaatcgcatcgccttgcgtggaatcaggcgaccgatcttctcagcggccacgaaatgtcgtggaatcgccgcctcctccaatccctggcgctgagcctcgatgatcgatccggcggccacatcggcgggtatcagcttgaacagattggggaatcggtagcggggattcttgcacagacccgtatcgatcatatacggatatatggtagtcagcttgacctgcaagcggaaagtaggtgggttatattaaacttcgaattcatggagttattatgggaaaaggtctcatccatatgagataataaaatcgtagtgtgaaaccaagatgctcgcctaacggtgagaattaaacgggctgcttggtacgagctataatatattatttttaattagctactcttaaccacctaataaccttttaattggacactcaactggattataatgagcaactaaatgctaataaaagtgtgagtgagttggtacttacgttgttctgtgggttcttctgacgcagctcctcaacga

SEQ ID NO: 1565 - DNA, 1991 bp, DROSOPHILA
atgtaccagaatcagttcatctattcccgcgagaggcgtcgctttgggcggcagtgccggttccaggatcgcaatgaactgatggtcagcgtacatcccagtggccgccagcgtctaaagtacatcatggccaatccgtccgagaagtccacccaactgagccgccaaatggcgctgaccgtcatggagacggagaacgtgactctcgaccagcacggaatgtatcactacgagggcggttggcccaaggaggttaacttcaatgacgaggagcagacgcagcggcatcgcaagaaagtggaacgcgaagatagctggggtgagcaggtcctgtctatgattcgcaccacgatgtcggtggcggagcagaacaataccctcaatatctaccagaacttctttgcggatctgccgccggagttgggacatgacatcaagatgaggtttcgcgcccgggtggccaatgtgttccatgatctctggctgccagcacgccaattgaggtccattgagtggatgcccaacaatagccgacagtttatgacccagtataccaatcactttgcaaagggagagcgactgcggccggtcacggatgaaccatttggcgggacaaatggcttctatgtgtgggatgtgaagaatccactcaagccgaggatcacctacgacagcaagcagcaggtgtcgttggccaagatttgtcccaaggatgagaacaacatggtcggtggcacggggctggggcaggtatgtctgtggggcacctttaagggcggactacccataaggaattgccccctggaggtgtcccacagggagaccacttcggccctctgctgggttcattccaagtccaatacggaattctattcgggctccctggatggctccattaagtattgggacaccagggatctgaagatgcccatgcaggagctgctcctcgaaccggaaccgcaggagcgtcaatcgcgcatggattcgcatggagtgacggtgttggagttcgaatacaccatcccggtgcgcttcatcatcggcagcgatatgggtcacgtttttgtcggcaatcgcaagggtatgactccgatggaaacccttctggctcactatcaactttttgtcggacccgtgcgcagtatcaatcgaaatccctttttcgtcaagaactttctggtcacgggcgattggcgggcaaggatttggtcggaggaggtcaaggacagtccgtctaccatgtatttccggaagaatgcacagattttatgcggcgcttggagcacaggtcgctgctcccttttcgtcactggcgatataaacggcgtggtggacttttgggatctgttgcttcatcaccgtaagcccattcgttccgtggactttaaggtagccattgcggatttggtcttccggccggagggcgatctgctggccattggcctgaaaaacggcgacactcacatcatgacactggatgagtccatgcgacaggcaactggcaaggagaaggcactcatggccgccatgttcgagcgggagatcgtgcggtgtaaactactggaggctcgctatgatgaagttaggctaaagcggaaaacgcttcaaatggccgaggaggaacgtgtccggaagcagcaacaactggcgcccactctcgagctggatcccgacaatcccgatcagtttgtgatgatgatcgagggcgatgaagaatttcgcacggccatcaccgaattccaggacatcatactcagtgtggagaggaagcgttccaagcggcaggtgatcatggagcgtacggtctttgaggaatggaatccggctgacgaaaagcttcagggtgagcccgtcgtatacaccaagcccgagcgaaaggttcagacgtcgggaaactatgacaagaggacttcgggagagccaagagcttcgcaaggatccatgaagcaccagtaaaaaaaaatatgaatatgaactattggatatgttga

SEQ ID NO: 1566 - protein, 651 aa, DROSOPHILA
MYQNQFIYSRERRRFGRQCRFQDRNELMVSVHPSGRQRLKYIMANPSEKSTQLSRQMALTVMETENVTLDQHGMYHYEGGWPKEVNFNDEEQTQRHRKKVEREDSWGEQVLSMIRTTMSVAEQNNTLNIYQNFFADLPPELGHDIKMRFRARVANVFHDLWLPARQLRSIEWMPNNSRQFMTQYTNHFAKGERLRPVTDEPFGGTNGFYVWDVKNPLKPRITYDSKQQVSLAKICPKDENNMVGGTGLGQVCLWGTFKGGLPIRNCPLEVSHRETTSALCWVHSKSNTEFYSGSLDGSIKYWDTRDLKMPMQELLLEPEPQERQSRMDSHGVTVLEFEYTIPVRFIIGSDMGHVFVGNRKGMTPMETLLAHYQLFVGPVRSINRNPFFVKNFLVTGDWRARIWSEEVKDSPSTMYFRKNAQILCGAWSTGRCSLFVTGDINGVVDFWDLLLHHRKPIRSVDFKVAIADLVFRPEGDLLAIGLKNGDTHIMTLDESMRQATGKEKALMAAMFEREIVRCKLLEARYDEVRLKRKTLQMAEEERVRKQQQLAPTLELDPDNPDQFVMMIEGDEEFRTAITEFQDIILSVERKRSKRQVIMERTVFEEWNPADEKLQGEPVVYTKPERKVQTSGNYDKRTSGEPRASQGSMKHQ

SEQ ID NO: 1567 - DNA, 5348 bp, DROSOPHILA
atgaaaacgcatccgggtggcatagaccagtcattatttccaatgttgtggccaaaaaactaaatattttcttcctttaaatctgaaaaccgtcttttggccaaaaatacgatttatgcaaagggtgtttttatcataacttgtctaaaaatggtcataaacgcataggaatgactgttttgtgcagctaataacccctactaactatccctatcactttttgatggattttgaaaaattaatttttgggtcgatttttgcatattcggtattcatcaaaatttgcgaaaaatggcaaaaaattaaaaatccaaattttaaacacagtttgattagaattttgaatacgaactcaacgaggtatgacaatccatatttggatcattatttccaatgttgtggccaaaaaactaaatattttcttcctttaaatctggaaaacgactttcggccaaaaataccgatttaaataaagcgtgtttttatcataacttgtctaaaaatggtcataaaagtgcaggaatgactgttttgtgcagctaattaccactactaactatctctatcactttttgatggattttgaaaaattaatttttgggtcgattttcgcatttttggtaaggggtaacatcatcaaaatttgcgaaaaatggcataaaattaatattccaaattttaaacacagtttgagtagaattttgaatacgaactcaacgaggtataacaatccatatttggaccattatttcgcattttttggcccaaaaagcgacatatttaaaaaattgcaatgcatgttttgtactaccaacctaattcgcttgtgaagtgttctaagtgatgcagggtatcccccaagtcgagtcgcagtaaatcggcctggaaggcttctgctgggtcttgttttgttttcgtctcggctgcgtcgactgcgacgctgaaaactgtggcagaggcagcgggccaaacgcttttatttttcagtttcggtttcagtttcgtttgcaacgtgcgcgcgaaaagacgcaaaagtcgaaagaaaagtgcgaggaaaaccagttggctgagtcctacgccgaattttgagaaaagtaagagtaagatccataccgaaaactttagatatacagagagagaaagaggtacataccacccatttctaccgctgggactatatgtgtgttttattgttttttttttttttttatatattttttttgtacatttcgaaaagcaaaaggaattggaattctcggtacttggctgtgcattaatatgttgttaattttttttctcctacaagcattaaactgcattattattgacggcgatgatatcatttccagagttgaaaatgcgaaaccgaatgtgagtcgcgtttgcagtggggaaatattcttatcagcagaacatttgatagcttgccttttggtacatatgtatattgattagttgttgtcatttgggaaattgacaaaagcggcgtctttgttcatctcttccggttccaaagaggaatcttaaagggcccaaaacaacaacctgttgcttgggccaagttgcttggcatgcgaattaaactatcgtacatcataggcatgatatcataccgcttttcggcggaaatccgccatctaatcaatattcggaatgtattttgtttaattccgataaaatgtcgcacatgggttcttgttattttggtttttgctttgttttgttttcttattattatttttttttttggttttcggtttttggtttcggtattacgcttcggaatttgggccgcaccccttccatgccactgggatatacatatgtatatatgtatgtgtatgtatgtgcctctaccacttttgtgaatttcgatgagcatcattcacattgtgtgtaaactattgcgtcaccggtggcgtcatcgtttttgaactcgtctaatgcgccaccgattttgaggaaggtctaagttctgaaatccaaccccattccaattgccatcaatcttgtatgagcacatttcctaaaacaatataattcgttggtattttctaaattgatctcttccttgcttagttaaaatatcaagaatataaaattagttacgattttcaactcctctgtatgggtcttacaaggcttttatttaactcatgtttgttttaagccaaatatagcaaatatagctatagcagagcagttaatttggaattaatctcactatccttccgtttgttatttgttttaagctaaactggttttatttgtttgcctacaatgttattcggcttgattaccaatcgtcaaatctgaagtcagaacttatagtcacaatctgatttccagatctggcacggcatttgcgaataccctataaccattatgcccacccacggcatctgtatacttaaagtgtgtgtgtgtgtgtgtgtgtgtcccaattacgaacgaggcgcttttcttcagttttccttcagcttttccacaacgaacagcaggcagcagaccataaagttcatgacgtttatgcatacatatctacatacattcatatatgtacatacatacagacttacatatatccaatcctaggtgaacatatagacgagagcgattcatctattttgttcgctgccgatccccaaaaaggggggaaatcgttgcgcggggggagaggagtggttctgtatggggcgggggggttttctctcgtcggtcaagtaaatagatttttccgattctcccactgcttcaataacgcatttggcgctttttcgcctgcgaggccggcattgaaaattgttttaaaattagacaaaaagcaaaaatccaaaacaaaaacagcaacaaatggatggccaaaaatacacaaacattgtatggatacattgcagatcgatgggcgtggcaagggcgttcgatctgtaacagctggccaaaaagtacaaaagatacaaaaaaaaaaagcaataaataaataaaaacacaccatatgaattacgatattcggggaatataagtgaaagaaaaagaacctaagacttactcattttaatcaaataattaaaccataaattaacacatggatgcaaatatactttgcatgaatcaccagcaaatttgttggcttatttcaacgaattttaagcatttacaatttgataagtattattatttaatttcagttcttatcaccgaagtttcttatatttctgtattggtattagcatccaatattttactttttttttgtgtttattcatttatttatttgtctttgcagaccccacctttaaccccccgaaaagaaccaccgaagcagagcgaagatgtcgcattcagtgaccattacccgcaccaccaccagcaccaccaacacctcctacattgtcctgaacacgggctatctgaagactttccccggcatcctcaagctcttcgagctggtgcgttaatgctcccagaattcgatagcaactttgaacttaatgtaacaaccatcacgattttttgcgcagatcattggtgcttccattgtgggaattctggcgttcaactaccaggactaccacagatacttctatggccagcaggatctgttccattatctgatggccgttacctttatgataggaacgttctgtttactcctcgcctgcctcacgtcgctcagcacgggcggcattattgccaagacgatctatgtgagtataatcatcattgctatatcttttgtatactttagtattagccatggaactccaaacgtacatatatatacttcgccttgtatctgcaatccgtgcatttcaacgaccattaacctttttgcaggagctgatttaccacagtgtggccgccatcctgatcctggtctcgtccaccatcctgctgctcaagctgcgcgatgtaaagcacgacgcctatatggcagccggtgttttgggcctggtcaatgcggtgctgtacttcatcagcgccttcctggcccaccgatcctatcgcggcatttaagcactaaagcacccaaaacccaccgcccactcggccattcaagtggaatttgcaatctcgaagcatttgttcttcccacaaccaactctagccactggtcatgcgaagcaggagaaggaggcgagagcccagggatatacaaacatagatgtagagaaagtgggtgccaagcggcggaatctttgttgtactgtgaaacgttctttggcgctagttacacttacttgtacttttaccgatatatacaaaactttttttttgtctcactttcttttgtaccaaacagattgtcatgtattcgaataaagatgtgtgtctatatgttttttctaaatgtgtagtagtttgtttatttgttgcttcagctgcaatagttttttattgtcggcatgctttaattgtgttggccagtgtactttgtactttttgattttgaaccgatcgtaaaaagtgttgcatacttttgggccatgcgggaaatgttgctgttagcaagcaaatatataaattcgatgaaatcataatttcatttaatttaataccaaagagtaatagaaaaaacgtggtggtaatttttatggtttttattgaatatattttaaattagttatctataaaataattactatataatataatatataatagaatttgcatctttgtttgtcttctcatagaaatagattctctaaacacaaaaaatcaattgaaattactaattactaataataattaaaacacacttctcgctccctctggcgcagtttttattatctgttgatgggcataaagccctcgcctttaactactaatttacatatacagtaaacacaaataagtggtttaggtgtattaaaaaaaaaaatcatagtaattaagagaagtacacgcaagtattaaatataaaagaaaagggtaatcgattacgataaattaagcatttttctttaacaattaactgaccctccttcgatcgccgaccacacaaacgtttcgcctaataaatacaactcgtatatcaagcattaagatatgattatcgaaaaaaaaaagaattacatttaattatattcgctgctggctgcattttgcattctgctggctggaaatatatacaaaaaccgacttaaaacgaggagcaaacgactgggggagctgggagctgggaactggaaactggatgtggatttgggtcggcattggaatcggaatcgggttaaggatcggatagatggtcgatgggtcgcctatgtgggctaagcaattagttatgtccctctagatgtcctccaatatgatccatgcggcttcctgccttccttcaagtaatg

SEQ ID NO: 1568 - DNA, 954 bp, DROSOPHILA
ttcgtttgcaacgtgcgcgcgaaaagacgcaaaagtcgaaagaaaagtgcgaggaaaaccagttggctgagtcctacgccgaattttgagaaaaaccccacctttaaccccccgaaaagaaccaccgaagcagagcgaagatgtcgcattcagtgaccattacccgcaccaccaccagcaccaccaacacctcctacattgtcctgaacacgggctatctgaagactttccccggcatcctcaagctcttcgagctgatcattggtgcttccattgtgggaattctggcgttcaactaccaggactaccacagatacttctatggccagcaggatctgttccattatctgatggccgttacctttatgataggaacgttctgtttactcctcgcctgcctcacgtcgctcagcacgggcggcattattgccaagacgatctatgagctgatttaccacagtgtggccgccatcctgatcctggtctcgtccaccatcctgctgctcaagctgcgcgatgtaaagcacgacgcctatatggcagccggtgttttgggcctggtcaatgcggtgctgtacttcatcagcgccttcctggcccaccgatcctatcgcggcatttaagcactaaagcacccaaaacccaccgcccactcggccattcaagtggaatttgcaatctcgaagcatttgttcttcccacaaccaactctagccactggtcatgcgaagcaggagaaggaggcgagagcccagggatatacaaacatagatgtagagaaagtgggtgccaagcggcggaatctttgttgtactgtgaaacgttctttggcgctagttacacttacttgtacttttaccgatatatacaaaactttttttttgtctcactttcttttgtaccaaacagattgtcatgtattcgaataaagatgtgtgtctatatgttttttct

SEQ ID NO: 1569 - protein, 160 aa, DROSOPHILA
MSHSVTITRTTTSTTNTSYIVLNTGYLKTFPGILKLFELIIGASIVGILAFNYQDYHRYFYGQQDLFHYLMAVTFMIGTFCLLLACLTSLSTGGIIAKTIYELIYHSVAAILILVSSTILLLKLRDVKHDAYMAAGVLGLVNAVLYFISAFLAHRSYRGI

SEQ ID NO: 1570 - DNA, 8196 bp, DROSOPHILA
cagcaaattctcaactgcggagctcgagttttgtttgaaaaaaactgaactattttttgtatgtttcttcttcgtcttcctctgccgctgccgccgtcgacgcagagccctattgctggctcactcccactcgcgttcacaaattcacgcacacgcaccaatacagacacaacgactgcgctgcgtcgtacgttttacttaagtttccttttcgtcgtttttcgtttatgattttgttattgttatcgttgttgttttttctgctgctgttgcttactgccaatgttgttgttcttgctgcacaaaaagtaactgcgacattaaatctgcaaaacgttcgccttgttttcgtactctcccgttaacttatatacataggtctttatatatatatatatgtatatatcgattaagagacgatttatgcgtcgcaacagaaaaaaaagaagaaaataaccaagaaactctgctgccagaacgaaagggaaaaaactagtactagctggtctgactgctggcgagcgtttgcctttattcgtgcaatatctttagcggacacttagtattattaattgttattattttggttgctgcgctgtttctctctctgttttttgtctcgctcttttggtttctgggtgctatgccagtgtgaccgtgcagctgtaatatgaaataccaaattttatattacagcattctgagtgtgaccagactttatatacgagtgtatgtccttgtaacggataaatctagttgcagtctatttatttaaaatattagcaaagcagcttaatatgaatagctaacggcttttaaaatattaaaacacaacaccatatgctctgaaaaaacgtatagtttcaccaccgaattattcagtaataaaagtaattattttaattagtattttttttttcattttcaaatttgagcttttgtagcattatttagtatctaattgccctaggccggaaccgattattgaattcagaccaccgccatttggcaacactggcgctgcattagcggcaaaaaagattaatttggccatttacgttggcgtaaagttctgtcgcacaacaattataaagctcgaccagctgggttggtaagcgttcatgatcgctcccgttcgccgcagcattactctaatcctgtccagcggcatatttttgcacaacagccacatggcgcattaagtttgttgtttttcgaaattcgcaaaatgtgtgtttattgcggttgtgcttacgtgtgtgagtgtgtgtgtgtgtgttgggttgtgttttggtatccagagtgagttcatccaaatgggaaaaaaggaaaggaaatgaataaagtgttatatgttgaaaataatatatttgggtcaaatctgtgggttatgtgtgtgcgtgggtgtgattgtatataaggcacattcgtttttttccttgatttcctttcgccttactttcgttttctttgcgctttcttgttttgctgctccgcatgtttgttgttgctgctgcacgcgcttcttctgccggcgcaactaattcgatttatttataaaacgtagatttatacatgtttaaatattctgctctaaactaaaatgcaaaataaaagcatctatctattcgcgcgcgagcgcgtatatgattgtgtgtgtgaccttcgtgcaattttccaattgggaaaggggaagagaacgaagcagtggcgaaggagaggatggcagccggagagcgaggtcctgcgataatgcaatcagatcgcctgtgcatgcgtgtgtgtgtgggggtattttcgcagctttaattcaatttctccgagcaacaagcacttacggttttaaaacaattacacacgggcacttttacagtttgaaagctttgtaatcaggcaatttacctcctccttccttaccaagctcctccatatttatttgttttttttttatggtgtgtgtttttctacttttctatcgctatgtcttttgcagcacaagaacggcggaggtggcggcagagagaaaagagtgaaaaacaaaccaaaagacacggcaaatcagtctagtcaacaaaagcagaccaaatgagcacgcacttcgggactaacgagcagcacaaactaagccaaaaataaagctaaagataaaagagaggcagaggcatcacacacacacacacacccgcacgcacacacactagcacaagccattacactaagcgaaaccgcatcggaaatcggcttcaagatgcgggtagtggccatggtcagtggcggcaaggacagctgctacaacatgatgcagtgcgtcgccgagggccacgaaatcgtcgccctggccaatctgcatcccaaggacagaggtgagtccacaacgatcacttagtctttagcttaaaggatatagaaaacgtaccacatctcctttgtcccaccatgatttcatgactgaattctgaaagaaggatcacattaatgttgataggcacatatgtatatgctttcaatttggattcttctgacaaacagacagtgccattttattggcacacacgatattggtattcctatttgcactatcatttaccaccattacgccttatttgatctctcgccgctgtgcctcttcatcatgcatcttcaatttccagacgaactggacagcttcatgtaccagacggtcggccacatgggcatcgagatactggccagcgccatgggattgccactataccggcgcgaaaccaagggcaagagcacccagaccggcaagcaatacgtgcccaccgatgacgacgaggtcgaggatctatacagtctgctggagacatgcaaggtgattgattgcttaatgattggccggttccaaactcaaaccccaatcccgaaccccttccctaaattctgattaatatggatgataaggaaagcgggggaaaatcgactgcaattgctgtgttgttgatactcttgttttgctaagcgctccaagttccgtatataatacataattgatttttaatatatatatgtatatatatatatatacaccgaaaaaacgaaaatgttgctctagacagtttaaaaactatattcgtttcttttgaatctttacgtgcttgaaaatactatatatattagtgggaaatgttttttttttctgcacgtaatagtttataattttcattcgtgagcctatcagtgatcagcgatttggttcgtctatccgcgcttgttgtgccatgtccttgggctcctggtcgtgcccactcatccgcgttccagcgcatcaatcaactgcagcccagattgcaactgcaaccgcaaaccactcggtaattgggtgggcgcaatcgcatttaaatattcacatactcctatatgtatatgtatgtatgtacatacatccatccattcgcgatgggaaggcgccggtgggtcggtgggtcgatgggtaatcttatcgcgatgcccaaccaatcaagacgggacgaaccgaactgttgccgtgcacgtgaaccattccaccgggttaaataagtaaaaacaaaaaaggaaaaaaaaaacactcaaaatagtgatacaaaaagtattaagaccgcagaaaccaaaacaataacaatgcaaaccatgagtattataatatataatcatacaatttgtttttgcaccatgatggggtgtgtttacactttggcaggccttataggcattatagtattattaactgaagtcattagtatcagtatcgcctgcactcacagtgtaattacatttttgcattcgcttagctgatatcgtgcattacaatttgatcagctttgagctgataggaaattaattacgttgaaaatatgtcgtatataggaactaataataattcactaagatagtggattctatacactttttattgattatgacggcatgcccacgatgactttaagatcaactattaggtagggttattccattttggttcttatagttttccttatcatcttttaagctcatttattgttatatatccgctcgatatatactcattctgcattcaattcgcagcacgaacttcaggtggatgcggtggccgtgggcgccatcctctcggattaccaacgcgtgcgtgtggagaacgtgtgcagccgcctgaacctgatatccctggcctatctgtggaggagagatcagactgaattgctgcaggagatgatcgactgccaggtgcacgccatcatcataaaggtatgaatgaaggaatccatcagcacgttgagatatccaaaagaaatggagaaaaaagttaagcaacaacaacttcgatgttgggcagatttaaagaggatgtactaacatgacataatcgttcgtgggtttcataatcgtatccaatccacgctagccatctacatacatacatatgtagttcctcagctgagttgtcatttgtgctaaatttagcccatgtaaacagaacgctcgacttgctcagctgaaaatgagctatttcacctggattctgtcactccaactgccatatgcagcaattgtaaataaactaaataatttactgttttgtttgcccatcaatttgaatcttcaacatgtggtattgtacgcaaatgaacaaaatagtaaagttcactattgaattgcgagttttgaaagataatagatgatatgccatgatctgatagtcaatttgcgaacgatggaagttttaaatgaagaagtcatagtattaactcaaacaatttgttgctaaaaagcattacccttcgtctaaaattgttcatagatagagtatatgctcaaaagtaaaccgctagcattgcaaatctgtccaccatcgaatgtgttcttgtatcgcaatattacccagcttaaccatccatggcgcctccatctcccccgatatcccggacacaggtggctgccctgggcctcgtgccggatcgacacctgggcaaatcgctgcgcgagatgcagccgcacctgctgaagatgcgcgacaagtacggactgaatgtgtgcggcgagggtggcgagtatgagacattcaccctggactgcccgctctttcggcagcgcatcgttgtcgaggacatccagacgataatcagcagtgccgatcccatctgcccggtgggctacatcaatttcaccaaactgacgctgcagccaaaggaggcggcgggcgcggccagcagcggcggcaacgaggtggtgttcgtgaagcgttcactcgactatattagcgatctgaacgaatcgacgtacagcgacctcagtgatccggatttcagtgaaacagaactggaactaatcgaaaaggagaccaggctgcgcgaatcgcttagccaaagtgagctgatatcgcgcagtaactcctttggtcgccatctggccgcaccgcctcctcgccgatacccattgtcacgaagagcgccagcgtcgacgagcccacagcggcggcggcgccgatactgggcggagttggaggaccaccaatctgttccacctcagcctgtgcgtccatgctgctgacaaccaccgccgacggcctgagcagcctggccagctcacagagccagggcggtggccatgggctcggcagcagcacggccgccgtgtgcggctcgctgtcgctggccatctcctcgcttgggctcagcgccaatacctgctgtcatccgggaggagctggaggaggaggaggagttggaattggagtaggagcaggagcaggagcaggagcaccttcggccaccacacaaccgcccagtccgctaaagtacgagcgggaattccgtccactggccaacgaggccagagcggccatcaatgccaagggctggatgtggctggcgggcatacagggtatccaaagagtctctattgcatctctatgctatcactttcattgggcacggtggccactcgatctttgtaaactaacccattttgaatttgcaaactaatgtgtctaataatcactttttatgttgacaaattgcgtgcaagtagttaaattagaatgaaaaataaaactatttaaaagtgtataaccaaagcataagtaaattaacactaaaaacacagcaagtagatttttcaagtggccatcgtgcttgacaaattatatcaattgctaaatcgattactaacgctatgcctaattcctcgacaggctccggaacggagggcattgagcagggcatgcagcaggcattggacacgctgcgcgatttgtgccaagccaagggctacgatctgcaggatctgtgctatgtcacgctctatgttcgctcgatcggcgagtatcccttgctgaatcgtgtctaccatcgcgccttcgactttcataatccaccgacacgcgtctgtgtcgagtgtccgctgcccgatggctgccatgtggtgatggaggccattgcctaccgccagccggtggccggaacgatatccagtgccgaggagcgtgatcgcgagggcgaggagactgcggcggcgctgctcaacgggcgacggaacacgatgcatgtgcagggcatctcgcattgggcgccggccaacattggtccatatagccagtcaaccagggtgagatttacataatcaacgatccaatggctgtattcaaccactaatcaatcactcgcatatcttgcagattggcgacattacgtatatctcaggccagatcgccctcgtacccggcagcatgacaatcatcgagggcggcatccggccgcagtgcaagctcacgttgcgccacatcagccggattgccaaggcgatgaacgcccacggccagttgcgtgatgtggtgcacggcatctgctttgtgacccatccagccttcattggcgaggcgcgtcgccagtgggagcgtcgcaccaccaatgccatcatggactatatagtgctgccggcactgccgcgtgaggcactcgtggaatggcaggtgtgggcgcatacgcacaacgatcgattcgattgtaaggcacacacacattatggaccaccaaaacatattcttattttattccctattttgcttaatagatgaggagactggctgttcggtgggtgactacaccatttcgatacgtcgacgatggaattacgagaacaattgtgcggctatcgtttgctatgtgtccactggcctggcctcgtccaccacccaactgacgcagctgagcgatgacattctagggaaccactgccgtttggcgcaagcggttaatgccgaacatctggacgaaatcttcacgtacgtggttaatcgtctgctaaaggattatccgctggccaagaaacaggcgtcgcaaccgacaaattcggcaactccacctgccacgcccacgcaaccgggcggcgctggcggagatcaacagcagccagtgccggcgatccatctgaaattgttctaccaagtgaatgccgcaccggcaacggatctgctgctacaggcgctgcacgatttccgactcaagtgccaggatacggccgccattgtctacacagtgctgccggcctgcagcctgcacaacttcagtacgttcctgtccatttgcggggtgaggcacgagtaggagccgcacgcagaaacttgaaggatgatgatgataatgatgatgataaggatgaggatgatatggaggaaaatgatgaaacaatttgctgccaccgcaccaagcagaacacagaatatatatatacaccactatatatacacagatatatgtagaattgatcttttttggtttgacaatggcagagggtaatctttggataattccaagccagttggcctttctcacatgatatggttcgcaaaatactacattgaattcgaaaagcttccatgtttcattaacatttcggcattacttttaaagtaagcagttgttaggtgtctgttgtaaataattgaggccaactggcgccaggttttatccacagattgcttcattgttcccacactctttcagtaacaccagctgcttgccctttgttgatattgttaactagcaggcgtggcgattctaagatcgcaaagatgcagtgtagtcagcatgctgtatccatagaataaatcacttcgtgtcgcagtttcggaccaaaaaaaactctcacaaaatggtaaccaaaaaccaataaaaaaaaacaaaaaaaaaggaagaaaca

SEQ ID NO: 1571 - DNA, 2556 bp, DROSOPHILA
gccatttggcaacactggcgctgcattagcggcaaaaaagattaatttggccatttacgttggcgtaaagttctgtcgcacaacaattataaagctcgaccagctgggttgcacaagaacggcggaggtggcggcagagagaaaagagtgaaaaacaaaccaaaagacacggcaaatcagtctagtcaacaaaagcagaccaaatgagcacgcacttcgggactaacgagcagcacaaactaagccaaaaataaagctaaagataaaagagaggcagaggcatcacacacacacacacacccgcacgcacacacactagcacaagccattacactaagcgaaaccgcatcggaaatcggcttcaagatgcgggtagtggccatggtcagtggcggcaaggacagctgctacaacatgatgcagtgcgtcgccgagggccacgaaatcgtcgccctggccaatctgcatcccaaggacagagacgaactggacagcttcatgtaccagacggtcggccacatgggcatcgagatactggccagcgccatgggattgccactataccggcgcgaaaccaagggcaagagcacccagaccggcaagcaatacgtgcccaccgatgacgacgaggtcgaggatctatacagtctgctggagacatgcaagcacgaacttcaggtggatgcggtggccgtgggcgccatcctctcggattaccaacgcgtgcgtgtggagaacgtgtgcagccgcctgaacctgatatccctggcctatctgtggaggagagatcagactgaattgctgcaggagatgatcgactgccaggtgcacgccatcatcataaaggtggctgccctgggcctcgtgccggatcgacacctgggcaaatcgctgcgcgagatgcagccgcacctgctgaagatgcgcgacaagtacggactgaatgtgtgcggcgagggtggcgagtatgagacattcaccctggactgcccgctctttcggcagcgcatcgttgtcgaggacatccagacgataatcagcagtgccgatcccatctgcccggtgggctacatcaatttcaccaaactgacgctgcagccaaaggaggcggcgggcgcggccagcagcggcggcaacgaggtggtgttcgtgaagcgttcactcgactatattagcgatctgaacgaatcgacgtacagcgacctcagtgatccggatttcagtgaaacagaactggaactaatcgaaaaggagaccaggctgcgcgaatcgcttagccaaagctccggaacggagggcattgagcagggcatgcagcaggcattggacacgctgcgcgatttgtgccaagccaagggctacgatctgcaggatctgtgctatgtcacgctctatgttcgctcgatcggcgagtatcccttgctgaatcgtgtctaccatcgcgccttcgactttcataatccaccgacacgcgtctgtgtcgagtgtccgctgcccgatggctgccatgtggtgatggaggccattgcctaccgccagccggtggccggaacgatatccagtgccgaggagcgtgatcgcgagggcgaggagactgcggcggcgctgctcaacgggcgacggaacacgatgcatgtgcagggcatctcgcattgggcgccggccaacattggtccatatagccagtcaaccaggattggcgacattacgtatatctcaggccagatcgccctcgtacccggcagcatgacaatcatcgagggcggcatccggccgcagtgcaagctcacgttgcgccacatcagccggattgccaaggcgatgaacgcccacggccagttgcgtgatgtggtgcacggcatctgctttgtgacccatccagccttcattggcgaggcgcgtcgccagtgggagcgtcgcaccaccaatgccatcatggactatatagtgctgccggcactgccgcgtgaggcactcgtggaatggcaggtgtgggcgcatacgcacaacgatcgattcgattatgaggagactggctgttcggtgggtgactacaccatttcgatacgtcgacgatggaattacgagaacaattgtgcggctatcgtttgctatgtgtccactggcctggcctcgtccaccacccaactgacgcagctgagcgatgacattctagggaaccactgccgtttggcgcaagcggttaatgccgaacatctggacgaaatcttcacgtacgtggttaatcgtctgctaaaggattatccgctggccaagaaacaggcgtcgcaaccgacaaattcggcaactccacctgccacgcccacgcaaccgggcggcgctggcggagatcaacagcagccagtgccggcgatccatctgaaattgttctaccaagtgaatgccgcaccggcaacggatctgctgctacaggcgctgcacgatttccgactcaagtgccaggatacggccgccattgtctacacagtgctgccggcctgcagcctgcacaacttcagtacgttcctgtccatttgcggggtgaggcacgagtag

SEQ ID NO: 1572 - protein, 729 aa, DROSOPHILA
MRVVAMVSGGKDSCYNMMQCVAEGHEIVALANLHPKDRDELDSFMYQTVGHMGIEILASAMGLPLYRRETKGKSTQTGKQYVPTDDDEVEDLYSLLETCKHELQVDAVAVGAILSDYQRVRVENVCSRLNLISLAYLWRRDQTELLQEMIDCQVHAIIIKVAALGLVPDRHLGKSLREMQPHLLKMRDKYGLNVCGEGGEYETFTLDCPLFRQRIVVEDIQTIISSADPICPVGYINFTKLTLQPKEAAGAASSGGNEVVFVKRSLDYISDLNESTYSDLSDPDFSETELELIEKETRLRESLSQSSGTEGIEQGMQQALDTLRDLCQAKGYDLQDLCYVTLYVRSIGEYPLLNRVYHRAFDFHNPPTRVCVECPLPDGCHVVMEAIAYRQPVAGTISSAEERDREGEETAAALLNGRRNTMHVQGISHWAPANIGPYSQSTRIGDITYISGQIALVPGSMTIIEGGIRPQCKLTLRHISRIAKAMNAHGQLRDVVHGICFVTHPAFIGEARRQWERRTTNAIMDYIVLPALPREALVEWQVWAHTHNDRFDYEETGCSVGDYTISIRRRWNYENNCAAIVCYVSTGLASSTTQLTQLSDDILGNHCRLAQAVNAEHLDEIFTYVVNRLLKDYPLAKKQASQPTNSATPPATPTQPGGAGGDQQQPVPAIHLKLFYQVNAAPATDLLLQALHDFRLKCQDTAAIVYTVLPACSLHNFSTFLSICGVRHE

SEQ ID NO: 1573 - DNA, 9114 bp, DROSOPHILA
aaacactttcggcgcaacgaacggcaaccccgcttatttttcgggttggcaactctaccctggaaacccagcgtcgtgttgtctcgtttcaaagcgccaagcacctgccgcttctcagtttcttactgatccttgatcacttcaggtcaggagttcgtttttttagcactctgcactgcggtttgccactaattccccttcataaacccttcaaagggcgctttctggcagcgctcttcttcttgccagcgattttatgtcctccgctgcgcttcccgttccgttttaattgcagtgcagcgcttaactgttgtttatttacgggttctttttgcgtttgtctttaatcggaaaacaaaacaaccggcggttatttcccaaggaaattgtgttagggtttacgcgatttgtgaagcctgcgttttcggttggctttttgttgatttgatggccactgcagcatccacttttaattagcgccgtttataggagcggcacacgcacggattaccgttacgcggattcggcggtccggcggactgaccactgaaccgttatatagcagcagcacattaacctttgtttattttgaccaatttttgcgtgcgaagaagcgaaatataaataattttcattgcaagtccgccagtgtgaccgtttgcgcacgtcaagagaaatgccggaattccgtcggcggctcagtgtggccaaagcaagccagcacgaagtagtttgcaactacgttaacatttaaaaagtaataggtttaaaggagaaattacgatttggacatacgtcatttaagtaataaatataaattgcgtaaacgtattagccccaaggtcaatacgtagtgtgtcttcatgccgccaatcgtctatcgatatgcgggtaatgttatcggcaaactctcaggcgacgcttgtttattggcggtgtttaaataaagagtttaaaattggcaggttttgcacattaggctagagcggattgaacagcaatgtggagcaacttcgaggcgtcctccctggaggacgaaaccatctccaacatattttcgtcgcgaggcatcttccaaataagcagtgaagaggaagtgagtccttattgtgcagaatctgcagttgggtttctacgctcgccttctttcattgtcaggtaaacaaatatccagatgtcatggcctccgtgcagtgcggcaagatggtcattggcatcgacaagagccttttgctcctggaggacgaactggtggccaagtgcagctttctggcattcggggcagccattgaggccattgccatttcttcaagcggcaacctgattgtatgcggcctcagcgatggcgaagttcacggagtgttcatcaagggcctgctcctgttcagcgtggccgtcaatctggaggacgtgagcctaactggcgggaccttccggagcatccatcaactggatcagcggttttacttcacctgtaagaatggaagcatctataggtaagccattcacagagatgggctctggcatatgcgtgataaaactggatcttgacattatttcattaaacgattcaaacgctgtgtagcttaagcgacattgatgagacctgcttggaaacgttaggcaatatgagcctgaatgaaaacgaaactatagcttgcgaaaaggccctgctcgaggacgtcaccattcaacgtctttccaagggcagatcctcgtgcagcgtggactgtgcagtgctgctcaagcggctgctgaccggcaacatcagtgccgagaacaatcaggatgatctggaggcgcaacccggtctagttatcactggagatcaaagcactatgaactttaggaatgcagccaatgacgtgacacgaataaatttgcccgctcagtacggcagcctaaagcagatcttcaacttggaacactatatgtgagtgggtttgcttattgtggtgctagaatccctctaacgtgtatctgggttttgcagtatcgcactcaccgattccggccacttggtggagatttgtccatacactcgcacagtgtacatgtgtcaaactacccaacaaaaaaatctgctcatcgaggatctgctggttatggagtgcagcgaagataacattgagcttctggtgctgacgaaatcaacggcggagggacgcttcattaagatagtggagtacccaagtatgagtccagcaaacataaaacataaacatacagtaaggctaaaaaccttgtgtcattgcagcgctcaatgtgaagaacgaggtagaagttcctgatcacgcatggcttgtgcgtcagcctaagtgtgcggtcaatctgtattatctggctgccaaggaagtcaaccagagcagcataccctccgtggtggagatgatgctcgtttccgagaccgaccccagtgatcgttttaagaagctgatttgcaaggggcgactggaggaggctgaggtattgagtataattgatctcttagtcattcattatccattaacatttgcaacaggaatttggcaagcagtttgagctgtgcctccagcccatctatgaagccaaagcgaaacgcattttggtcgagctttgcaactcgaattcacaaaacgtggacactaaattccaagacttgctgcaactgctgtctcaggtggaaagtaaggcattcataaagagccatcgcatgatcaacttgaactcgaggcacatccttgagcggtatcttcacgaggtcaagaagcggttgacttttgaggacgacgaggaggatatgttggaaatcgacgagcaactgcaccgacttaaaactctggccataatagatccctacgaatgcaacacggattggcagaagtttatttacgataacaacttggtcaggatggtcaagtcgctattcaacacagatatgcccacggcttgtctcatttggcggcggcattcgagcagcattctgccgctgctaaacgaagatgagttgcgcacgcttttagggttcattccgagcaacaccaagcccttcaacgttgtccagtggttgcgtcagttcattccgatggtcagcaacacccatcctagcataatgccctttatcactgactggagtattgagatgacgcggaatctgcagtatagtccgcattggccggatatcggcctggagttctgcacaaagatactggacatttttgaggaaatccagtttacttactcgtaggcaaatccttttttcgccctaaaatatgatagatttaacttgtatatccgtttcagcgatgtgcggcgtcagcaagagcgcaacgttggaaaactgcgggatcttgtcaacgcactgcaggatctttctgtgcttaagaccaactataacatgggctttacactggacaactacatgcaggattccatcgacgccactgcgttgagcattttgcaacacgttcaactagataagcttcagcgtctggtgaagaacttcatgtacccgatcttccaggagaagggacggcagccactggacgtgattaaacagtacatatcacagttagtagccagtcggctatcttctagttcatggctggatcgggcgatggcttgcattgagctgcttcacaacgaagacagccgtttggagtgcgccttgtctgtgctgcaaaacgcacctgtgccctggcctgatacactagctcctctaatccggctgcgtgcctccactcatccattggccgtgaagatcaatgccgagtatgagattcaggtgattaagatcatgaaggtcaagtacggctggccggccgacagctccgatatcaacctggagcttttcatgatgcgcattgtgaagttgaaccttccggacatgctggacgacatcagcgccctcaccaaggcggcgccggagttatcaactagtgccaactttaactgctgctatcaaatggcacggagaggacaagttgagatggcttatgaattcttcaaaaagctgaatggtgagaaaaattcgaagagcgcgaaggaagtggtggagatcatggctaacatcttggagaacagctcctctgcttcgtttgaaagtgatattaaagtgcaggagcacctgaacgtccttgagctttttaagttgttcttgccgcatgttgagtccgtttatgagcgccgctacctagtgatcaagcatcgtttccgcctaaggaaattcggcatccttttgagctgcagcagcgagctgataccgctgcacagacgtcattgccttctggatgaggccattgaaaggataattgagcgggcccaggccacgctgaatgtgtccgcattcatagccagcgaaataagcgaactgtgtaccgctctcggtcttccgaaagtatttggtttgcaccgcatttgccaacgcattggatgcctgcccctcagctgcgccctcgcttatcatgttgtaagcttcgtcgactgtgtgcccgccaatgcaggcgagttcgtcaatcttgcacttgagctgctggttcagcaaattgaaagcgccaagggaaagaatcagggtaagtcgtatacagctatgcaacaatgggattgaacgaaaaatccatttatgttttgcagaaacggcctcctccctgcagttgatcaatgaaaacgatccgcttagcttttatttagcgtacgagttgctcacctccgccctgctccacgagagcagccgtcgtcacgatctagttgaactcatcaaatacatacgcgtggccgtaatccactacccgctagacgccattaagagtcactacgacggcaaggagcaggccgtcaacgagcacatctgccgggccctcgatgggatttcggtagccctgggcgaaaccacaataaacttcagttgtgctcttaacggatcctttgacgtgaagactctgacggttccaacgactacgaagaagcgctactcggtgtccatgtttgatgaagtagaagtgcagcctatccagcagcagcctcagaaggtattgatcgtagacagctataattgactatagttataatgctttctgttgtcttcgaagaaaagcgtcggaggtcgcatggcaatagtgaagttcttggctcgcactctgttgcttatggtaatcgaaacggagccaaacaactcattgctgatgcaggttcgcaatgaactgccggagaacacaaaagcggatgtcgaaagtgcttgcgctgacttctttctgtcactggagcacttgacgaaggtgaaggagcacgacgcttggtacgttatgtcgcaatatctgctggatttccagaagcaaaactgtcgcacgaagcggatcatcaacgagggctttattacgctgcagctgcgccgcatattccgaaatgcgatggggagcaaagatgtgaacttcatagagcttttcaccatgttggtggtggacagcgaggcactagcgctgctggagaagctctccgttgaagtaaagaccgatctgcaaaaaatcaacttcctgacactatccgccatgtaccacgagcatatcgaagacttggacagtgtgcacatgatacgcaccaagtaagtgaagtattacattaaaagtctagatgttaaacttcgttttattggtttgcaggagattgaaactcttctattacctggagttttgccaacaggatcatagaataaagggcaagttcaatgccgacatggacaacatagaggacctgcttaaggagtttcacaataagcaacttgacgttcagcttttggaacgcatgagcaaggactttgggttcgactaccaaaagattcttattacccagatactaagcatattgagcgcccaggagttgcgcttcgaggtgaagagggataccttcggcgacgaggaactggttatgctaagcagcgcccaggaaatgcgcgatatgtgccaaccgtacattaatgaaatcaataatgtcgagctctttacttccaagttaaaacactttattgaagacgtaagctcactgatgccacaaataatcttttttttaatatctttgcaaatcgtttagatcaacatttacttctacgagttgtacatgtgtgtgatcaacatcctaatgtacttcgattcggctccgaaggaaatggaaatctggatgaacattttgcacttcctgagacacaagatgatcaccagaagacgcaatcggccaggtcaggtggaaaccgacacgtggctgaaatcacaaagggaaaatggcgttatgccgaagatatctcgatatcgtctgccttttaagcccatcgtagagcaacctcttaaggatattcttggtatattcaactgaaatagtttaatgcttaatgcttctgtttaattatagtttccgcttcttctattcagacagcgaactaaacgtggacaactgccaaagctggtttccactgattcagatgtacacggctttgaagggatccaaggatagttcccagaactgtgactacttctgcatgtcagcagtaaagaattcgatatcggagtacaagtcgaaaaatgattcggaatcatggagtcttcatcccacgaataatgccttcctgcagtcaatactacgactggtcgagaaggtgaacaacccaaacaaggcatttctaatactgtacttcgtgtccaactatgctcgtgatggagccgatcaggtggaggcctcctacgagtgctggaagtttgtcaaggagaagggccacctgattacagatccaaagagtcgcgagcaggttgccaaggtgaagcgacggtatcctattcagaagacccagcacctgctgtatgtctatggcctgaccgatgagaagctactgcgccaagttgagaaccccaccgagcttattcaggcgctctaccaccatgagctgatcctcaagtccagcaaagtggatattaacgctctggtcgcagagatagccaagctgcacgacctctgcttagccaccatccagtaccgcctgctacagaagtggctcgctctgactatggagtctgcgggtgatggtaccattttggaggagaccttcatggaggagcagaactggccggagcaggccaacggcgcagagtcctccaacagccaggacgccagcgagaacgtaaatagagcgttttacatactttccagttggccaaaggcggaggcagtcaagttccttgtgggtctgatcttcaagggcgggtaaggattggtacttaaaagttagcgaaaataattcattgaataaacccttccaccagttcggtaaacacctccacacagctgcaaatgtacgagtgctattccaagctaaacgatggcagcaactcctttaccaacacgattagccaacgccagttcatcagcatcaagtgtgtgcacgagctcaaggctctgggctacaagtcgaacctggagaagttctccgacgaccattgcaacaagattgacattctgaagatgatctggcagcgtaatgcgcagaatcccctttcgctggaagtcatggccaacatttgcctgggctttgatatacacttgccgcagatctggaacggcattctgaagcgcatggtcatgttccatatggtgcgcgagctgaacgccttgttggatgtactcagctgccggccgcatctacttcacctggatggactggcccaggcctgggactatgtgctctgccatcctctgcagaacgcagtcgagctacgatcctttaagcaggaagaggtgctccacaagacgctgctgcgcctgcagggctgtccggtggtgcacgccctcaacctgctacagttcgcccagctctgcatcgtcgtccatcgaccgcacatggccgcctctctactcagcttctgccagagcagcgagcaacgccaaaagatcaaaaaggtatgctcgaaccgcgcactttaacgaaatgctctattgtcactctaactcttcttgcagatgatacattcccatccggtggagaaccttcggcaacagatcttggatctggaagatgctggtattttgccggtggtgctgaactttgcgctcaaggaactaaatctgtaagcgtagagatttggattttactattcccataattttttgttttattggtcgaatatctgcgttaagtgcgttcgggtcaagatacttttgtaaatatcaaggttttatacctgcaaatatagtttatacaaacgatgactattttctattttaattttaatatgttattttatatacagtagcaattagtcaatattcaaacagtacaatctcttaatttcataatttatgcatcacaaaacaatgtgttaatttgagaaattgtctagggaacttcgcttcccagtttaaaattaacaacaatcgggatgacgtcatacgtatgtatcacttctgtaaacagtgggctcaagttgatggaatactgaaaataatgagatatattaggattttttttaaatgaagactttgttgtgtaaagaacagtcagtctcaaatcaatttaattaaagtaaatgggaaaaaattaatatactaaagaatcgaacttttcgaaattagttggagacgaattttctcgagcccactgtaccagtcagctgtggccgccagctgttttctatttggggttagatcaaagacaggttacactttgtatgtaacttgaaaagcaaggagaaagctgcgaaactaagttaaaccgagatgatgcgttctttgataggagcacaaaagtgctggggcctgatccgcaccaggaactttatggaattacccaccaaacaggtgccagcatccttcgcattgttcaagtaagagcaaaaaataaatgatgagcttacatggtaaatgagtactttcatctctaacaggcgtcactactcaccgcccacgcatatcaagcaatcagcggtcgccaatgaatccggaaccatggcggagggtaagtgttgtcttgccagagtcaaacccatcgtaatccccgaacgtctgcagtcaagcaggggatgatgaagcgattggggctggagcccggttacaacccgctgcccaaatccagggagcagctgctcaagtaccagccgaagc

SEQ ID NO: 1574 - DNA, 6302 bp, DROSOPHILA
atgtggagcaacttcgaggcgtcctccctggaggacgaaaccatctccaacatattttcgtcgcgaggcatcttccaaataagcagtgaagaggaagtaaacaaatatccagatgtcatggcctccgtgcagtgcggcaagatggtcattggcatcgacaagagccttttgctcctggaggacgaactggtggccaagtgcagctttctggcattcggggcagccattgaggccattgccatttcttcaagcggcaacctgattgtatgcggcctcagcgatggcgaagttcacggagtgttcatcaagggcctgctcctgttcagcgtggccgtcaatctggaggacgtgagcctaactggcgggaccttccggagcatccatcaactggatcagcggttttacttcacctgtaagaatggaagcatctatagcttaagcgacattgatgagacctgcttggaaacgttaggcaatatgagcctgaatgaaaacgaaactatagcttgcgaaaaggccctgctcgaggacgtcaccattcaacgtctttccaagggcagatcctcgtgcagcgtggactgtgcagtgctgctcaagcggctgctgaccggcaacatcagtgccgagaacaatcaggatgatctggaggcgcaacccggtctagttatcactggagatcaaagcactatgaactttaggaatgcagccaatgacgtgacacgaataaatttgcccgctcagtacggcagcctaaagcagatcttcaacttggaacactatattatcgcactcaccgattccggccacttggtggagatttgtccatacactcgcacagtgtacatgtgtcaaactacccaacaaaaaaatctgctcatcgaggatctgctggttatggagtgcagcgaagataacattgagcttctggtgctgacgaaatcaacggcggagggacgcttcattaagatagtggagtacccaacgctcaatgtgaagaacgaggtagaagttcctgatcacgcatggcttgtgcgtcagcctaagtgtgcggtcaatctgtattatctggctgccaaggaagtcaaccagagcagcataccctccgtggtggagatgatgctcgtttccgagaccgaccccagtgatcgttttaagaagctgatttgcaaggggcgactggaggaggctgagcaggaatttggcaagcagtttgagctgtgcctccagcccatctatgaagccaaagcgaaacgcattttggtcgagctttgcaactcgaattcacaaaacgtggacactaaattccaagacttgctgcaactgctgtctcaggtggaaagtaaggcattcataaagagccatcgcatgatcaacttgaactcgaggcacatccttgagcggtatcttcacgaggtcaagaagcggttgacttttgaggacgacgaggaggatatgttggaaatcgacgagcaactgcaccgacttaaaactctggccataatagatccctacgaatgcaacacggattggcagaagtttatttacgataacaacttggtcaggatggtcaagtcgctattcaacacagatatgcccacggcttgtctcatttggcggcggcattcgagcagcattctgccgctgctaaacgaagatgagttgcgcacgcttttagggttcattccgagcaacaccaagcccttcaacgttgtccagtggttgcgtcagttcattccgatggtcagcaacacccatcctagcataatgccctttatcactgactggagtattgagatgacgcggaatctgcagtatagtccgcattggccggatatcggcctggagttctgcacaaagatactggacatttttgaggaaatccagtttacttactccgatgtgcggcgtcagcaagagcgcaacgttggaaaactgcgggatcttgtcaacgcactgcaggatctttctgtgcttaagaccaactataacatgggctttacactggacaactacatgcaggattccatcgacgccactgcgttgagcattttgcaacacgttcaactagataagcttcagcgtctggtgaagaacttcatgtacccgatcttccaggagaagggacggcagccactggacgtgattaaacagtacatatcacagttagtagccagtcggctatcttctagttcatggctggatcgggcgatggcttgcattgagctgcttcacaacgaagacagccgtttggagtgcgccttgtctgtgctgcaaaacgcacctgtgccctggcctgatacactagctcctctaatccggctgcgtgcctccactcatccattggccgtgaagatcaatgccgagtatgagattcaggtgattaagatcatgaaggtcaagtacggctggccggccgacagctccgatatcaacctggagcttttcatgatgcgcattgtgaagttgaaccttccggacatgctggacgacatcagcgccctcaccaaggcggcgccggagttatcaactagtgccaactttaactgctgctatcaaatggcacggagaggacaagttgagatggcttatgaattcttcaaaaagctgaatggtgagaaaaattcgaagagcgcgaaggaagtggtggagatcatggctaacatcttggagaacagctcctctgcttcgtttgaaagtgatattaaagtgcaggagcacctgaacgtccttgagctttttaagttgttcttgccgcatgttgagtccgtttatgagcgccgctacctagtgatcaagcatcgtttccgcctaaggaaattcggcatccttttgagctgcagcagcgagctgataccgctgcacagacgtcattgccttctggatgaggccattgaaaggataattgagcgggcccaggccacgctgaatgtgtccgcattcatagccagcgaaataagcgaactgtgtaccgctctcggtcttccgaaagtatttggtttgcaccgcatttgccaacgcattggatgcctgcccctcagctgcgccctcgcttatcatgttgtaagcttcgtcgactgtgtgcccgccaatgcaggcgagttcgtcaatcttgcacttgagctgctggttcagcaaattgaaagcgccaagggaaagaatcaggaaacggcctcctccctgcagttgatcaatgaaaacgatccgcttagcttttatttagcgtacgagttgctcacctccgccctgctccacgagagcagccgtcgtcacgatctagttgaactcatcaaatacatacgcgtggccgtaatccactacccgctagacgccattaagagtcactacgacggcaaggagcaggccgtcaacgagcacatctgccgggccctcgatgggatttcggtagccctgggcgaaaccacaataaacttcagttgtgctcttaacggatcctttgacgtgaagactctgacggttccaacgactacgaagaagcgctactcggtgtccatgtttgatgaagtagaagtgcagcctatccagcagcagcctcagaagaaaagcgtcggaggtcgcatggcaatagtgaagttcttggctcgcactctgttgcttatggtaatcgaaacggagccaaacaactcattgctgatgcaggttcgcaatgaactgccggagaacacaaaagcggatgtcgaaagtgcttgcgctgacttctttctgtcactggagcacttgacgaaggtgaaggagcacgacgcttggtacgttatgtcgcaatatctgctggatttccagaagcaaaactgtcgcacgaagcggatcatcaacgagggctttattacgctgcagctgcgccgcatattccgaaatgcgatggggagcaaagatgtgaacttcatagagcttttcaccatgttggtggtggacagcgaggcactagcgctgctggagaagctctccgttgaagtaaagaccgatctgcaaaaaatcaacttcctgacactatccgccatgtaccacgagcatatcgaagacttggacagtgtgcacatgatacgcaccaagagattgaaactcttctattacctggagttttgccaacaggatcatagaataaagggcaagttcaatgccgacatggacaacatagaggacctgcttaaggagtttcacaataagcaacttgacgttcagcttttggaacgcatgagcaaggactttgggttcgactaccaaaagattcttattacccagatactaagcatattgagcgcccaggagttgcgcttcgaggtgaagagggataccttcggcgacgaggaactggttatgctaagcagcgcccaggaaatgcgcgatatgtgccaaccgtacattaatgaaatcaataatgtcgagctctttacttccaagttaaaacactttattgaagacatcaacatttacttctacgagttgtacatgtgtgtgatcaacatcctaatgtacttcgattcggctccgaaggaaatggaaatctggatgaacattttgcacttcctgagacacaagatgatcaccagaagacgcaatcggccaggtcaggtggaaaccgacacgtggctgaaatcacaaagggaaaatggcgttatgccgaagatatctcgatatcgtctgccttttaagcccatcgtagagcaacctcttaaggatattcttgacagcgaactaaacgtggacaactgccaaagctggtttccactgattcagatgtacacggctttgaagggatccaaggatagttcccagaactgtgactacttctgcatgtcagcagtaaagaattcgatatcggagtacaagtcgaaaaatgattcggaatcatggagtcttcatcccacgaataatgccttcctgcagtcaatactacgactggtcgagaaggtgaacaacccaaacaaggcatttctaatactgtacttcgtgtccaactatgctcgtgatggagccgatcaggtggaggcctcctacgagtgctggaagtttgtcaaggagaagggccacctgattacagatccaaagagtcgcgagcaggttgccaaggtgaagcgacggtatcctattcagaagacccagcacctgctgtatgtctatggcctgaccgatgagaagctactgcgccaagttgagaaccccaccgagcttattcaggcgctctaccaccatgagctgatcctcaagtccagcaaagtggatattaacgctctggtcgcagagatagccaagctgcacgacctctgcttagccaccatccagtaccgcctgctacagaagtggctcgctctgactatggagtctgcgggtgatggtaccattttggaggagaccttcatggaggagcagaactggccggagcaggccaacggcgcagagtcctccaacagccaggacgccagcgagaacgtaaatagagcgttttacatactttccagttggccaaaggcggaggcagtcaagttccttgtgggtctgatcttcaagggcggttcggtaaacacctccacacagctgcaaatgtacgagtgctattccaagctaaacgatggcagcaactcctttaccaacacgattagccaacgccagttcatcagcatcaagtgtgtgcacgagctcaaggctctgggctacaagtcgaacctggagaagttctccgacgaccattgcaacaagattgacattctgaagatgatctggcagcgtaatgcgcagaatcccctttcgctggaagtcatggccaacatttgcctgggctttgatatacacttgccgcagatctggaacggcattctgaagcgcatggtcatgttccatatggtgcgcgagctgaacgccttgttggatgtactcagctgccggccgcatctacttcacctggatggactggcccaggcctgggactatgtgctctgccatcctctgcagaacgcagtcgagctacgatcctttaagcaggaagaggtgctccacaagacgctgctgcgcctgcagggctgtccggtggtgcacgccctcaacctgctacagttcgcccagctctgcatcgtcgtccatcgaccgcacatggccgcctctctactcagcttctgccagagcagcgagcaacgccaaaagatcaaaaagatgatacattcccatccggtggagaaccttcggcaacagatcttggatctggaagatgctggtattttgccggtggtgctgaactttgcgctcaaggaactaaatctgtaagcgtagagatttggattttactattccca

SEQ ID NO: 1575 - protein, 2090 aa, DROSOPHILA
MWSNFEASSLEDETISNIFSSRGIFQISSEEEVNKYPDVMASVQCGKMVIGIDKSLLLLEDELVAKCSFLAFGAAIEAIAISSSGNLIVCGLSDGEVHGVFIKGLLLFSVAVNLEDVSLTGGTFRSIHQLDQRFYFTCKNGSIYSLSDIDETCLETLGNMSLNENETIACEKALLEDVTIQRLSKGRSSCSVDCAVLLKRLLTGNISAENNQDDLEAQPGLVITGDQSTMNFRNAANDVTRINLPAQYGSLKQIFNLEHYIIALTDSGHLVEICPYTRTVYMCQTTQQKNLLIEDLLVMECSEDNIELLVLTKSTAEGRFIKIVEYPTLNVKNEVEVPDHAWLVRQPKCAVNLYYLAAKEVNQSSIPSVVEMMLVSETDPSDRFKKLICKGRLEEAEQEFGKQFELCLQPIYEAKAKRILVELCNSNSQNVDTKFQDLLQLLSQVESKAFIKSHRMINLNSRHILERYLHEVKKRLTFEDDEEDMLEIDEQLHRLKTLAIIDPYECNTDWQKFIYDNNLVRMVKSLFNTDMPTACLIWRRHSSSILPLLNEDELRTLLGFIPSNTKPFNVVQWLRQFIPMVSNTHPSIMPFITDWSIEMTRNLQYSPHWPDIGLEFCTKILDIFEEIQFTYSDVRRQQERNVGKLRDLVNALQDLSVLKTNYNMGFTLDNYMQDSIDATALSILQHVQLDKLQRLVKNFMYPIFQEKGRQPLDVIKQYISQLVASRLSSSSWLDRAMACIELLHNEDSRLECALSVLQNAPVPWPDTLAPLIRLRASTHPLAVKINAEYEIQVIKIMKVKYGWPADSSDINLELFMMRIVKLNLPDMLDDISALTKAAPELSTSANFNCCYQMARRGQVEMAYEFFKKLNGEKNSKSAKEVVEIMANILENSSSASFESDIKVQEHLNVLELFKLFLPHVESVYERRYLVIKHRFRLRKFGILLSCSSELIPLHRRHCLLDEAIERIIERAQATLNVSAFIASEISELCTALGLPKVFGLHRICQRIGCLPLSCALAYHVVSFVDCVPANAGEFVNLALELLVQQIESAKGKNQETASSLQLINENDPLSFYLAYELLTSALLHESSRRHDLVELIKYIRVAVIHYPLDAIKSHYDGKEQAVNEHICRALDGISVALGETTINFSCALNGSFDVKTLTVPTTTKKRYSVSMFDEVEVQPIQQQPQKKSVGGRMAIVKFLARTLLLMVIETEPNNSLLMQVRNELPENTKADVESACADFFLSLEHLTKVKEHDAWYVMSQYLLDFQKQNCRTKRIINEGFITLQLRRIFRNAMGSKDVNFIELFTMLVVDSEALALLEKLSVEVKTDLQKINFLTLSAMYHEHIEDLDSVHMIRTKRLKLFYYLEFCQQDHRIKGKFNADMDNIEDLLKEFHNKQLDVQLLERMSKDFGFDYQKILITQILSILSAQELRFEVKRDTFGDEELVMLSSAQEMRDMCQPYINEINNVELFTSKLKHFIEDINIYFYELYMCVINILMYFDSAPKEMEIWMNILHFLRHKMITRRRNRPGQVETDTWLKSQRENGVMPKISRYRLPFKPIVEQPLKDILDSELNVDNCQSWFPLIQMYTALKGSKDSSQNCDYFCMSAVKNSISEYKSKNDSESWSLHPTNNAFLQSILRLVEKVNNPNKAFLILYFVSNYARDGADQVEASYECWKFVKEKGHLITDPKSREQVAKVKRRYPIQKTQHLLYVYGLTDEKLLRQVENPTELIQALYHHELILKSSKVDINALVAEIAKLHDLCLATIQYRLLQKWLALTMESAGDGTILEETFMEEQNWPEQANGAESSNSQDASENVNRAFYILSSWPKAEAVKFLVGLIFKGGSVNTSTQLQMYECYSKLNDGSNSFTNTISQRQFISIKCVHELKALGYKSNLEKFSDDHCNKIDILKMIWQRNAQNPLSLEVMANICLGFDIHLPQIWNGILKRMVMFHMVRELNALLDVLSCRPHLLHLDGLAQAWDYVLCHPLQNAVELRSFKQEEVLHKTLLRLQGCPVVHALNLLQFAQLCIVVHRPHMAASLLSFCQSSEQRQKIKKMIHSHPVENLRQQILDLEDAGILPVVLNFALKELNL

SEQ ID NO: 1576 - DNA, 2672 bp, DROSOPHILA
atatcggtgcccccagttaattaaaatatattcaagagttcttttttatcggccaattggtatatttcccattatttggctaactttaatcgcaataatttccgtcttactttttttttgtccccaacgactccagagagagaaagaaagagtgagagagagagagagagagagagagagagagagagagagagagagagagagagagaaaagtgggctgaaaagagagggagactttcgataagatcacaaattatattatattgcgttgagcgataggaaacatctattactggattcgccacttcaaaatcgcactaatcgaagcatctaaataatgccataattatagaagataatgtcatataatttatgggactgcttatgccctcgattaaaagtcattgcgaagtcaggaaagaaaacagtggcaatccaatctatggaatcacttgagacattagacacacacgcgttaatgttgtttgccttttttgggtgttcccagttcaccgtttttttttttttttatattaaatttttaattgtgatatctgactggattttcctttgatttcttttgccagataaaccaagtggtgtaagatataatcatataaaaggattactttaatatgcttttatgctgtttaaaaaaaatgtgtaaacaaataataaattaaattgtatttacacatttagttcctacccttttcattcattaagtggcattgtacatacaagccattgttatgatgtttttaacattctttgtttgatcgttctaattttaatctaaatccaaatacgctaaactcaatgaatagcgtccgaatgtaaagttcactaatccaaccaaaccgtgagtgatttacaatggctgcaataaatttatggccaccaatccagattagccaattaccgtctgcgaataatccattcctggatgaccagggtataaatacgatttgtactaaaaaattccccatcagcagaagctaaagtatcaaacatgaagcaatacaccgttgccattatcctaacccttttcgttgccagtggatgggcccaaccgctggacatgcccagccagctggacgcccaggtgcgcagcgtggtggatgagatgaccagcattggcaaggcgaccggcgaggtactgttgagtcagtacgaagagatcgtcctggagccgcaaaacgaattggaggcagccgtcgagcaggtggagtcgcgtcgcgaggagagtcccgaatgcgtggccgccgaggatgaggagatcacccgcatcgtgaatgccgcccatgaggatctgtacgcctgcggcgttgtggccgcccagacatccgccgaaattgcctccgatgtgagtgccgccacccagcaactggtctacggtggctacagcctggccagcacctacaacaaatgcaactcgtacaagaactccgtgctgaagcagacctgcttggccaagttctatgtccaggccaccgtctatttggtcagtgcgcgctcctccatcaagaccatccgtcagtcgaccagcgaacgcatcccggacgtcttcgccgatggcaatgtgtgcacccactccgcatcctcgcaggcggtgctcggtctccaggaggtgaacaacaacatcgacgcctgcgtctaccgtcgtcgctaggtgaacacaaacttatttacctggattctgcaaataaaaattatgcatgttctatgccaaatgttatttagttattttttttttttttgcagtgttgcttgttgcagtgtgatttgtgtgctaacattttagaaagaatttattttaaagttcaatttttgtgtacgaaagtataaataaataacggagttaatcgaaaaacttacattattatacatagaatgaaaatacaaaattttaaattcaaaccggttttccggtctgttatctggcatggtcaccttaaccgtacgctagtttcaatttcaagtggaaccagtttcggttccgcactgttaaacggcaagatgttcggattgctgcgacacctgttcaaatttcaatttcttttcgttgtggcagccgttctgggcggaatttatcacacagagattaggcagttcctgcgtcgccaaacggacaactacctggaccaagctgggcaggatgcgagcattcccctggcgttccaagctggtgacgatatcggcacgctctttacaccggccgagttggccaaattcaatggcgaggaagagggtcgtccgctttacctggctctactcggttccgtcttcgatgtgagccgcggcattaagcattacggatccggctgcagctacaacttcttcgtgggtcgcgacgcctccgtatccttcatttccggtgattttgagacgtacgatccggaaacggccgacgatgtgttaaccctaaagccggacgacctgattggtttggccggatggcgggatttctatcaaaaggactacgtctacaagggacgggtaattgggcgcttctacgatgagaagggcgccctgaccacctatcatcataagtttctggagctgctggagcaggcacgagatgccaagcgacaggtggaggagctgcgtgcccggtatcccggctgcaatatcgagtggagcgaggagcgcggcactcgcgtctggtgcac

SEQ ID NO: 1577 - DNA, 672 bp, DROSOPHILA
aaagtatcaaacatgaagcaatacaccgttgccattatcctaacccttttcgttgccagtggatgggcccaaccgctggacatgcccagccagctggacgcccaggtgcgcagcgtggtggatgagatgaccagcattggcaaggcgaccggcgaggtactgttgagtcagtacgaagagatcgtcctggagccgcaaaacgaattggaggcagccgtcgagcaggtggagtcgcgtcgcgaggagagtcccgaatgcgtggccgccgaggatgaggagatcacccgcatcgtgaatgccgcccatgaggatctgtacgcctgcggcgttgtggccgcccagacatccgccgaaattgcctccgatgtgagtgccgccacccagcaactggtctacggtggctacagcctggccagcacctacaacaaatgcaactcgtacaagaactccgtgctgaagcagacctgcttggccaagttctatgtccaggccaccgtctatttggtcagtgcgcgctcctccatcaagaccatccgtcagtcgaccagcgaacgcatcccggacgtcttcgccgatggcaatgtgtgcacccactccgcatcctcgcaggcggtgctcggtctccaggaggtgaacaacaacatcgacgcctgcgtctaccgtcgtcgctag

SEQ ID NO: 1578 - protein, 219 aa, DROSOPHILA
MKQYTVAIILTLFVASGWAQPLDMPSQLDAQVRSVVDEMTSIGKATGEVLLSQYEEIVLEPQNELEAAVEQVESRREESPECVAAEDEEITRIVNAAHEDLYACGVVAAQTSAEIASDVSAATQQLVYGGYSLASTYNKCNSYKNSVLKQTCLAKFYVQATVYLVSARSSIKTIRQSTSERIPDVFADGNVCTHSASSQAVLGLQEVNNNIDACVYRRR

SEQ ID NO: 1579 - DNA, 3563 bp, DROSOPHILA
tcgggcggcataaattagtgcgagcgagacggctgcccagagacgtcacgcactatcaaacgagaaaatgatcaatggggaacctatccacatgcatcgcactcgctcgcacttgagatcaaaaggggggagagagcaggccggctaatatggaccacccaagaagatgacgtcgaattaagggccacccacgaagagacacgtcgttgctctctttctcgttgctgcatgtgtgttggtgagcgagatggtacagtgagaaaaaaaagtatcaattttgagcaatggaagatgggatttatattagaagagggtttaaggtattttaatgggaatactatatatacaagattttttcaatgctaagtcacaggaacagtatatatattctggaccaggatccttacccttacctaggtcgatccggccatgtccgtctttcccttcgcctgtatatcagttatatcagctaatgagatgggagtaagcagctagattccaataccaaaaattattcgaatcgctctatagatcggatataaattataggtaacttgtagggcattagtattctaagtaatgtcgacgccattagatggagctcgtgtaaaatctgtaaaatagtcgctatgctgctgaaacagccacttactatatatgtttaacgatatgtcttttaaaagttgtaactcaaacgatgatttaaaatgtatgatattaaatattagaaataagttaaatagccaagttttgaacccatgtaaacatcgattgagtggtttaagtgtgcgctgaaaaccttagctctttttcaaaccacacagtttaaaagtgtgcaattcatgcacactccacttattaattaaaagttgctggccaagaaatcatttgttcagttactacatttttaaaagcacaattgttaaattaattaatgataaccggttcttcctgagatatgctgccatccgcactctggtcacactgacagggcctcttgttccagcgtggttgtgcaaaaaacttcgtttgaactttatttctacatttaagttattaaattcccgtatcccgcccgaagatgccacccaaaaaggcgccaccaggtcccagcaagaagacggagcagaaaaagaaggagaaagtcattgaggtaggcttcgtaaccggaaagccgatgggtgagcccccctctttgtaaatccgtgatgtggaaacccggcagggagaaattcaataagatccacattgaactgaccaagtgtaattccatcggcaggacaaaaccttcgggctgaagaacaagaagggcaacaagcagcagaagttcatccagcaggtgcagaagcaggtccagtccggcggacagcatcctcgccaggatggcgacaagcgcaaggaggagaaggagaagaagctggccgaacagcgcgagatggcgctgatcttcaagccggtacagactcagaaggtggagaagggcaccgatcccaagtcggtggtctgcgccttcttcaaacagggcacctgcaccaagggcgacaagtgcaagttctcccacgatctttcccaggagaacaaggtcgaaaagcggtccatttatgtggacatgcgcgacgaggacgatccgatgaccaactgggacgatgccaagctgaaggaggtggtcgagaagaagagctccggcgaaaagcaacgtcccaccacggatattgtgggtctaagtttaaaaaactgcttaaaactcaaaactaacctcccctgtgtttcagatttgcaaattcttcctggaagctgtggaaaaatcaaagtacggctggttctgggagtgccccaacggcggaaagtgcatctaccgtcacgccttgccagctggatatgtgctgaagcgcgataagaagaaggaggaaaagcccacggaaatctcgctggtcgatttaattgagaaggagcgcgctgccctcggtcccaaccagacacgcgtcaccctcgagtccttcctcgcctggaagaagcgcaagattgccgagaagaaggccaagctggctgccgaggaagagcgcaagaagagtgacttcagcaagggcaaacagttcggcatctctggtcgcgaaatgttcagcttcaatccggatctggtcgacgacggacccatggaggagggcgacgctgctttcgacgtctacaacagggaggacgacgacgataatgccgtcgagttcaaggaactggatctggctgccctgtcgctggccgccaaggaggtggacggctcgggcaccattgcctccaccaatcgactactggaccaggcaaccgaagcagccaaaaccgccgcagccgaggacgcagcggccgacgaggatggcccatcgtcgtctgcacccgccaacgatgctgcccccatcaacaaggatctctttgttgatctggccggcgaactggatgacctagatctggacgatgaggacgatgactagtcctccgcgtagtttgtttgaaatgagtttgaaattgatttctgccttttagctacccttcaatcaataaagttgtggctcttaattgttgcatttctggaaatgaaacgtatgcgtttacaagcaagttttctctatttactgaatgaatacacgtcccattactacaataatcacttttgtttataaaaatacacacacttaacaaaactaactaaatcatcgcatgcctaccaaaatcctggaggcaaaactccgacagcctgtgcaatctgccgctcacgcaggaacttggccaggagcatttccagccgtgtcttcggaccaccttcgtcgtaggctgccagctgaggcatgtagatattctgaatgtagaccagcagcttgacgaactgcttgccgtaggtgcgccacaactcgaagccgagggtctggagaatctccatgatcaaggtagcactaatatcgggcaatggtttcacatgcaccatgtgcgctagccagagccatccctcattcagctcgaagcattcatccggtccagctgcctttcgcccttgactaatgatcacagctgcgtagagccgagcgagtcccgtttgacgcttaaggtaaatgtccggtttctccagctcgtttttatccgtcagccgatagcctatggtcttcagatactgctccggagtctgtccctgctgctggggtataacgtaaggcaccagaaagggtgactctttgtacatgtaggcgagaaaaaccttaccaaaatccggcaacagcttccaaaaagttattatcaccgaggcaaagggaaaggcggcctggggattgctgcatatggcagtctccgtttgactgacaaacttcttggccataagtagcatgcaatagtctcgggccagcggatggtcgttaatagttatggtgccattcatcaccttggtaggctggccggcaaagaagctgtacagcttgtcaaagttctgggctagatgctgcggactaactgctgaaatggcgttgaggggcaggtttattgccctctggcaaccggtgcgatactgcttaagggattcctccgtt

SEQ ID NO: 1580 - DNA, 1379 bp, DROSOPHILA
ttccagcgtggttgtgcaaaaaacttcgtttgaactttatttctacatttaagttattaaattcccgtatcccgcccgaagatgccacccaaaaaggcgccaccaggtcccagcaagaagacggagcagaaaaagaaggagaaagtcattgaggacaaaaccttcgggctgaagaacaagaagggcaacaagcagcagaagttcatccagcaggtgcagaagcaggtccagtccggcggacagcatcctcgccaggatggcgacaagcgcaaggaggagaaggagaagaagctggccgaacagcgcgagatggcgctgatcttcaagccggtacagactcagaaggtggagaagggcaccgatcccaagtcggtggtctgcgccttcttcaaacagggcacctgcaccaagggcgacaagtgcaagttctcccacgatctttcccaggagaacaaggtcgaaaagcggtccatttatgtggacatgcgcgacgaggacgatccgatgaccaactgggacgatgccaagctgaaggaggtggtcgagaagaagagctccggcgaaaagcaacgtcccaccacggatattatttgcaaattcttcctggaagctgtggaaaaatcaaagtacggctggttctgggagtgccccaacggcggaaagtgcatctaccgtcacgccttgccagctggatatgtgctgaagcgcgataagaagaaggaggaaaagcccacggaaatctcgctggtcgatttaattgagaaggagcgcgctgccctcggtcccaaccagacacgcgtcaccctcgagtccttcctcgcctggaagaagcgcaagattgccgagaagaaggccaagctggctgccgaggaagagcgcaagaagagtgacttcagcaagggcaaacagttcggcatctctggtcgcgaaatgttcagcttcaatccggatctggtcgacgacggacccatggaggagggcgacgctgctttcgacgtctacaacagggaggacgacgacgataatgccgtcgagttcaaggaactggatctggctgccctgtcgctggccgccaaggaggtggacggctcgggcaccattgcctccaccaatcgactactggaccaggcaaccgaagcagccaaaaccgccgcagccgaggacgcagcggccgacgaggatggcccatcgtcgtctgcacccgccaacgatgctgcccccatcaacaaggatctctttgttgatctggccggcgaactggatgacctagatctggacgatgaggacgatgactagtcctccgcgtagtttgtttgaaatgagtttgaaattgatttctgccttttagctacccttcaatcaataaagttgtggctctt

SEQ ID NO: 1581 - protein, 404 aa, DROSOPHILA
MPPKKAPPGPSKKTEQKKKEKVIEDKTFGLKNKKGNKQQKFIQQVQKQVQSGGQHPRQDGDKRKEEKEKKLAEQREMALIFKPVQTQKVEKGTDPKSVVCAFFKQGTCTKGDKCKFSHDLSQENKVEKRSIYVDMRDEDDPMTNWDDAKLKEVVEKKSSGEKQRPTTDIICKFFLEAVEKSKYGWFWECPNGGKCIYRHALPAGYVLKRDKKKEEKPTEISLVDLIEKERAALGPNQTRVTLESFLAWKKRKIAEKKAKLAAEEERKKSDFSKGKQFGISGREMFSFNPDLVDDGPMEEGDAAFDVYNREDDDDNAVEFKELDLAALSLAAKEVDGSGTIASTNRLLDQATEAAKTAAAEDAAADEDGPSSSAPANDAAPINKDLFVDLAGELDDLDLDDEDDD

SEQ ID NO: 1582 - DNA, 5236 bp, DROSOPHILA
caaaaactaaaacaacaaaaagccggcaagcaatggtatacaaaataaataaaaaaaaatatgacaagagaaaatccacaaaaaaatgaaataaaattgaatgaaaaatttaccaaaaaccaagttgtttttattccaagtgtatgtagttggcaatcaaacgattcaactgcagttaacatgatttattcgctacgtaagtgtgcttggctaagttgaataaatatcattaatatctgtcagctacattaaaggttcaaacattacatatatatatatctatatatttatcttaacattattaaatgtttaagggcttaaaaaaaaatatccttaggtacacgggtacgtatgtattattctgcgtctctttctatatcctctcaggatttgaatatattttgtattataaaatattacgcataaaatcatcggggggaacctgttaattcttggcatttgattcccgcattttctctggatatggcatagatatttttctagggttagctgtgtgaaacctaaatatttttaagttaaatttaaacaacgatttatacggctgacacattttaaatttttctgggttcaagcttagattttgtttacatgtttttttcttaatgcttaacactatgctttatatactttttcaaaatatattttaaaacttgttcagtaaaaagttttaaagtgataattcttaacagagtttttttagaaactttttttttagaaagatcaagcatacaattatttgtttttatcaataattcatatgactagaacctttcttttctaaatgcatttcgggcatagtatcccaggataaaaaatataacaggaacattttaaataattgaaatcagtatgcattttaacaaaattaagttataaaaaaaaatattttgctatcatgaaataagtgtgccggactggtcttcaaaatctttgctcggcgatgcggtcaatgttacgatcgaccctcgcgcggtacgccttaaacgcccaactctcggctgggcgtggtcgtggccatctgtccagtattactcccggccggcggcggggtcactaaactgggcagcaacttgttcagcagcgtgcgaatggcaaaggtgacatcgtgattggcgaagcagaacaggaaggagaccacaaagccctgcaggctgaccaacaccaccgatagcatctgatagaagtggtccagctgggtgccggcatccggacggtagggcagcaggaagtgttgcagtccgaacagcggtaccagaataatggtggcccgaaccgccttccggatggccaacggtgccggctgggcggactggggatgtaactttcgcacgatcactcgcagtacgttgatcagaaaaactgttgggtaaaatgcatatagctgagcaatattgtacttttaaagaaaattatgcatattactaaagctggccagcagcgaaagagttatgggcaccgagaagatccacaagtagagactgtcagttatccagcagctgcaataatgtgaaaagaaatgttaccatggatatagcgtagaatgtaatctcttaataaatgcaatgcaaaaaccaaatcaatcaggattatgtcttgtgtaaaattgtgaaaataacttactgcttattgtccggactactgaaatgcctggccagaccgtagacgatggctatgggtatgggtgaaaaccagctgatgacaataaaccagcgcatcacaatcgtgtccttgacaaagacctggcgaatggaaagaagaaggggcgtcaggatctgaacggacattcctgacatctcaacttgacgcagacgtaaagcagttggccaacgttgcgatttgctctcagacaaattgctgggggtgaaccattgccatgtcagcggctgcaggaaatcacatctgccatgcacagaagtcgcccataaagaatgcagacttgtgcaggcaattgccagattgccagacgagtaaggataactcaccacaacgagcaccaggtgcaggtgcaggccctcgcaaaacatccagaaatagttgaccaacataaagtagtgcaccaccagatgcagcccaatgcaccacagctgaaagttagttatgtttatggttttgtataattgcctagctacttgtagggctatgttattttcatagttacttttctcagtgcatcttaccggattttcggctatggtttcggaacgctccaccaccagacgataccataatatccaggccacacaggtgcaggccagcgaggcgaacagatgtacatggatgcggatgcgggtgcagcgcagggatctgcaaacggaatggaacggaacggaaagaaacgaaaagggatatccggccgtcagttaccggagggaaaggaaccgtgtgggtcgtagacaaacacttacttgaagcccaagaaaataataatcgatatgagcagggccagcagggagagggcataacccttcacgtacagctcgttgatgaactggcgaaactgcagtggcaactttcttgattaatgcccatgtaccacccgcttgatgccgccgaagcacttacctccaggtcctcatagtccacgcagttggtgtaattggaccaggtctgattgctaaccggatgacggtaccaggagccgttctccaggcagctatgaatgcgaaatgcttacgataattgtgactggctaagtgcggactgatgggtaaagggggtatttctaacaaagcgcctgacaatgcacaagttacccaactttaccaggagccagctgagctcagttggcgtgtaaagtgagatgaacgctatccattaaattggagatacatacatgtagtgcaagttttagagtgctgctacagtacacttagggagattatctctgcaagagttgaagaaggttttatttttctttcattttccatcatctttttctgagatatgctgcgagtttatgtaatagacacgaatgtaaactctataggattttccctgtttgtagcgcactcatacataaacattgtattttatgacacacagaacacattaaagcaaatgccgaatatggcaagatattttcgaatttatgctcaaacgaatattacatattgcagagcttatttgaccatgcgaaatcctgaacggaatgaaaatctatcctattcgtggtggcgtaatatacaggcatattgggcatttaactcacgtcttgtgggccagaaattttctgttgaatccttcgacgaaatcgggacaatattgactcagcacagtgccggccggagtccttggccagcagagatatccgtcaaagttcagggggcaaaagagtcggttctccttctgatttgtggccatcgtggcactgacgacggtggccatcagctcctccttctccgccagctcctcgtccacgtttcgcatgtcaataacgccctcgttcatcgcggcattctccagatatcgcggcactgggctaaagttctccggcaaatcggaatcgtagtctgtgcacggcgacaagtgccattaaaatgggtttactttttaatgtataaaaatatagcatttttaataatagtatctatgggctgcataactgaaagtgatgtaattcagttttcaagttcaattcaattgcatgcttgctttacatatgtaaaataaagtggtatttcaaatgtacataacttgcttaagatagttaatagatcatcgttctttatagcagggtataattcataaattctggttgaaaatatatgtacatttggtaaaggtgttgagtgctatttaaatttataaatttgtcctgagatgccaatgatttgcattgaaacgaaaacccatgtttaaatttgcatccccaagaagtaagtcaatgattttgtatatatttaaatacattactttgaaatgcattaaatgaaatcagatgggctgtaatttaatttaattctcttctctttcttatctgtcttatgcctctgctattttttcgcggcaaatcacgtatacgcctgttggccgccactcacctgttgctgggccaagtgaaaatgatgggtcgtccgtatcgtatgtgacattctggtatcggaacacgcactccgcatacaaatgctttaaaaatatgcgcagattatcctgcgtttgggcctgcgatgccacatccacattttgcgactccgaatctgaagaggttgtcgccattgtgggttattcaacgtgactaactcttgtcaacggctaatgcactaaaaaaaaatataataatataaatataattcaaagaattacgggataaataggataatcaactgcaataatttatcagaggcaatttgaaaggttttaaacaagtgttgcttacccatagaaacttgtatgagctagtttttaaaatttattctgatttaaatatattttcttatatttaacattagttctcactgtatttcgccatagcgaagcgaacttgagtcccttgtggccgtccattcgtgtgtgcatttctaatttggttaggcttcaaagagttgcctgagttgggttgatatttgttgtggggtcctgtctgcggggaaatggtgccaaaggaaatggaatatccacacggggcacacacacacactcaaaatatcgaagcacctgagtgtcgtgtgagccgagtcacctactcgtctctcatatgttgtaaatcagtttattgtctaattaatggcggtgcttaactgtgtcgctatttctgctaccgtggttgggcgaacttaattgcatttcgtcgcacagagagacaaagcaaatgccacgggttaaaaactcaaatgaaatgcactttgatcgtgggggcacacaaacacacaaacacataaacacactcacacacccgcaccgaacacgtggcccaaaaggcgggatgagctgcaaagttcttgcctaacttggttatatttttaatcaaaactcatttcacttgattgagtttcgacagaagcctgcaccaggcactggaaaatctagcatgcacgatacatacaaagtaagatgattttcccgctcccaagctaaactttaatttgcggcattaatttattacaccgaactgggacagtttcccatgatggatatgacgcctggctaaacattcttgcatgttatatatatttttgcaagtgtctcggccaggcaattagccgcaggtaagcggagc

SEQ ID NO: 1583 - DNA, 1686 bp, DROSOPHILA
atggcgacaacctcttcagattcggagtcgcaaaatgtggatgtggcatcgcaggcccaaacgcaggataatctgcgcatatttttaaagcatttgtatgcggagtgcgtgttccgataccagaatgtcacatacgatacggacgacccatcattttcacttggcccagcaacagactacgattccgatttgccggagaactttagcccagtgccgcgatatctggagaatgccgcgatgaacgagggcgttattgacatgcgaaacgtggacgaggagctggcggagaaggaggagctgatggccaccgtcgtcagtgccacgatggccacaaatcagaaggagaaccgactcttttgccccctgaactttgacggatatctctgctggccaaggactccggccggcactgtgctgagtcaatattgtcccgatttcgtcgaaggattcaacagaaaatttctggcccacaagacctgcctggagaacggctcctggtaccgtcatccggttagcaatcagacctggtccaattacaccaactgcgtggactatgaggacctggagtttcgccagttcatcaacgagctgtacgtgaagggttatgccctctccctgctggccctgctcatatcgattattattttcttgggcttcaaatccctgcgctgcacccgcatccgcatccatgtacatctgttcgcctcgctggcctgcacctgtgtggcctggatattatggtatcgtctggtggtggagcgttccgaaaccatagccgaaaatccggtaagatgcactgagaaaagtaactatgaaaataacatagccctacaagtagctaggcaattatacaaaaccataaacataactaactttcagctgtggtgcattgggctgcatctggtggtgcactactttatgttggtcaactatttctggatgttttgcgagggcctgcacctgcacctggtgctcgttgtggtgagttatccttactcgtctggcaatctggcaattgcctgcacaagtctgcattctttatgggcgacttctgtgcatggcagatgtgatttcctgcagccgctgacatggcaatggttcacccccagcaatttgtctgagagcaaatcgcaacgttggccaactgctttacgtctgcgtcaagttgagatgtcaggaatgtccgttcagatcctgacgccccttcttctttccattcgccaggtctttgtcaaggacacgattgtgatgcgctggtttattgtcatcagctggttttcacccatacccatagccatcgtctacgtttttctgatcaacgtactgcgagtgatcgtgcgaaagttacatccccagtccgcccagccggcaccgttggccatccggaaggcggttcgggccaccattattctggtaccgctgttcggactgcaacacttcctgctgccctaccgtccggatgccggcacccagctggaccacttctatcagatgctatcggtggtgttggtcagcctgcagggctttgtggtctccttcctgttctgcttcgccaatcacgatgtcacctttgccattcgcacgctgctgaacaagttgctgcccagtttagtgaccccgccgccggccgggagtaatactggacagatggccacgaccacgcccagccgagagttgggcgtttaa

SEQ ID NO: 1584 - protein, 561 aa, DROSOPHILA
MATTSSDSESQNVDVASQAQTQDNLRIFLKHLYAECVFRYQNVTYDTDDPSFSLGPATDYDSDLPENFSPVPRYLENAAMNEGVIDMRNVDEELAEKEELMATVVSATMATNQKENRLFCPLNFDGYLCWPRTPAGTVLSQYCPDFVEGFNRKFLAHKTCLENGSWYRHPVSNQTWSNYTNCVDYEDLEFRQFINELYVKGYALSLLALLISIIIFLGFKSLRCTRIRIHVHLFASLACTCVAWILWYRLVVERSETIAENPVRCTEKSNYENNIALQVARQLYKTINITNFQLWCIGLHLVVHYFMLVNYFWMFCEGLHLHLVLVVVSYPYSSGNLAIACTSLHSLWATSVHGRCDFLQPLTWQWFTPSNLSESKSQRWPTALRLRQVEMSGMSVQILTPLLLSIRQVFVKDTIVMRWFIVISWFSPIPIAIVYVFLINVLRVIVRKLHPQSAQPAPLAIRKAVRATIILVPLFGLQHFLLPYRPDAGTQLDHFYQMLSVVLVSLQGFVVSFLFCFANHDVTFAIRTLLNKLLPSLVTPPPAGSNTGQMATTTPSRELGV

SEQ ID NO: 1585 - DNA, 3975 bp, DROSOPHILA
ctccgtcgacgtaaacagtgttattaacactaacgaatgcccaaaacaataaaacgctccactttaaatacaaattttgaatgtgcccagctgctgttatgccgaaaagccactggccgacgcgttaagttattttgccaaccgatagcgacagtccgataggcaggcagcacgtgttgcttaaatcaattatttatttattatttaacgcgtaaagtgttcgttttctaatagatttgggctttgttatgaagaccttacaattctcatttaatactacacattactttgttaagatttttgcaattgcaaattcttgatttattttcacatttttcccagacattgacttctcgtttaaaaactaatccatcttaaacatatacttaacacgcttttctatagttttaaaagtttattactccacctatttaatttagtaatctagaacattctgcagtttgtgatttcaccacaacttgcaatgtcacataatttatcctaaaaagcttttgagttttgaagattaatttttccatattcttatagctctatattaaacaacttaaaagagatttaagacaaatttatttaaatttccttagatttatgaaattgtaatatatgttggtagacaacaagattatgcaaggatattaatcttagtgatagttaggagtaatgtactgtctcaaaaaaaaatatactttttaaggattgtttctaattctttacgtataaaatagatatattgcaatgatatattttatgcttttctgaaaaaattatcattaaatcaggacaaaatcagatgagttaacatgaaacaatcactgtgatttacattttaaatttaaatttacatttgacataaatgcgaagtaaaaagctttcttattttttaagttatcttaaaaagattttttaagtatatctggtagatactgtgcctttcatatttacttggtcacactgtccaccaccagttgagtttggagcgcacatgttttgattgtttttaatttgcaaatccacctccgatattctgcagagctggaaaaatgggcggccaccacaagaagaacctgcgtgcggagaaggccaaagtgaagctgaagggcgccaagctgcccaagggcctgaacgtgaccaagacggacttcaaggtgcgcaaaattgagattcgggagcagctgaaggagtcctcctactcggaaacgggccagcgacagttcaatctcaaggagacactgtcccgtctgaagcatcatagtgtcaagttccgcactgatgcacagcgcaatgtgcgcgactccctgaagtccggcaatgcggaccatttaattggtcatctgaacgagctgttccaaggaattgcggccggagctttggacatggaggggtcggcgcgaaaggaatcattcaagacccttgatgttctgctagaggcactgcagccacaagcagtggcgcccttcttccatgtcatagccacctatttgcgttgcgccatgactcacgtgctgcccgccatccaggaggactcgctgctcatgctcgacgtcctactgttgcgcgtaccaccggctttcttggccgagcggagtgccagcaccataattggcaacttcatcgacatgatctcccgcgcccgccacgacaacgagcgttcgaatcgaacgttgacattgaacctgagtcagggcaagcagacgactgtgaagtggcgcaccaaggtgcttatccgtctgcagcagatcctcagcacgctagtcacctcgaagacgccaaagtcagccgctgcccgtgtggttcacttcgaggagatgcgtccgcaatattacaatgtgctgtgtcccgtgcgccatgacaatcgcaatctgcatgccatcctcaatgaatccaagctaacggcggaaggcactcaactgcatacgtatgtggagcaactgttaccactactccaggacaactggatggaggtgcggccgcagcagcaacaacctctgctcaaccaagatgcggcggccagtctgcatgtggtgattggtctaatgagtctgctctggaatctaattgagcagcatgaggcggagcacaataccacggagctaagcgattggctgaggaaaaactatgcccagaagttcctgctcaactttttggacaaggacggcagtcgttttccctatcaacagataccgctggcaaccaagaattcatccaaggacaagggagccgtagatggcggagaactttgtatgccacaaaacctgggtattgtccagctggcctgtaagttctttccgactcccgtcgagagacagactcaaatgtttgcgcatttaattgagtacatgcacgagactttgaaacgccttaattcgctttcgccggagcagcagctctcactggtggcttcactgcgtgcgctgctcttcgaaaacgccacatcgctgatgaaaatcgtgacggagccgttgaccagcctgctgagcgcatccattgatgcatatgtgagccaacgatttaccacacgcgaaggcgttgccactcgagtgctgaaccttctctgcgagattgtggagcgttccgatttgtacacgcactttggcggcgaacagagattcactccgtttctcagctatctgccgcaactgctgctgaagccaacagtgggtgagagtacattgcgagccatggccacgctctgccgccaactgaatggagtcttcatggccgctctagtccgttctgctcctgagatagtcagtcacttggataagctgcagatcacgggcgatatcgaaggccaagagaagttcgaaaaccaaaagcgtgttcttaacttgttctactatgccagagaattggataaagagggaaaactggagcgttcagttaagcagctggaggagcgggtggagagcaaaggaattgccgattacctaaaggctgtactcggctacaactagtgattgcggacgggaatccgcaatatacacagtcagataattttgtttagcttctaagtttaatgtatacattatattccttctgcttaagacgaactctgttcaggttttctgttttttgggtggcttgggtttgaaacgatccagaacggagcgtggtgccttggtcttggccttgcccttggcacccacctcgtcggctgtgtgctgcttgataacgttcttcttggcctcgcgcacctcggcaataaactcctgtgtggcaaagacttggttatagatggggggctaaaaagtaaaatggtgctagcactcacctttcgcttggcatccttgacgatctgtttgttgcgcgccgccttggcagtgccgccacgtcccttcatcttgtggcgcgatttcatgttgatgcgcggcgccttcaaatggaacagcttcctcttggcatcgatcttctcctgcagcgtgggcgcatccacgccagtgatctcttgcggatccagggtgatcagttcgggcggaatcttctccagcagagcgtgaacctcgtgctcgcgtcgttgcttcgaagtctcatacggattgtcttccatagcatcgaagttgggctctccagagccgggcaccaatagcgattggaagcccttggccgtcgacacaccaagcacatcttcgtacgggcagaaacgcagcccgtggacaaaggcatcgcagcgttggcggatataaggcaaccgggtaccgtcacccgaacctccgccggagagcagatccgagtaggtctccagataggtgccctgcgatagcgccagcatgccacgttgcgacacatccagttcgttggcgggcagacgcagctggaaatgagtcagcggcttgtcgtgcaccagcatccgaatgtcccaaactttcacagccctatccaagccagcggtaaccaaatactggcccttgggttccaccgccagagcagacatggctgtcgaatggcacaggagct

SEQ ID NO: 1586 - DNA, 1975 bp, DROSOPHILA
cacatgttttgattgtttttaatttgcaaatccacctccgatattctgcagagctggaaaaatgggcggccaccacaagaagaacctgcgtgcggagaaggccaaagtgaagctgaagggcgccaagctgcccaagggcctgaacgtgaccaagacggacttcaaggtgcgcaaaattgagattcgggagcagctgaaggagtcctcctactcggaaacgggccagcgacagttcaatctcaaggagacactgtcccgtctgaagcatcatagtgtcaagttccgcactgatgcacagcgcaatgtgcgcgactccctgaagtccggcaatgcggaccatttaattggtcatctgaacgagctgttccaaggaattgcggccggagctttggacatggaggggtcggcgcgaaaggaatcattcaagacccttgatgttctgctagaggcactgcagccacaagcagtggcgcccttcttccatgtcatagccacctatttgcgttgcgccatgactcacgtgctgcccgccatccaggaggactcgctgctcatgctcgacgtcctactgttgcgcgtaccaccggctttcttggccgagcggagtgccagcaccataattggcaacttcatcgacatgatctcccgcgcccgccacgacaacgagcgttcgaatcgaacgttgacattgaacctgagtcagggcaagcagacgactgtgaagtggcgcaccaaggtgcttatccgtctgcagcagatcctcagcacgctagtcacctcgaagacgccaaagtcagccgctgcccgtgtggttcacttcgaggagatgcgtccgcaatattacaatgtgctgtgtcccgtgcgccatgacaatcgcaatctgcatgccatcctcaatgaatccaagctaacggcggaaggcactcaactgcatacgtatgtggagcaactgttaccactactccaggacaactggatggaggtgcggccgcagcagcaacaacctctgctcaaccaagatgcggcggccagtctgcatgtggtgattggtctaatgagtctgctctggaatctaattgagcagcatgaggcggagcacaataccacggagctaagcgattggctgaggaaaaactatgcccagaagttcctgctcaactttttggacaaggacggcagtcgttttccctatcaacagataccgctggcaaccaagaattcatccaaggacaagggagccgtagatggcggagaactttgtatgccacaaaacctgggtattgtccagctggcctgtaagttctttccgactcccgtcgagagacagactcaaatgtttgcgcatttaattgagtacatgcacgagactttgaaacgccttaattcgctttcgccggagcagcagctctcactggtggcttcactgcgtgcgctgctcttcgaaaacgccacatcgctgatgaaaatcgtgacggagccgttgaccagcctgctgagcgcatccattgatgcatatgtgagccaacgatttaccacacgcgaaggcgttgccactcgagtgctgaaccttctctgcgagattgtggagcgttccgatttgtacacgcactttggcggcgaacagagattcactccgtttctcagctatctgccgcaactgctgctgaagccaacagtgggtgagagtacattgcgagccatggccacgctctgccgccaactgaatggagtcttcatggccgctctagtccgttctgctcctgagatagtcagtcacttggataagctgcagatcacgggcgatatcgaaggccaagagaagttcgaaaaccaaaagcgtgttcttaacttgttctactatgccagagaattggataaagagggaaaactggagcgttcagttaagcagctggaggagcgggtggagagcaaaggaattgccgattacctaaaggctgtactcggctacaactag

SEQ ID NO: 1587 - protein, 637 aa, DROSOPHILA
MGGHHKKNLRAEKAKVKLKGAKLPKGLNVTKTDFKVRKIEIREQLKESSYSETGQRQFNLKETLSRLKHHSVKFRTDAQRNVRDSLKSGNADHLIGHLNELFQGIAAGALDMEGSARKESFKTLDVLLEALQPQAVAPFFHVIATYLRCAMTHVLPAIQEDSLLMLDVLLLRVPPAFLAERSASTIIGNFIDMISRARHDNERSNRTLTLNLSQGKQTTVKWRTKVLIRLQQILSTLVTSKTPKSAAARVVHFEEMRPQYYNVLCPVRHDNRNLHAILNESKLTAEGTQLHTYVEQLLPLLQDNWMEVRPQQQQPLLNQDAAASLHVVIGLMSLLWNLIEQHEAEHNTTELSDWLRKNYAQKFLLNFLDKDGSRFPYQQIPLATKNSSKDKGAVDGGELCMPQNLGIVQLACKFFPTPVERQTQMFAHLIEYMHETLKRLNSLSPEQQLSLVASLRALLFENATSLMKIVTEPLTSLLSASIDAYVSQRFTTREGVATRVLNLLCEIVERSDLYTHFGGEQRFTPFLSYLPQLLLKPTVGESTLRAMATLCRQLNGVFMAALVRSAPEIVSHLDKLQITGDIEGQEKFENQKRVLNLFYYARELDKEGKLERSVKQLEERVESKGIADYLKAVLGYN

SEQ ID NO: 1588 - DNA, 2503 bp, DROSOPHILA
taagaccgctggccgaaggatctttcacggaaagattcgggacaatcggtcacaacagaaatgcatttacatgaccgtaattggctaaaagtttaacaatctacagcgagtacaaaggggacacaaaacgagaggagctgctggcttatgtggagagtggagtggtgtggtgtggacctggctcctggaatccggtattgctggggagtgttattaagatcctttcgccgccattatggcgtcgtagtgcaggccagtgtagaagatgatccacgtgaccaggaatccggcaaacgacgtcatgaacccctccttgatcagctcccatacccctccgtaggcgtcctcgtccacgttctgaaagtttatggcgtacaggtagacgatcccgcagctgatgccggcgaatctgggggcgcattggattgattaagtgaagtgactccggctatttataggttaaaggtagctctactcacagtacgaggcccagaaagcccttcagcggaacaatgccccagatgacgcccagaaagatgccgaatacctggcgtgaccagtagataacgtccaggaactcttcctgcgggagatgcgaaggattggattagcaatctagattcagcgccgggaactttgctcaccttgtcctcccactccgattttgtgatggcgcgcgcgcaaatttcccgtagtgtggagcttttggccgagtggccgttgcgctcgatggtatttgttttcgtcgccatagcttaattaagatctgacccaaatgagtttaaatttttttgttaattaattttttcactatcaaatgactaacgcgttttggcgaaatgaaaaccccaaatgcctgcgctgtcgataacaaaataccaaaaaccataccactcaagtgttgttaggcttctttacctaatggtgacaacactgcagtcagctgtttggttatgtgaactacgttttttcacaactactttttagttttcgataaataatgctgaaaataacaaagatctgcttggccagctccgccacaagtacaggtaagcaaatcccaacttgttgtaagccttttgtaattcatccgcactttgtactttcgcagctcagcgaagcattgctcttactgccccccgtgccattgatcagaagtggcgtgcagccaagggattgccggaaaacccaaatgcctttggcccactcaccaacctgcccgactacacgtacttagatggtaggcccacgccgctaggtgtaagtatacccctgaatagcctcaagtatcggcctaatcatttacatttccatttctaggccaaccagaagaggcgcctgattaagcagcaggagatcgccaccaggatcgtggagctaagtggggagctagagttcgccaagcagcgacatgaacgccttaaggcaaatgccgagtccgagaaacagcgcctcatccgcagcaaactgaagcccaagggccacttcctgctcaagaaatagcgtcctagtcttagccagtataagctatcataagtcacgtagtgaatggagacgaaattatacgatggtcttgtgatgtgaacacatgtttgcccaaaacacgtttcaaaaacgttcccaaatagcaagcgtggcgcagtcgacggttcattagacgtaccgctaatgagcaattaattgcagcggggcatcttaattgagtgttaaatcgccagtgacgcactcgccggagtagcgtgtcctggcatttaggcgaaatgaaagcgccgcccgcttttccaagcgctcgaagtgcagcccttgaggagggagtgggctgccattcacacattagctgctaataggaggcttacgctcgcgcattcgagcatctcttcaaactattattgtcaacaaggaagtcgccggttcccttagtgtttattggcaaaggggggttgcccaaggccagttacaagcggaatctcctcttccggcctgcacaatttgctccagttcgcggtggagcagccaggagagattaacagatcgatcgtgcggccgaagccaaccagccatgacaaatgtgatccctactatttgcctttctcggtcaatatgtatcatcgtttgccagccaaatatttgcacaccttgccagtccgcctcccttgtttctcctccaattgtttggcttttcggttaggatatcaagaattttgcacggccggcaatgtttgttttcgatttggttgatcggttgccaataaaccgagcaccttcatcacaaaacccacagaaacgtgctccacttaggcatgttttttgcagagcccgttgaaccgatttaatagatgaccaaaccgatttatcaatacatgggtataatcattctggacttatattaggactgaaaacaaccgatttggttggttatctcacacttcccgaaaaacatcaacaaatcggaagatccactgatcccctaggtggcagacataaaatttccatagccctttgt

SEQ ID NO: 1589 - DNA, 381 bp, DROSOPHILA
atgctgaaaataacaaagatctgcttggccagctccgccacaagtacagctcagcgaagcattgctcttactgccccccgtgccattgatcagaagtggcgtgcagccaagggattgccggaaaacccaaatgcctttggcccactcaccaacctgcccgactacacgtacttagatggtaggcccacgccgctaggtgccaaccagaagaggcgcctgattaagcagcaggagatcgccaccaggatcgtggagctaagtggggagctagagttcgccaagcagcgacatgaacgccttaaggcaaatgccgagtccgagaaacagcgcctcatccgcagcaaactgaagcccaagggccacttcctgctcaagaaatag

SEQ ID NO: 1590 - protein, 126 aa, DROSOPHILA
MLKITKICLASSATSTAQRSIALTAPRAIDQKWRAAKGLPENPNAFGPLTNLPDYTYLDGRPTPLGANQKRRLIKQQEIATRIVELSGELEFAKQRHERLKANAESEKQRLIRSKLKPKGHFLLKK

SEQ ID NO: 1591 - DNA, 6007 bp, DROSOPHILA
taatgtgaaacgggaaattggcgaaaaatgtacatcaataaattacaacaaaaaattaccgaattcaacgatgtatgatgatattccacttttgcacaagtatttgtattcccatcgaagaaatactgattgtttattaacaaaagaacaaaataaacatgacgtctaaatgtgatataatgcaacgggatttcaccccataacttggccaaaaaaggtggcacagctaaaataaagactgttttgtactgccattaggtatagctaaccatccctatcactatttttatgattccaaaaaaaaaattttgtaacaaattttcgcatttttgataaggggtacccatcatcaaaatttgcgaaaaatggcaaaaaattagaatttccaactttgaatccaggtcgatagggaattttttacgaattcaatgaggtgtgacattccacatttggacaattattttaattgctttcgaagaaattgtgatttttttttaacaaaaaactgcaaaaaggaaaatctgatattttccttataacttggcgaagaaggtggtagagccaaaaagtaaccgttgtttactgttcgtcatttcgaaagaaatgtgggaggattactaaaatcctttaaatagtatatcgtcaaatagtttggccattcctttgtcctagacaatcatcccctgtgttttacgtgcgccttattatctagccactcctccaggaacttggcaatcaaatcttttcccaattgcacgcccaatttattcgggcttactttcatgtcctcggagaggccatacaagtgggcggggccggctgaccgacatataatcatggggccttgccctcatcgctatcattctgcgactttaagcgtctaacaacattagatactgtttattattgcgcaagtttcagtttggtattatacctatggtactcaggaactcttaaaatcttaaatttaacagtcccagtgcaaaacatcatatgaaagttgactgtggccatttattcaagttattctagagggctcttaaaaaaaaaaaaaaagttattgcaatttcatgcacttaataataaataagatgtattctgtggcaatgaagggtgtcaatggtacggcgaaagttcttacagagaatatgtatgactaaactacgtgtgccaaaagtttcgagagctaaggcggtggcggattgaccttggcgtatttagagaacagctgcgtcatcttgccgagcagtgtatcctgactggccgtggacaagttaccgacggcgtaggcccaattcttcaccacgagatccggactgcaagtggacaaattgatctcaggcaggaactcctgcgggctaacttcctgagtgttcttcgcaagcgattcgtttaactggttgagctgctgtggcgtgcggactgtcagctgggcgttcggcttcacctgcttatagatttccgacatgtggtgcaagtacttgtggcccattgtacattgattgcttggatcggcgatcttcagattgcgcatctcgcgcagagcgtactgcagaccaaggcggcattcggtcactgcaaaatatgtacttttaatcaaatgtctaaattgacatatttgcaaatgattacctgtggcatgcaactcctttgatacgcgaacccaggcggctcgcttgtccagagtgctcgcccgctcgaagctgtttggttggctacgcaatttcttacacaactcaaacgcctcaatgggggatagattgttacaggtgacacttctcgctggggtcggccgcttttgggcggtggagatattcttgtctttatgagacttgacgttggcgtttgacgctggcttgctttcgcttgtctttttggacacggaaacgccatcaggtacaggaataggttgggcatcgggtgccaaagctagagccggagctggagcaatttgagtgagagtttcagtgcttctcacgctattcaacttgccggtaagcaagcgcttggcctcctccgtctcccatggcttgggttctttggaaaagcccgttaaaagtttgctcggtgtaaatttggtcttatcgatatgatcggaggacgttagagcctcgtgcattttgcagcgcttcacctcctctgacatcctgttgtgcactatatagtagtagggctcgagcggatggtagcgcacattgaccagaaacctgagttgctccagtgcctgccaccaattctgcggccagggattatcgatgccgcgctctaaatcatccaggtatgtgcggaaggcgaacttaaacattgaccaaatatcccgatgattgactgcaaaagaacagaaaattactaataaatgattggcttataacatttattaaacatacgatttgggaatttaaggcgggcctcccgccacacctcctgcttctcctgattcgtcaactggggcggagcttgagcatcttcgccaggtcgcggcctgcgtaaatcgcagtagaggtactcgtacttcgcgaagaagcgtattacttccggcaacacgttcttgtgattcaaccactggtattttagcgctatctcgtcaaatttgccaaacaagcgattcgatttttcccacactttttcgctgtacttaaacggacgcatcagttccgacatcggcgcaatttttggaaacacactcatgttggccgccaagaatttccagcatgcgcgcaaagcttcctctgcagaacaaaagaacgtatgagccaatgtttctaatatatatatagttactcctacctggcatgtgaaacttcttggcgataaaatgccagaactcaacacacttggccgccaactgtggatcttccttgtgcagctgcggcacagccatcacctcgcggatcaacgtcgtcgtcctaatcatattgagattgaagcgagtaccctgatttccgcaccaaacttgcagttcattcccagtggtatcactctcgtgcagacacacggttatgttgccaagcggcaagttctccggctgactgcctagggttgcggatgcggctgcagttgcttttatatctgactgcgatgctgttgttgccttggctactgtcggcaatttggctggtctgaccactggtgctgatattgctgctcccacagctttagcctggcttgctaatgtgccctgtattgtggcatatgagtcagatgcagcttgtgttgcagatgtaggaaataatggtgtttttcgtatgactcgagttgtttgtccagtggcgattggtggcgtagttacaggcagctcagttgctggttctgttgcaggtttggccatcctggttgctgctgtaggtagtactgctaccggtacgattggttgatattttttggggtttactaatgttgttgctggcaatttgggctttggtggtattatttttgctctcgctggttccgcagttgctacaataggagcagctgcaggcgaagatgtggttaatagtgatcttattggcttactgaacggagcgctattgcttttgccatcccaagcgcttttcagtcccggctggtgtattcgtaccattggagccgcagtgggtgttggcagattgcttttagctgtaatattcgatgttgttattggtacaaaatttggcagtgtttgttgcggagctggtgaacgtatttgcgatggattttgtggcctaagcagttcacccagtgtcgacattggccctccggataccctgtcttgagtttgagctggattggttggattcgttgttcgaattacagtgcgggggactacaggtgccatttgcggtctactggccatttgaggcttcgtatggagcttaacctgtaagccaggaccctgcgttatctgtggacgcacttcaggcggctttgcgtttgggcccgccatctgattggtggtggcgatgggggacacgcccgttcccatagtcgccgccggcttgggcaaaattcgtacgttgggcacaaactttaggggtatcatatatcccgagcccacactgatggcggacgtgattttgggaatcacaaacttgggaagagcttgatcgggcgatacactcgaactgacgctgttcgttgcggcggcggcggtggatgtgttgttaatgactgggccagaggacctcctaacattggtgaaggtggggccaatgcttgtggcagtgcttgcactgttggtcatgctcgtgctgctgccttttgaggtggacggatagacaatagccaatggcatacgtaccggcaccggtgttttggccggaggctcccccgccactggtatggcgccgttggctgtccgctttagtgcgggacgggccgtggaacgagaggtaactggcgttaaggccagacccatggagccctcaaagaaccacttgtcctgcagctgatagccggatgagcgcacggcctgcaattcgtggtaaaaggcgcgcagcaccagccaggtgacctcgcagtgctcgtgactacacatcacttccatgccgaccttctgccagaattcgtcgtagcgcggcggtttcaccttgttgtgcagggagtcctccgtcagctgaactagttctggcatgttgcgcatcgtggtgatcagcgccatcacagtgtggaaattctcaatgggctcgtgccaaccgttttgcaggtacttggaagacttgcatacggtgccgcgcatgcgctgtacgtgcggttccatgaagtccatcaaccgacacagctccgaagtgccgatatgacgtgggcgatggattaactcccattcgtagcgagtctgcagctttagccagcacttcatcagcttggtggctttgtcatggacttcgtttgaaatggcactccagattagaaagcgatgtcgtgtgttctgatagcccgtgcacgtgctatcgtacagaaggggataggcactgactgcctctatgaggcgacgctgtaacctgttgcaacggtagttataggtggggtcctcctcgacatccaaatctatgatgtccattggcggattctctatgacctccacatcgggccgggtttcgctctcatccacatgctctttttcaagaatctctgtcggaatcttgtcgacaatcagtgggaatctggccacatgggtatacatgaagcgcatctcttcctcgtattccatgcaaggacgccaacgcagggccgcccgatctttttggatggcactgcgatgaaagtttcttagacgacgaacatggcgctgatatttatatcgcagcgccgaccaggatctcttgcagttggtcgcattcgttgccaggcggctggcgatttttttccattgtttctccctttgagcgacgtcgcggaatttcggatgccgggcgtcatacaatagcggctggcggcgtaccaaagcgatgagcagcctctctgccctataggtttgcagaatgccgccatcccgagatcccggataagtgcatctgctgaacggatttggggccttatcgtcatccacgccattcgtcttctgaccaattgtgtcagctttgaggaaaaaaaaaaacggaagttagttgaacggctgaccaggtgaccaactgtcggacttacaaacaattatctggcaatcattttcaatggcaacaggctcctcctccatgtcctagacacctgatagctccaatcttgacctacgcgcgcctttcccccacacaagccgtcgagaattctcggaacggagaaaccggtgggcaatccgatggaaccactgcttcactcttcactcttttgtagcataaaatcactcggaaatagtttgggaacaacttgcaactacaggattattaagtgcaagcgtatctacgtaaatatatctacgtaaataaggtttcttgcgacgccagatagtcggcggttgcaaacgcaaaatggttaaagagcgttatcgaccacggataccgttatcgaaacattcgattaatatttgagtgtgaaatag

SEQ ID NO: 1592 - DNA, 3401 bp, DROSOPHILA
aggaccccacctataactaccgttgcaacaggttacagcgtcgcctcatagaggcagtcagtgcctatccccttctgtacgatagcacgtgcacgggctatcagaacacacgacatcgctttctaatctggagtgccatttcaaacgaagtccatgacaaagccaccaagctgatgaagtgctggctaaagctgcagactcgctacgaatgggagttaatccatcgcccacgtcatatcggcacttcggagctgtgtcggttgatggacttcatggaaccgcacgtacagcgcatgcgcggcaccgtatgcaagtcttccaagtacctgcaaaacggttggcacgagcccattgagaatttccacactgtgatggcgctgatcaccacgatgcgcaacatgccagaactagttcagctgacggaggactccctgcacaacacatccaccgccgccgccgcaacgaacagcgtcagttcgagtgtatcgcccgatcaagctcttcccaagtttgtgattcccaaaatcacgtccgccatcagtgtgggctcgggatatatgatacccctaaagtttgtgcccaacgtacgaattttgcccaagccggcggcgactatgggaacgggcgtgtcccccatcgccaccaccaatcagatggcgggcccaaacgcaaagccgcctgaagtgcgtccacagataacgcagggtcctggcttacaggttaagctccatacgaagcctcaaatggccagtagaccgcaaatggcacctgtagtcccccgcactgtaattcgaacaacgaatccaaccaatccagctcaaactcaagacagggtatccggagggccaatgtcgacactgggtgaactgcttaggccacaaaatccatcgcaaatacgttcaccagctccgcaacaaacactgccaaattttgtaccaataacaacatcgaatattacagctaaaagcaatctgccaacacccactgcggctccaatggtacgaatacaccagccgggactgaaaagcgcttgggatggcaaaagcaatagcgctccgttcagtaagccaataagatcactattaaccacatcttcgcctgcagctgctcctattgtagcaactgcggaaccagcgagagcaaaaataataccaccaaagcccaaattgccagcaacaacattagtaaaccccaaaaaatatcaaccaatcgtaccggtagcagtactacctacagcagcaaccaggatggccaaacctgcaacagaaccagcaactgagctgcctgtaactacgccaccaatcgccactggacaaacaactcgagtcatacgaaaaacaccattatttcctacatctgcaacacaagctgcatctgactcatatgccacaatacagggcacattagcaagccaggctaaagctgtgggagcagcaatatcagcaccagtggtcagaccagccaaattgccgacagtagccaaggcaacaacagcatcgcagtcagatataaaagcaactgcagccgcatccgcaaccctaggcagtcagccggagaacttgccgcttggcaacataaccgtgtgtctgcacgagagtgataccactgggaatgaactgcaagtttggtgcggaaatcagggtactcgcttcaatctcaatatgattaggacgacgacgttgatccgcgaggtgatggctgtgccgcagctgcacaaggaagatccacagttggcggccaagtgtgttgagttctggcattttatcgccaagaagtttcacatgccagaggaagctttgcgcgcatgctggaaattcttggcggccaacatgagtgtgtttccaaaaattgcgccgatgtcggaactgatgcgtccgtttaagtacagcgaaaaagtgtgggaaaaatcgaatcgcttgtttggcaaatttgacgagatagcgctaaaataccagtggttgaatcacaagaacgtgttgccggaagtaatacgcttcttcgcgaagtacgagtacctctactgcgatttacgcaggccgcgacctggcgaagatgctcaagctccgccccagttgacgaatcaggagaagcaggaggtgtggcgggaggcccgccttaaattcccaaatctcaatcatcgggatatttggtcaatgtttaagttcgccttccgcacatacctggatgatttagagcgcggcatcgataatccctggccgcagaattggtggcaggcactggagcaactcaggtttctggtcaatgtgcgctaccatccgctcgagccctactactatatagtgcacaacaggatgtcagaggaggtgaagcgctgcaaaatgcacgaggctctaacgtcctccgatcatatcgataagaccaaatttacaccgagcaaacttttaacgggcttttccaaagaacccaagccatgggagacggaggaggccaagcgcttgcttaccggcaagttgaatagcgtgagaagcactgaaactctcactcaaattgctccagctccggctctagctttggcacccgatgcccaacctattcctgtacctgatggcgtttccgtgtccaaaaagacaagcgaaagcaagccagcgtcaaacgccaacgtcaagtctcataaagacaagaatatctccaccgcccaaaagcggccgaccccagcgagaagtgtcacctgtaacaatctatcccccattgaggcgtttgagttgtgtaagaaattgcgtagccaaccaaacagcttcgagcgggcgagcactctggacaagcgagccgcctgggttcgcgtatcaaaggagttgcatgccacagtgaccgaatgccgccttggtctgcagtacgctctgcgcgagatgcgcaatctgaagatcgccgatccaagcaatcaatgtacaatgggccacaagtacttgcaccacatgtcggaaatctataagcaggtgaagccgaacgcccagctgacagtccgcacgccacagcagctcaaccagttaaacgaatcgcttgcgaagaacactcaggaagttagcccgcaggagttcctgcctgagatcaatttgtccacttgcagtccggatctcgtggtgaagaattgggcctacgccgtcggtaacttgtccacggccagtcaggatacactgctcggcaagatgacgcagctgttctctaaatacgccaaggtcaatccgccaccgccttagctctcgaaacttttggcacacgtagtttagtcatacatattctctgtaagaactttcgccgtaccattgacacccttcattgccacagaatacatcttatttattattaagtgcatgaaattgcaataactttttttttttttttaagagccctctagaataacttgaataaatggccacagtcaa

SEQ ID NO: 1593 - protein, 1013 aa, DROSOPHILA
MKCWLKLQTRYEWELIHRPRHIGTSELCRLMDFMEPHVQRMRGTVCKSSKYLQNGWHEPIENFHTVMALITTMRNMPELVQLTEDSLHNTSTAAAATNSVSSSVSPDQALPKFVIPKITSAISVGSGYMIPLKFVPNVRILPKPAATMGTGVSPIATTNQMAGPNAKPPEVRPQITQGPGLQVKLHTKPQMASRPQMAPVVPRTVIRTTNPTNPAQTQDRVSGGPMSTLGELLRPQNPSQIRSPAPQQTLPNFVPITTSNITAKSNLPTPTAAPMVRIHQPGLKSAWDGKSNSAPFSKPIRSLLTTSSPAAAPIVATAEPARAKIIPPKPKLPATTLVNPKKYQPIVPVAVLPTAATRMAKPATEPATELPVTTPPIATGQTTRVIRKTPLFPTSATQAASDSYATIQGTLASQAKAVGAAISAPVVRPAKLPTVAKATTASQSDIKATAAASATLGSQPENLPLGNITVCLHESDTTGNELQVWCGNQGTRFNLNMIRTTTLIREVMAVPQLHKEDPQLAAKCVEFWHFIAKKFHMPEEALRACWKFLAANMSVFPKIAPMSELMRPFKYSEKVWEKSNRLFGKFDEIALKYQWLNHKNVLPEVIRFFAKYEYLYCDLRRPRPGEDAQAPPQLTNQEKQEVWREARLKFPNLNHRDIWSMFKFAFRTYLDDLERGIDNPWPQNWWQALEQLRFLVNVRYHPLEPYYYIVHNRMSEEVKRCKMHEALTSSDHIDKTKFTPSKLLTGFSKEPKPWETEEAKRLLTGKLNSVRSTETLTQIAPAPALALAPDAQPIPVPDGVSVSKKTSESKPASNANVKSHKDKNISTAQKRPTPARSVTCNNLSPIEAFELCKKLRSQPNSFERASTLDKRAAWVRVSKELHATVTECRLGLQYALREMRNLKIADPSNQCTMGHKYLHHMSEIYKQVKPNAQLTVRTPQQLNQLNESLAKNTQEVSPQEFLPEINLSTCSPDLVVKNWAYAVGNLSTASQDTLLGKMTQLFSKYAKVNPPPP

SEQ ID NO: 1594 - DNA, 3989 bp, DROSOPHILA
gttggtccttattctaaatcgcacagataagttctttaaatctaagtgtgatatttttttaaccatttgtttttactgtaacttgacatagttttttttttttatgtataactgatattattcttaccttttagaacgaatttaatatcctttcatcatcccaattttagcattctttaagatttcgcgttgagcttcttctctttttctataacacttatattataaacagtaaaaaaaatcacattccttgcgcaattatgcggtcaatttgaattgcgaaaaaaagcagaagaaccgcaattttcaaattggttaattatcagctactacgcatgcgcgcacttcgcacgctctcaacgaacagaaacagtaaacaccgtaaaaaaaaaaacaaaacactaactgctattgaacaagtggatgagatcgcgaaacacgcccgttttggattgaagaagtctcaagaagacaagcgcgcgccaccgagtgtgcagatgcaatgcaccgggccaattccgagtccagaagttagccaagttagtcgcgagcgcagaccgcaaaacagtcagtacagcaacaacaacaatgagggaaggggccaaaagcggcaaaagacgttggccgacgtcgcgcatgcccagcgatgtttttttttggcgcgcaagcacctattcaaattgcgcgttatcgataatgcgcatgtatcgatattttgcgatctattcatcggcacaatatttaatttatttattatatatattttagtaaagaaaatacacgtttcacacaggcaatgatcgaaattcgaatagatgtattcgcatttctcgaattttcgtttttcttttcaaaaagtagcagttatttgatcgaaacaaaattaatattggtcgatatatggaatgtcatacctcgttgaatttgtaataaagtttcaaatcgagtggcatttacagctcaaaatgttggattttcatgatctatgatctacgcagagtgagtcgatgtatgaaagcggaaggaagcaagcatttctacaaagcgagtattttgttgaaaattgcatcgatacctggtatccgatagttagtttcggccagcaacctgcgactggtcacacttgcaactttttacgttttttttcggcagtcgtgcgaattaattaattaattcagttgatgtgaccaggatgagccacaaacgctgccttgcgaacgaggtaatcgaattcgtcctgccggccaatagcgattactcggacgaagacaaccgtggaaacgttcgtgtgattaacactagcgatgatgccacctacgtgcttctggacaacctgggcaacgagttcgaagaggacatcatcatcgtcaatgagaacggcgtggagaaggagatgctgatgagcaaggagctgcgcgactttatagtgggctcccgggtgaaggatttgacggatgacgaacagatgccgcaatttgtggtcagggaattggatatgagcgaagtgggggatttggtggaggtggaaccggagatggaacaggaggcggactatggcgactacggcgactacgagcacgaacctagctacggccatccgcgcgataacgaaagggtggaagaggatctggatatgtatccaccgtcgtcaccctcgctgccaccatcgccaccaaggccgccgtcgcctgttgtccagcccgctagcaaagctagaaattctgcccgccagatcgccttacgtagctttgtcagccaaaaaaacaacgacgacgatgatggtagcgtgaaggaggtgaagccaagcgaaaagatgctggaggagttcaagggaccgcgtcgctacatgcttttcgacgacctgatagccaccattgtggactttgacgaggatagcacaccccttgtggagttctccatgatcagcgacatcatggacgagaagctgccggtggagtgcggcatttgcccagatgtgatgcacaaatcaaagctgtccaagcaccacaagacccatctggtgcctggcaccaatcgctatgcttgcatttactgcacggaaacgtatcgcgactgcaagtacctggccggacatgcgcggcgccacatgggcatccgtccatacgtctgcgaactgtgcaccctatacttttcgaccaagcaggatctgcgcgtgcacaatcagcgccgacatctggagaaggagcatatttgcgaagtgtgcggcaagacgttcgcccagaatacccagctgaagcggcatcgcgaggcgacgcacgagaagaagcggcgattccagtgcgagtactgccagaaggcctactacaagaatttctctctgcaggagcacatccgcaatgttcacatgggcaagcggcggatgctcaaatgcccattctgtggcatgcagtgtcgcgatgctcacaagatggcccgtcatcgtaaggagatgcatctgagccagggcacatacgtgtgccatttgtgccaggaggagttcaccgacatcagctacttcgatgcccacaagcgttcgattcagtgccgtagcaatacgcgtcgctttgtgaatgcggatgggaatcgtgaaggatccgattcggaatccatttccggtcgcaatatgaatggccaggacgacgattacgacggcatgggcccactgcaggaggagtacgacgaggatgacggcctgttggttgaggacaatcaaccagaggagcagggttcgccgtccaatcgccaatatttggacgagagcgagcaacagtatgtgcagctatcggattacgatgaccagcacctgctggtggagaacgcagtggacgcagaggatggcggtgaggatttagatgagctgctaaccgaggatcagtactttaacgctgtccaacagcatcaccagcagcatcagcagcatcatggccgagggcaggactacaacgacgagctgatatatgaaatcaccttgaagactgaggataactgagtgccgcaactccgcgcaaattttgtacatatataggtcgcaattaaatactatcatgtaaagaattcattcgcttgactttgtttttgaatggcagtaccaagttttttggtcgaatgcaacccagtgtgtacaaatccgcagggctgtattttaaagggcatcaagttcggactgttgattgcaaccaaggggtcaaacatcgcgccttttggttgtaccaaggggtcattgcggttttggcaatggaattttccactcattttgcatttagcaaggccccggtgacgtcagcacgggctatacagcaggaggaagtgagaaggaaataactttagctacagcacttattgctccatttcgataacgattatttcgggtggagatgaactaatttcaaaactaaatagacttttatgtattaaatacgtattattcaatgatttattgttaattattattgacaaaatatggtaaagcagtcatgagacactttttattaaaaaaaaagatcatgtatatttgcttaagcctgcacttctcttgttttgcaacactaatggggcgggcaccactgacaacagaagtaaacaaacgtaaagacaacatttttgtttctaccggaaaagtaggcgaaatgggcaatgaccacgaaaccaagggaacccgggatccttcgatcaaacttctccagtcacacaacaaaccaccttgatttggagcagagttgccttcagaaattccgcacaacaaagcgattctcatccaaatctcgacctggcatatattttaaacaatggacgacaacgaggatgagctggaggagcaccaggagctggtcagcgacggcagtgtcgaggaggaggaggaggtggagcccgatctgggaccagtggacagttgggagtcctttaatgaccgcatcgatggcctgatctttaacgagcgatgcgacaagtcggtgaagaagttggacgaacgccggctggcgatactcaac

SEQ ID NO: 1595 - DNA, 1989 bp, DROSOPHILA
tgagtcgatgtatgaaagcggaaggaagcaagcatttctacaaagcgagtattttgttgaaaattgcatcgatacctggtatccgatagttagtttcggccagcaacctgcgactggtcacacttgcaactttttacgttttttttcggcagtcgtgcgaattaattaattaattcagttgatgtgaccaggatgagccacaaacgctgccttgcgaacgaggtaatcgaattcgtcctgccggccaatagcgattactcggacgaagacaaccgtggaaacgttcgtgtgattaacactagcgatgatgccacctacgtgcttctggacaacctgggcaacgagttcgaagaggacatcatcatcgtcaatgagaacggcgtggagaaggagatgctgatgagcaaggagctgcgcgactttatagtgggctcccgggtgaaggatttgacggatgacgaacagatgccgcaatttgtggtcagggaattggatatgagcgaagtgggggatttggtggaggtggaaccggagatggaacaggaggcggactatggcgactacggcgactacgagcacgaacctagctacggccatccgcgcgataacgaaagggtggaagaggatctggatatgtatccaccgtcgtcaccctcgctgccaccatcgccaccaaggccgccgtcgcctgttgtccagcccgctagcaaagctagaaattctgcccgccagatcgccttacgtagctttgtcagccaaaaaaacaacgacgacgatgatggtagcgtgaaggaggtgaagccaagcgaaaagatgctggaggagttcaagggaccgcgtcgctacatgcttttcgacgacctgatagccaccattgtggactttgacgaggatagcacaccccttgtggagttctccatgatcagcgacatcatggacgagaagctgccggtggagtgcggcatttgcccagatgtgatgcacaaatcaaagctgtccaagcaccacaagacccatctggtgcctggcaccaatcgctatgcttgcatttactgcacggaaacgtatcgcgactgcaagtacctggccggacatgcgcggcgccacatgggcatccgtccatacgtctgcgaactgtgcaccctatacttttcgaccaagcaggatctgcgcgtgcacaatcagcgccgacatctggagaaggagcatatttgcgaagtgtgcggcaagacgttcgcccagaatacccagctgaagcggcatcgcgaggcgacgcacgagaagaagcggcgattccagtgcgagtactgccagaaggcctactacaagaatttctctctgcaggagcacatccgcaatgttcacatgggcaagcggcggatgctcaaatgcccattctgtggcatgcagtgtcgcgatgctcacaagatggcccgtcatcgtaaggagatgcatctgagccagggcacatacgtgtgccatttgtgccaggaggagttcaccgacatcagctacttcgatgcccacaagcgttcgattcagtgccgtagcaatacgcgtcgctttgtgaatgcggatgggaatcgtgaaggatccgattcggaatccatttccggtcgcaatatgaatggccaggacgacgattacgacggcatgggcccactgcaggaggagtacgacgaggatgacggcctgttggttgaggacaatcaaccagaggagcagggttcgccgtccaatcgccaatatttggacgagagcgagcaacagtatgtgcagctatcggattacgatgaccagcacctgctggtggagaacgcagtggacgcagaggatggcggtgaggatttagatgagctgctaaccgaggatcagtactttaacgctgtccaacagcatcaccagcagcatcagcagcatcatggccgagggcaggactacaacgacgagctgatatatgaaatcaccttgaagactgaggataactga

SEQ ID NO: 1596 - protein, 598 aa, DROSOPHILA
MSHKRCLANEVIEFVLPANSDYSDEDNRGNVRVINTSDDATYVLLDNLGNEFEEDIIIVNENGVEKEMLMSKELRDFIVGSRVKDLTDDEQMPQFVVRELDMSEVGDLVEVEPEMEQEADYGDYGDYEHEPSYGHPRDNERVEEDLDMYPPSSPSLPPSPPRPPSPVVQPASKARNSARQIALRSFVSQKNNDDDDGSVKEVKPSEKMLEEFKGPRRYMLFDDLIATIVDFDEDSTPLVEFSMISDIMDEKLPVECGICPDVMHKSKLSKHHKTHLVPGTNRYACIYCTETYRDCKYLAGHARRHMGIRPYVCELCTLYFSTKQDLRVHNQRRHLEKEHICEVCGKTFAQNTQLKRHREATHEKKRRFQCEYCQKAYYKNFSLQEHIRNVHMGKRRMLKCPFCGMQCRDAHKMARHRKEMHLSQGTYVCHLCQEEFTDISYFDAHKRSIQCRSNTRRFVNADGNREGSDSESISGRNMNGQDDDYDGMGPLQEEYDEDDGLLVEDNQPEEQGSPSNRQYLDESEQQYVQLSDYDDQHLLVENAVDAEDGGEDLDELLTEDQYFNAVQQHHQQHQQHHGRGQDYNDELIYEITLKTEDN

SEQ ID NO: 1597 - DNA, 6180 bp, DROSOPHILA
gaccttatctcattttctcattcattcgaactgaaggccaagaagcctgctggcaagcggggctgtaaaaagacataagattgagtatattgtttttggtaatactaagttacaaacccgtacgcttaccctacgcttaaggaaatttagcttattgtacgttaagatctacgaactgaatcgtgttaagttctttttatttttataaatagatgcccgcttatatcttacaagtctgccaaaagacgaaaacttctttatcaatccatctttattatatgtatgtatatattcgttcgcaatacgaagtcgtagtaaatttgtatttgaacgcaaaaggaaactagatgagatttatttacaaactaaaaagggaatgtatggatgaaatacaaattcctctgctggtgcccatcgaggaactcgttcagtgtgacttcaaagtcaatctctatatatctttaattaatttttgccctttccagatcctttcgggagctcttacgttcttacactcactggggccggtaaatttcggctaattgtaacagaatacgtcaaattttaggcgttaacaagctacgattcaaagtaactttgaatctcgcggcttatcaataaatttcttcagctgatggtaccgataatatatcgagctcgattcatatgctggtcacactttcgcgccatttggtatcggaggtgccaatttagcaattgtgtagccatatgccatctttgacagccgtctcacaacggcatcaagttgcatattagagttatatatttgaggttacaaatatcgtttattttttacttggaatttatgttttttagtgtcttgacatacaatatattttatctatatattagagagtttatatattagctattttaaacatgtgacctagctacattttaaaagccagactgcacaacactgcctagcgtttgttgtgaaatttacttacctgacttacgttgacgattgccagtggccatggacgaatcctcgagaaagcacatggaggactgcttcctacgcagtcccagcgacatccgtaccacgtgagtacgccgctaaacttacattcagcttttcttacattcccaatccctgaccaaaagcaacgtgcccgcggcgcctaaatcgcaggcggctgacaacaagtctcggaaaacggagctccacgtccttcggctcaacgatgaatcccgccagatgaccatggacacgctgcgccaaatccacggcccggaattccagctggacgacatcagcaagtacaaggatcgtggacgcggaggtcatggcgtgaagcactcctactggcaggatcgcggcaccctggtggtgcagagtgtccagggcgtgagctcaacgcgtggcaacgacagtgatggtgatcgcctgcgccgatatgccttggccaaactggagaactacggatttcaggctgtccactgccttgaagcttatgagcactgctccggcgacacggaagccgctctactgctgctctaccgtcgctatatgagaattcccgatgaggagcaactgactctcgagccacccagcgagcaagaaatactggacatgcgcgccgacgagaaggaggccctggagtccatcttcgataaggcgtacgaggagcgcgaggcgaatcgcgtgtggaacctaaagtttcgcatcgaccatctgctggcccacagtccgtcggaggtgcgaaaggccagggaggcggtcctggccgccgctgctgctgctgcccaggcggcgctcgacaagaagaaaaagcctcctctacgttgtcgcaatttcgatcgtgacggcacctgtaagtacggtcccaagtgccggttcgctcacctgccgcaacaacccactgaatcggacacgaccaaaaagggtaagtgctgtggaaaggcttattattaactttacttcactgaatagcatactccttcagatagcgttgacgagaacgataacgagctgtggtttcacgtggaagtgcgctttccgccaggcagtcgctatccatatgaggcgcctttcatctacctgaaaaccacttgccacgacataccgcacgaactgcgcctccggtatgcccgccatctctacaaggaggccaaagagatatgccgggatggcattccctgtgtatacagcatatgcgacctgctgcagtccaatgaacagctggccggacgactagacacgtctgcttttccctcgcccaagcgatcactcttctacgatgagccggcgggcggtggagtgaatccggatgccgagcatcatcaatcaccgaaaccatcgcactacgcacgtggtcaaacgtcgcgaaatgatggaggccaccagcgaaacgtggaagcgcagacgagagagaaccgtcgccttttgcaacagttcgtggagcgacgaaaggaagaacgctaccagaagatcattgatggacgaaaacagctgcccgccttcgccgaaattgaacgtattctggcgctaatagaaagttcgccggtagtggtaatatctggtgaaacgggttgcggcaagagtacccaagtgccgcagttcattttggacaattggttcttccgcgcacttcaactgccagcaaaggagaacttgccccacgtggaaatcatctgcacgcaaccgcgacgactctcagccatcggagtggcggagcgagtggctgccgagcgtctggatcgcattggtcagctggtgggctaccagatccgactggaaaacaaggtgtcgcaaagcacgcgactcagtttttgcaccacgggcatcttgttgcggcgactggcctcggatccgctactaggaagcgttacccacgtcatagtggacgaagtacacgagcgatctgaggagtccgatttcctactgctaattctcaagaatctgctgcgagagcgcaaggatctaaaagttattctcatgtcggccacgctcaatgccgccctcttttcggattactttggcggagctcccgtgctagatattcctggtcgaacgtttccagtacagcagctctttttggaggatatcctggagatgagcgactttgtcatggaatacgacactaagtactgccgcaagcttaaaaagcaggagcaggaaatactggagcgtgagctggagtacgctgatgtgcaggcttcgggagaagcgccaggcaaaaagatcaaggatgaaaagctaactctggcggagacttatcagcgatacgcgggtaagtgactgcatacgaccacataaattcaagcgcctataatttctctgtgatattccccttagaatatagcaagcccacgtgcaagagtatttacctgatggagcccatgactataaatccagaactgatcgaatccgtactgaaatacattgttgaaggttctcacgattggccgcgcgaaggaaccatcctcatcttcctgcctggtttcggggagatccaatccgtgcacgattccttgctggacaatgcactcttttccccacgcgccggcaaatttatcctggtgccattgcactcggccctttctggcgaggatcaggcgctagtcttcaaaaaggccccgcccggtaaacgaaagatcgtgttgagcacaaacatagctgagacatcggtgaccatcgacgactgtgtgttcgtggtggactgcggcctgatgaaggagaagtgtttcgactcaaaccgcaacatggagtcactggacctagtctgggtgtctcgtgccaatgcaaagcagcgcaagggtcgtgccggccgtgtgatgccgggtgtgtgtatccacctatacaccagctaccgctatcaataccacattctggcccaaccggtgccagagatccagcgagtgccactcgagcaaattgtgctgcgcatcaagacgttgcaaacgttcgcctcacgcaacacgctctctgttctgctggagacactggaggcgccaacagaggacagtgtactaggtgcattgacacgattgagggatgtgggcgcgctcgatgcagaggatcaattaaccccgcttggtcatcatttggcagcccttcctgtcgacgtgcgcatcggcaagctgatgctgtatggagcgatcttccagtgtctggacagcgtgctgaccatcgccgcctgcctgagcaacaagtcgcccttcgtaagtccgctcaacaagcgcacggaggcggacaagtgcaaacggatgtttgcactgggcaacagcgatcatttgaccgtcctgaatgcgtatagggtaagttaacctctcacaataataaaaggacatgcaattatgtatacttatatcaaacagaaatggctggatgttgcgcgaaggggaaactatgcagccagcagaaactacgccagtgagcacttcctgtcgctgaacacacttgaaacgatagctgatctcaagtatcaatacctggagctactcgtttccattggctttgtgccgatcgatgtgccgcgtaggcgcaaaaatgcctgcgacaatatactgacactaacaggtatgcatgtggtggcaaataaaacgaaacagaatagtttaaaaacaatgcatttgaatcctttgcaggtgtggagcagaaccacaacggtgataacaacaggctgctgacctcgctcctctgcgccgccctctatccaaacatcgtgaagattatgacgccggatcgcgtctacatccaaacagctggtggtgctgtgccgcgtgagccgagccaccatgatctgcgcttcaagacgcgcggcgatggttacgtgaagattcatccgtcgtcggttaactcgcaggtgtccgtcttccaggcgccgttcctcgtcttccaggagaaggtacgcaccagcgccatctacatccgcgactgttcgatgttgccgctcatcgccatggtcctgtttgccggcagcgattttaaggtggagctacacgatggggacttcctttttctgctggaaagcggttggattatattgaaggcccacgatctagagactgctgagatggtacagtgcctgcgggcggagatgatcaagctgctcgaggagaagattcgcgatccgtgccttaatctgctgcaccacaaaaacggctgccgtatgatcgccaacatcgttcacttgattagtaaaaacagctgagaagccacttatttcgcaaccatccaaattttgtgttagagctgttatagcaaatattaaaaaaaaaaagaaagcctgtaatatataaacgccaaacgagacaaataacgatttaccgaaacgatggctttaaaatgggacaacaggaatggatttaacaatagatttcccatctaaaacgatattcattgagtagagaaattttatctgctctataatgcatcgatattaattgtatgtattcccccacacctcaataaacgatcattatttataacatgtgtgctaaagccttcatattatttgctctcaatcaatttggcacttgtagcaataattgattgataagtatactatatatatttcaataatgactcaagtaaaaggattccgaagaagcaagttgattgatacaacgcagctctcgtaggagtctctcattaccatctatcatcaatcatgcagatgattgattgattcaaccggaagggcgcccaaatcatcaccaggtgtcaaccgcaaatcgatcattactgttgggttgtccacgccataaaacggcggcatccaagacgataatttttggagaaccgggggcctgcctggtgcccaccccatcaattacaattcgtttgaatttatttaaatacactcggatttgtggcggccactttgggaagacagttgaaataccggggcggttccgtcgatacatcaaagctggttagcatttcgtggctgcagcgtaattaattaattatgcttatcaacattggctaatgcagctcgtatatgtattttacgtatgaatcagttgccaatttgaatagggtttacgattccgattccccgactcaaccttgagttatttctctctttcgactttggcccactgcgggaatctttgtacttctgtaacgaaaactagcacttttcgcactgaggcagctttatcttttcaattaaaggctccagcgatcgagcacaaatgggatctttt

SEQ ID NO: 1598 - DNA, 3867 bp, DROSOPHILA
atggacgaatcctcgagaaagcacatggaggactgcttcctacgcagtcccagcgacatccgtaccaccaacgtgcccgcggcgcctaaatcgcaggcggctgacaacaagtctcggaaaacggagctccacgtccttcggctcaacgatgaatcccgccagatgaccatggacacgctgcgccaaatccacggcccggaattccagctggacgacatcagcaagtacaaggatcgtggacgcggaggtcatggcgtgaagcactcctactggcaggatcgcggcaccctggtggtgcagagtgtccagggcgtgagctcaacgcgtggcaacgacagtgatggtgatcgcctgcgccgatatgccttggccaaactggagaactacggatttcaggctgtccactgccttgaagcttatgagcactgctccggcgacacggaagccgctctactgctgctctaccgtcgctatatgagaattcccgatgaggagcaactgactctcgagccacccagcgagcaagaaatactggacatgcgcgccgacgagaaggaggccctggagtccatcttcgataaggcgtacgaggagcgcgaggcgaatcgcgtgtggaacctaaagtttcgcatcgaccatctgctggcccacagtccgtcggaggtgcgaaaggccagggaggcggtcctggccgccgctgctgctgctgcccaggcggcgctcgacaagaagaaaaagcctcctctacgttgtcgcaatttcgatcgtgacggcacctgtaagtacggtcccaagtgccggttcgctcacctgccgcaacaacccactgaatcggacacgaccaaaaaggatagcgttgacgagaacgataacgagctgtggtttcacgtggaagtgcgctttccgccaggcagtcgctatccatatgaggcgcctttcatctacctgaaaaccacttgccacgacataccgcacgaactgcgcctccggtatgcccgccatctctacaaggaggccaaagagatatgccgggatggcattccctgtgtatacagcatatgcgacctgctgcagtccaatgaacagctggccggacgactagacacgtctgcttttccctcgcccaagcgatcactcttctacgatgagccggcgggcggtggagtgaatccggatgccgagcatcatcaatcaccgaaaccatcgcactacgcacgtggtcaaacgtcgcgaaatgatggaggccaccagcgaaacgtggaagcgcagacgagagagaaccgtcgccttttgcaacagttcgtggagcgacgaaaggaagaacgctaccagaagatcattgatggacgaaaacagctgcccgccttcgccgaaattgaacgtattctggcgctaatagaaagttcgccggtagtggtaatatctggtgaaacgggttgcggcaagagtacccaagtgccgcagttcattttggacaattggttcttccgcgcacttcaactgccagcaaaggagaacttgccccacgtggaaatcatctgcacgcaaccgcgacgactctcagccatcggagtggcggagcgagtggctgccgagcgtctggatcgcattggtcagctggtgggctaccagatccgactggaaaacaaggtgtcgcaaagcacgcgactcagtttttgcaccacgggcatcttgttgcggcgactggcctcggatccgctactaggaagcgttacccacgtcatagtggacgaagtacacgagcgatctgaggagtccgatttcctactgctaattctcaagaatctgctgcgagagcgcaaggatctaaaagttattctcatgtcggccacgctcaatgccgccctcttttcggattactttggcggagctcccgtgctagatattcctggtcgaacgtttccagtacagcagctctttttggaggatatcctggagatgagcgactttgtcatggaatacgacactaagtactgccgcaagcttaaaaagcaggagcaggaaatactggagcgtgagctggagtacgctgatgtgcaggcttcgggagaagcgccaggcaaaaagatcaaggatgaaaagctaactctggcggagacttatcagcgatacgcggaatatagcaagcccacgtgcaagagtatttacctgatggagcccatgactataaatccagaactgatcgaatccgtactgaaatacattgttgaaggttctcacgattggccgcgcgaaggaaccatcctcatcttcctgcctggtttcggggagatccaatccgtgcacgattccttgctggacaatgcactcttttccccacgcgccggcaaatttatcctggtgccattgcactcggccctttctggcgaggatcaggcgctagtcttcaaaaaggccccgcccggtaaacgaaagatcgtgttgagcacaaacatagctgagacatcggtgaccatcgacgactgtgtgttcgtggtggactgcggcctgatgaaggagaagtgtttcgactcaaaccgcaacatggagtcactggacctagtctgggtgtctcgtgccaatgcaaagcagcgcaagggtcgtgccggccgtgtgatgccgggtgtgtgtatccacctatacaccagctaccgctatcaataccacattctggcccaaccggtgccagagatccagcgagtgccactcgagcaaattgtgctgcgcatcaagacgttgcaaacgttcgcctcacgcaacacgctctctgttctgctggagacactggaggcgccaacagaggacagtgtactaggtgcattgacacgattgagggatgtgggcgcgctcgatgcagaggatcaattaaccccgcttggtcatcatttggcagcccttcctgtcgacgtgcgcatcggcaagctgatgctgtatggagcgatcttccagtgtctggacagcgtgctgaccatcgccgcctgcctgagcaacaagtcgcccttcgtaagtccgctcaacaagcgcacggaggcggacaagtgcaaacggatgtttgcactgggcaacagcgatcatttgaccgtcctgaatgcgtataggaaatggctggatgttgcgcgaaggggaaactatgcagccagcagaaactacgccagtgagcacttcctgtcgctgaacacacttgaaacgatagctgatctcaagtatcaatacctggagctactcgtttccattggctttgtgccgatcgatgtgccgcgtaggcgcaaaaatgcctgcgacaatatactgacactaacaggtgtggagcagaaccacaacggtgataacaacaggctgctgacctcgctcctctgcgccgccctctatccaaacatcgtgaagattatgacgccggatcgcgtctacatccaaacagctggtggtgctgtgccgcgtgagccgagccaccatgatctgcgcttcaagacgcgcggcgatggttacgtgaagattcatccgtcgtcggttaactcgcaggtgtccgtcttccaggcgccgttcctcgtcttccaggagaaggtacgcaccagcgccatctacatccgcgactgttcgatgttgccgctcatcgccatggtcctgtttgccggcagcgattttaaggtggagctacacgatggggacttcctttttctgctggaaagcggttggattatattgaaggcccacgatctagagactgctgagatggtacagtgcctgcgggcggagatgatcaagctgctcgaggagaagattcgcgatccgtgccttaatctgctgcaccacaaaaacggctgccgtatgatcgccaacatcgttcacttgattagtaaaaacagctga

SEQ ID NO: 1599 - protein, 1280 aa, DROSOPHILA
MEDCFLRSPSDIRTTNVPAAPKSQAADNKSRKTELHVLRLNDESRQMTMDTLRQIHGPEFQLDDISKYKDRGRGGHGVKHSYWQDRGTLVVQSVQGVSSTRGNDSDGDRLRRYALAKLENYGFQAVHCLEAYEHCSGDTEAALLLLYRRYMRIPDEEQLTLEPPSEQEILDMRADEKEALESIFDKAYEEREANRVWNLKFRIDHLLAHSPSEVRKAREAVLAAAAAAAQAALDKKKKPPLRCRNFDRDGTCKYGPKCRFAHLPQQPTESDTTKKDSVDENDNELWFHVEVRFPPGSRYPYEAPFIYLKTTCHDIPHELRLRYARHLYKEAKEICRDGIPCVYSICDLLQSNEQLAGRLDTSAFPSPKRSLFYDEPAGGGVNPDAEHHQSPKPSHYARGQTSRNDGGHQRNVEAQTRENRRLLQQFVERRKEERYQKIIDGRKQLPAFAEIERILALIESSPVVVISGETGCGKSTQVPQFILDNWFFRALQLPAKENLPHVEIICTQPRRLSAIGVAERVAAERLDRIGQLVGYQIRLENKVSQSTRLSFCTTGILLRRLASDPLLGSVTHVIVDEVHERSEESDFLLLILKNLLRERKDLKVILMSATLNAALFSDYFGGAPVLDIPGRTFPVQQLFLEDILEMSDFVMEYDTKYCRKLKKQEQEILERELEYADVQASGEAPGKKIKDEKLTLAETYQRYAEYSKPTCKSIYLMEPMTINPELIESVLKYIVEGSHDWPREGTILIFLPGFGEIQSVHDSLLDNALFSPRAGKFILVPLHSALSGEDQALVFKKAPPGKRKIVLSTNIAETSVTIDDCVFVVDCGLMKEKCFDSNRNMESLDLVWVSRANAKQRKGRAGRVMPGVCIHLYTSYRYQYHILAQPVPEIQRVPLEQIVLRIKTLQTFASRNTLSVLLETLEAPTEDSVLGALTRLRDVGALDAEDQLTPLGHHLAALPVDVRIGKLMLYGAIFQCLDSVLTIAACLSNKSPFVSPLNKRTEADKCKRMFALGNSDHLTVLNAYRKWLDVARRGNYAASRNYASEHFLSLNTLETIADLKYQYLELLVSIGFVPIDVPRRRKNACDNILTLTGVEQNHNGDNNRLLTSLLCAALYPNIVKIMTPDRVYIQTAGGAVPREPSHHDLRFKTRGDGYVKIHPSSVNSQVSVFQAPFLVFQEKVRTSAIYIRDCSMLPLIAMVLFAGSDFKVELHDGDFLFLLESGWIILKAHDLETAEMVQCLRAEMIKLLEEKIRDPCLNLLHHKNGCRMIANIVHLISKNS

SEQ ID NO: 1600 - DNA, 4027 bp, DROSOPHILA
cccagagaatggagactggtatataaatggccaaactgtatccatagatgcacatcagcgacaagaggctcggcatgtagctggcctgcaataaaaaacccgaatatgagcgagatggatggatggatgggaatgccaatgcaacttacgctgtccgtttccacggcatcagcggagtccacaggcttcaggctgtacttgaagagggcccacagaacggctggcaagatattggcatacaagaagatggacgtagccgcataggagaccagatggaagttgtagtgccatttgtacgcatcagtggcttgctgcaaatagctggcaatattaccacttattgctatggaaaagatctgaaatgcaaatggaaagagttagttccacttttggagttgttaaaacttcaaagctaccgaccagggtgacggttatccagaagggtccatatagatccggattctcgccgatgttcatgcgcagatagttgccagaggcccgtttgggtatcatggagttggcgattcgctcgagcaccatataggtgtccacgttgaagaactgctggtagtactcgatcgtaaacagtgatagtttcgcaccaccgcctccaccgccggcggatccgtccagcgatgagttctgcggctgggagccgcccgaggatgcagctccggagaatccctgggccgaggaggtcatgtcatagatgagatccgccagcggatcgccgcgttgacgctgtgcgttggcaccaccaccgccaacggagccgccggaaccagcagagccaccaccagaaccacccgatccgccgtgcgtaggggaattgacattgatttgggccggggcaccgccgctgtagtcgcggaactgcaacaggtcatcggccatgggtgtctccatttagatttcggctcgactagattggtttcgttttgctaattgtaaatattacacgtattttgcacttggcccaaaaaaatatctgctggcagcgatggcttatcggttatcgataggcgtacgaacatcagctggcgactgcattcgtcagctagagatggcagacggcggtggggctgagcagccgaaaatgcctagatttggctatttcaaataagtccacaatattatatgggaatgaaccatattttaaagatgtattcctttaatctaaatatcggaaattacttccatgaccttctatttataatttaatttacgacagagttaatatcattatttttcatcaaacaaaaatattgtaacatttttatatttaaatagttacatgggtaaattccaaatttattttctcttattttagtggtccaggttacttcaaattcaatgatacattaatattttaatgtgtttaacttaatgaataatatttttcgcagatttagctattttgtagccactcagctagatgctccgcttgcgttgaccaacactaaattgcccaacactcttacgtgcggtcatactttttttgatacagcacacagtttagtgtttttccacagagttttccacagtttccacactccccgattgtcgaaagcaaacaaaaaaagatatcgcgcttataccggcggccacctgcagtccattgccgaatcggaatacgccgagaacaaggagaaccgcaaaatccactctgaaatgcccgtgaagaatggcgaatccgatggcgaaggcgacgtttctggcggagaatcggagcactcgaattccagccagccacacgacacctccgacgaggaggaggccaacgaatgcgattcggatgactcctccgagttggatgccagtgaaatagaccgccggcgggcagagcacatcgaggatttgcgtaggaatcagtacgtacacacttaacacaagccatactcatcgagtttcttctttccttgacacagtgagcttggagcgccaatttaacgagttgcgggaacagtactacgtcgagcgcatcaatctcatcgaacgacaattggccgaggtgcgttccgggcgttccgaggagtttgtccagccgcaaaaggaactggacaagaagtatcgcaccaggatcgaggtggcggacgtcctgcgcaagtaccgactgcagaatatcgagcacaaataccagtccgaggaacaagctgccgtccagcactttgaggtacataaccaatctcgatttttggcgccaaaaatgagaagagctaattggccaccatatcgtcgcaattagattggctttcgtgttgataaggcactgggggcgacactgccaaagctaattacaacacaaaatgtcactcacttataggccatatattaacgatttaagacaaatgatggcttaacttaagcgtagaagtagttgttaatgtatcctcttgcaactcacaacttttccgttgcagagcgagaaacacatggcattggacaatctgcgcgaggagttcatggagcgcatccgtcgcctggaggaggatcgccacaacgtggacatctcgtgggccgactggggcaccgacaagcggcagagcaaggtgcgcggaccgggtcgcaagaaggccgtcaccgtcacgggtccctatgtcgtgtacatgctgcgcgaggaggatatcatggaggactggacgattatacgcaaggccctcaagcgatcctcctcgtcggccaccgctgctggcacagttacgcccacttccggcgtaagcgttagcctgtccggtttgccagcaatggcaggagctagcggatagcgttggggcgtggcagctgccgcctacgcccacatgacgcgtacctgacggccgcgcccgaggaagcagcagccgtagacgtttatgtatcagtagtagccgtagcagagcccccgaaccagacttcaaatgcgttcatcaaaatggctaagctccgccacccatcctcacctccttttcccgtagattttagtacgtacgtagtttgtacgagtcccactctcagaatattgtgtgtgtgtgtgtgtgtgtgtgtctctcccctcccccatacagacgatgtatgtaatttatgctaaaagataagtgcaaataaaagcgaactgcagccaagtgggcatgcgttcaacataaatttaattcgattgcctgcgagtgattcaatctccggaaggccagcagttttgttatccagacttggatactatgggtaggaggtcacaatgtgggtaagccgccttaggtgaggcgagacagaagaacacaaatcccacatgatttaaatcaacagaaaagcttttattgcggcacagacggttcatttgtggaccttcagaagcccttctccttgagatagtcacgcaggacgtccacgtggtcaccatggaagtgtatctgaccgctcagctcattgattctcgtggcgcagaccttgccgtttcgcgactgctccaccaccgcacgcagatccttttccagcgtccaaatgtctccttggacgcgtcgcaccaccgtgatccggcgctggccacggaacctggtgtgcagatacacgggcaccatgtgattcttcgtcctggccacatggtaacccagttctgagccatcctccttttgtggctgccagccggatggatattttggcttctccaccggctgtggtactgtcttcgctggtagcaagcgctccacaaaacgccactcgggcggattggccaccacctccacttcaggatacttgtccagctcctgaacttcgcgggatgaacgaaaactggacataagtgccggttgcatgtgtatttgcctggtaagctgcgtgaaataaaaacagattttaggtgattttttactggaatcctttggtttatctgctcacctggcttagcttttggcagaggccgctgcctagcatcagtttggcgcttgttgccatgttttttggctaaaaactaacagatttcccaagaaatacaaaaaatagttgttacatatgcactggctggttagtgatgcgcaaatggtagcgataattgtttcga

SEQ ID NO: 1601 - DNA, 1282 bp, DROSOPHILA
atggcttatcggttatcgataggcgtacgaacatcagctggcgactgcattcgtcagctagagatggcagacggcgcacacagtttagtgtttttccacagagttttccacagtttccacactccccgattgtcgaaagcaaacaaaaaaagatatcgcgcttataccggcggccacctgcagtccattgccgaatcggaatacgccgagaacaaggagaaccgcaaaatccactctgaaatgcccgtgaagaatggcgaatccgatggcgaaggcgacgtttctggcggagaatcggagcactcgaattccagccagccacacgacacctccgacgaggaggaggccaacgaatgcgattcggatgactcctccgagttggatgccagtgaaatagaccgccggcgggcagagcacatcgaggatttgctgagcttggagcgccaatttaacgagttgcgggaacagtactacgtcgagcgcatcaatctcatcgaacgacaattggccgaggtgcgttccgggcgttccgaggagtttgtccagccgcaaaaggaactggacaagaagtatcgcaccaggatcgaggtggcggacgtcctgcgcaagtaccgactgcagaatatcgagcacaaataccagtccgaggaacaagctgccgtccagcactttgagagcgagaaacacatggcattggacaatctgcgcgaggagttcatggagcgcatccgtcgcctggaggaggatcgccacaacgtggacatctcgtgggccgactggggcaccgacaagcggcagagcaaggtgcgcggaccgggtcgcaagaaggccgtcaccgtcacgggtccctatgtcgtgtacatgctgcgcgaggaggatatcatggaggactggacgattatacgcaaggccctcaagcgatcctcctcgtcggccaccgctgctggcacagttacgcccacttccggcgtaagcgttagcctgtccggtttgccagcaatggcaggagctagcggatagcgttggggcgtggcagctgccgcctacgcccacatgacgcgtacctgacggccgcgcccgaggaagcagcagccgtagacgtttatgtatcagtagtagccgtagcagagcccccgaaccagacttcaaatgcgttcatcaaaatggctaagctccgccacccatcctcacctccttttcccgtagattttagtacgtacgtagtttgtacgagtcccactctcagaatattgtgtgtgtgtgtgtgtgtgtgtgtctctcc

SEQ ID NO: 1602 - protein, 339 aa, DROSOPHILA
MAYRLSIGVRTSAGDCIRQLEMADGAHSLVFFHRVFHSFHTPRLSKANKKRYRAYTGGHLQSIAESEYAENKENRKIHSEMPVKNGESDGEGDVSGGESEHSNSSQPHDTSDEEEANECDSDDSSELDASEIDRRRAEHIEDLLSLERQFNELREQYYVERINLIERQLAEVRSGRSEEFVQPQKELDKKYRTRIEVADVLRKYRLQNIEHKYQSEEQAAVQHFESEKHMALDNLREEFMERIRRLEEDRHNVDISWADWGTDKRQSKVRGPGRKKAVTVTGPYVVYMLREEDIMEDWTIIRKALKRSSSSATAAGTVTPTSGVSVSLSGLPAMAGASG

SEQ ID NO: 1603 - DNA, 4865 bp, DROSOPHILA
acaggaactataaaagctagaaggatgagattcagcatacagaatctagaaaagacgcagcgcagcgttgacccatgttgccacgcccactctaacgcctacaaaccgcgcaaaactgccacgcccgcacttttgaaaaagtgtgttgatattctttaaatattttgattagtcttgtaattttctatcgatttcccaaaaaactttttgccacggccactctaacgcccttcagccgcccaaaaatgctttgtcgcccgttatcaacgtggtagctagtggtttgcttaggacctctcgtgtttagaagcattctcggcagagaaccagtagtagcgctggcctttttgtgggcgtactctaggtgctctcggaacgtggtatcaggagaagcactaactaactattgatctaaagatacacattattttaacgttccaggaagataggtcttgcgtgataatccacacgaacgacatgaatgaaatcatatgatgctgcaaagtatatgtcatagttttaatactgcgttggtgatgcgtcggtgattaaggattcgacgtcaaattagtttgggcagcttgtagagttggtgccttagaggtaggttctgttagcctcgaattatggacgtttggaaatatcaaattttggaaggtggtcgaagggccaaataaggacctctttgcgggtgataaaaaaacttctggcgttctggcgttactcggagatgtatccggcttttggggtctttgtatattgaacagcctttatatggtcagaagcgctttcttccacctgttacatacttttcaacgaacctattgtagtattcccttttactctacgagtaacgggtataaaaaatataaggcccaaagggttttctgtagcacctaccgtttagttacacaattcataaaaaaaaccaaatcgattttcaaattcataatttttttgtataagaatcatacgaaaaaacggtaaaaattttattatgtccttcgtacccgtttatttttattttacttaataagattttaattttctgattatgttaacaattggtatgcacaacttattaatcatacaattagctcaaaaatcaaaattatcaaaagaaattccttccattccttcctatttagcatatttctgtggagtttttgcttaaatcacaatcatcgacaaattcaacgtgcgtgaagggaaaatgaccattttttccatttaattctccctcccattgcccattaatgtttgttttagtgactttaataatgtcacctatttccaattttaatgcagtcttatcgtatgcgttagggacccttgactgttttacgcgggcgtatgcaggtagttttcgcttcgataaattaaaatgtaaaacattattttttttttaaatacttttttggaacacttacatttaaatctgtccttttaagagtactttcaaatacattgctagatcccgaaatggaaggttcgtttttatcaatagcatcttcatccatataatcgtcatactgaaaagaacaaatttgaaaatgatttaacttttaaaaatcaatgcctttaacaaacttatttatcaaaggtcgttcgcaatttggccttctctatttaagcggacgaatatattgaaggcaatggagcttgtccattgtcagtttaattcaatgcaaatggtttttgtaatggattttataatgtattgagattgtagtcagactttaaagaatctaatcgcaacaatttaagggtattattacatgaactcaataattatttctgaacaagtttctcggctatcagatacccgctagtcataaaataggcgtggggaaaagagctcaatttacattttttacatacatacatatatttttacatatttacttctggcgactctttgacattattgacccttatacgtctcactagttttcgggtttctttctgattttacattattaatatcctagcgttagtgtcgccgtatcgaaagttttatttgcattccataaaaattgacgcgactggttttaccgaattcaccattcatttcaagtgtagtattttaacatcagcgttataaggaaacaaagaaattaaaaacgggttacccgttacaaaaaaggataacaaatccaaatatttgcttaacgcacctgttgtatatagggaaccggtatttgaccaattttccccgaggagttacgcgcagtccaccattgatcctcgtcttttcgaactattgttaaaacttcacctctttgaaaaggtaaatcatcttgatcctttgataaataagaaaattaaattacttacaaaaatgaataattgtgtaaatgctcacgctgccaacgaaatcgaactttcctattactttttccacccttctacacgcaggccgttttaaaggggttgtatccaaataatgaagagtgtaaaaagttaagagtttcggtagattgtcaaaagactgatccccaatgcggtaaacgatttgatcctgttgttgaactttgttaatgatgtagttgctaacttttgtatcttctctaaataataaaaatctttataagtaaacaattcttttataacaggcgcaaaatccttaaaaactaaacaaaaatttgtttcaagtttaaatatgaaaacctatttttaatattctaatgtatatacatttatattaataaagaacttttaaaatcaaaaagaatattcttgagacgtttattcatctaattctttaataaatgccgcgtggcgagacatacagtagaaattgagttcctttaattcgtaattatttttgtttacgtcgttaaattcttcaatttatttaccccgtcaatacatggcgcacatattaaaaacatactaaattgcaatggctatgagagatcatcattgacattttatcatcgtccttaaaggtacattccatactaaattaaagaaatacaaaattgaccatagacccttgccattggatctaaatatcaaacaaaacaagagagaacccgttactcagctagttgaatgggaaagagaaatttcaaaaattttctgggaaagaaataataaaacaaacacaatttttaaggtttcccaaaactgaaacacacaaaattgataaaaatttttagatttctctttcttattacttttttcacccaggtctattaaaaagaatatccttttttaatgtaagaaatttgtttatatttaaaaattacagataaatgtttaaagtacatctataaaacacgtatacatgcttaaaatggaaacaggaatttctatataaacctttatggtaagctgcgattaagaaaggctgacattaagtatttctcactatacacaatttttagtttaatttttaaaataaaaattagctaacagaaatgaaacgataagtacacaatcaaagtctgaatgtattaattttgtttacttaccttacacaaagtacataatcccctgctatcgagttactatcacggactaaaaacactccccgctcgcgttcgttcatcaaaacttcagtagcatcctgtctagacatgggaccaaagtaccagctttaagaacacattttgatgttaaaacaattgatagtttttggtttaatcttcacttgatcttaaattacctgttcctatcagaaacgtcaaatgtatccatttccgtttaaggtttatcttagacaaattacaacaaattccgtccagattaaataaatagaaattatgtgatataatgcaaatatagcatacagcctattatataccagaattcttcagtgatttcattttcgaatttctggccttaaaacatttgccttttatatgtgtatctggctgggccacacatagaaacactatcgataatgtttgatcgattatttccacttggaagttttatgccaatattgtaccgtagaaccgtaatgcggcacttgcacagggcacattcgattgaaaagaactccttcgagcaactgctctgtggtggtaaacccctttaggacgtactgtcagcttttaaaatctaaatgtaaaaccgtgatcaatgcatatcaatttgatattctaatttttaagtaaaaccgatatatttgttcttctgttcaattcaaggatatttacaggaatattaggaatacgaatatatctggttgacatgttattttgactccacaactgatcagctgtcaatcgtagaaaatccgcatatgttgctaagatcggcagctaaataagatttggagcaatccgatcaatccgctgtggagggagcccaccctgggattgctaaagattccgaattgtctgcactggtttcttaaccagtgattctacctgtcccgattagtttaccaccacaagggaacattgagtccggactcccggcacaagttggcacttcagaaatacaatctgcagggccaaaaccactcgcggtgattccacttaagaaacaaactttcgtttctcggttttcacctgatcaaaaatcatctgatgtatggtcttatatgcaagacaaaacaaaagtcgataatataaaagtaatataaaagtggaaaaatttaacttatcttacgctatggacataagatatataagattttgaagctaggatcaaaaataggaaaaaggggcccgtgggaaataaactttcctcacatggccagaccactgcaccatccgcctcttcatcttcttcaaaaaactgacaacgaatctttgtccgaatctttttcctatcaaaatgctagaggtttgcgtagcatactaatcaaattatattgtaatagccattcctttgcatgctcaagatat

SEQ ID NO: 1604 - DNA, 1120 bp, DROSOPHILA
aaggcaaatgttttaaggccagaaattcgaaaatgaaatcactgaagaattctggtatataataggctgtatgctatatttgcattatatcacataatttctatttatttaatctggacggaatttgttgtaatttgtctaagataaaccttaaacggaaatggatacatttgacgtttctgataggaacagctggtactttggtcccatgtctagacaggatgctactgaagttttgatgaacgaacgcgagcggggagtgtttttagtccgtgatagtaactcgatagcaggggattatgtactttgtgtaagagaagatacaaaagttagcaactacatcattaacaaagttcaacaacaggatcaaatcgtttaccgcattggggatcagtcttttgacaatctaccgaaactcttaactttttacactcttcattatttggatacaacccctttaaaacggcctgcgtgtagaagggtggaaaaagtaataggaaagttcgatttcgttggcagcgatcaagatgatttaccttttcaaagaggtgaagttttaacaatagttcgaaaagacgaggatcaatggtggactgcgcgtaactcctcggggaaaattggtcaaataccggttccctatatacaacagtatgacgattatatggatgaagatgctattgataaaaacgaaccttccatttcgggatctagcaatgtatttgaaagtactcttaaaaggacagatttaaatcgaaaactacctgcatacgcccgcgtaaaacagtcaagggtccctaacgcatacgataagactgcattaaaattggaaataggtgacattattaaagtcactaaaacaaacattaatgggcaatgggagggagaattaaatggaaaaaatggtcattttcccttcacgcacgttgaatttgtcgatgattgtgatttaagcaaaaactccacagaaatatgctaaataggaaggaatggaaggaatttcttttgataattttgatttttgagctaattgtatgattaataagttgtgcataccaattgttaacataatcagaaaattaaaatcttattaagtaaaataaaaataaacgggtacgaagga

SEQ ID NO: 1605 - protein, 271 aa, DROSOPHILA
MDTFDVSDRNSWYFGPMSRQDATEVLMNERERGVFLVRDSNSIAGDYVLCVREDTKVSNYIINKVQQQDQIVYRIGDQSFDNLPKLLTFYTLHYLDTTPLKRPACRRVEKVIGKFDFVGSDQDDLPFQRGEVLTIVRKDEDQWWTARNSSGKIGQIPVPYIQQYDDYMDEDAIDKNEPSISGSSNVFESTLKRTDLNRKLPAYARVKQSRVPNAYDKTALKLEIGDIIKVTKTNINGQWEGELNGKNGHFPFTHVEFVDDCDLSKNSTEIC

SEQ ID NO: 1606 - DNA, 5646 bp, DROSOPHILA
cccgactcgcgtatggcatgcacgcgcccagccacgctcagtttgacattctccagggtctcgccctccttgaggctgttctcgtacttggcaatgaagtcttccagcgagctactcacatggaacttgtgtggatagggatccgttgcgggtgaacgtttcagctcctgaacggcggcggagcgcagcttaaagtattcattcggcgagatctcctcctcctcggcggcactgctcttcttcttgccagcagtattttccgccggcgcagcggccgccttctcagccttctccttggccttttgctcggccttcaggcgacgctttagctcactgtggacgaagagaaacagttagggtattagcagacaatggagatgttgccacaaggctgttataaccacgcatggatatatatatatatatatccagcctggccaacggtgcgtattagtaacccacagtttggtctgcttgcttggctccatttgcggagcgctcacgtggaaaccggcggcaagtggctgaattccggtgtatctgcatcggggccatgacccctgcacggttctaagggcgcagcgggcgaacatggttattttaagcagcgtatttcatcagcagaactgcacacatgcaacataaataatgcgaactggaacgttgccgcttcgccctaacctacaagtggggcagctacgttgaccggatttaatgcttgcggtcaaatggatacgctttgaagcctatggcacttacttcttggacagttctccacttgcagcggccatgctgatgcggttacgttgttcgctgtttaatcccggggtctcagaagcgatggaaacccaaaagaaatgcgaatgcgaaagcgccacaaaagtaaaaaaaaaaaagtacacgaccagcgctgccagatgggcataaatcgatgcaactggctttgccgcaccagatggccagtctggcgcgagggcatttttacgccattgacatctggtcacattgcactagacccgaaatatatattttatttagcttttgcaatatccttaaattaacaattgatcaactaaagccacggccttgcgggcagtgagcacagcacagcacggcccagaactggactcaatggctggaggacgcgaaatgctccggtcggaaggcagcaaacatcagaacgccaaagtagagcaactgcagctgtaactgtaactgttaaccctgggttggtcgcgggggcggggtggcagtggtggttgtggaccaggaagaggaagagcaagggtgctgggaaagaggaagagcacatcttgaggccaggaggcaaacgagccaatggagccaccagctgcaccggtacccctacagccactggcagcatcttccgcctgcctggcggacaggagtccagtggatcccattgcagtcagactgcagcaggaggagcaggcagaaggagatgacgaggaggaggaggaggaagaggaggacgatgatgatgatcccaaagaagaggaggccttctacgaggcgcgcaacggcaacgaaagtgacgagctggaacaggccttccagagtgcccttaccctgaccaacgatgtccatgtgagtgtcagcgaagtggaggaacatgaaccgcccttggcatcgagaaatcaggaggtggcagaggtggaggagcagcagcagcagctgggggcctgcgcactgccgcagcccagcgaagcctgtaagtaacttgagactgacgagcgagttcatccactcatccacttggttctcttaaagctcttacaggctcaaaggagaccagggaaccgcgccaccaccagacgctgctttccaccaaatcttgcgagacgccggccaataatgccacgctctcgccgaccaactcctacaatggcagcattggcagcgacggcggcagcagtgtgggcggtggcgcccgccgcaagtcctggaccctgtcgccgcaaagcggtggctccacgcccctgagcggagccaagaagaagaccaagacgggtgcgccaaccacaacactgtccaatgctaatggcgacggttttaatctgtgggtggcacgtgagtgcttcgaaacagtgcccgctgaaatggtggatactctgagcatggctgaagtggacgaggaggtggatgaggaggaggacgaggaggcggctgccgtggagagtcttctgggagccgctgctgccctccaggccagtgcccatgtgcagcgccgtcagcagcagcagcatcaccagcatcttcgccagccctcgccaccacagcatcgtccgctggaacgatcttggccgccgcgtgccgttggtcgggatctgaagcttcagggcgatgtctttcagttcgacatcctggacacggacgagcgactggccgaggagatggcacagggcagtgggagttcgaataattcacccctggccacgccgcctgtgcgctttaagccgctgctgaagaaaaagattggacccgatagctacatcaacacaattagcacacaaaaggtgccggtccaccagagctatgagttccccacctttccaagttcctcggcagttggatcgtcatcttcgtcgccgaatagtctgcaatttccgtatctgcgccagcaccgtccgctcacccgtgccctttccaatggcaaggccagttcatcggaggagcaagcctccccacgccttctgctctcaccaaaacgtccgcgaagtcctccttccggttgttccacgcgcagtgcctctccattggatatcagcctgagtccagagcagcactcgcccaccagaggcagaggagtgggtggtgctctgcaggatgcggtgccgcccggaactccaacattccatggtcagcgaccgcagcagcggctgctcaaacgtgtaggcggtggagcaggagctggtgctacgggaggcgcaaccggctcgccattggtatgtccaccaacgcctactcaccatgcccgtcggcatgcccgcctccaagccgtcactgccaattccagcctcgccagcggaggagcgatcccctcggatccgccagccgtctctagtcaattggattacatatatctgcaagatggtggccaggagcagggtcaggagcagtcagacgaagttgtgcacataagcagcacccgcctgccctccattccagaacgcagtgcagccgcagcagcggcggcggcggcagcagcagctggagccgctctcatggaacccggaacgggtacggtatccgggtctagtggagctggagccgctggagagccaccattgccgcctgcttgggaggcgcgtatggacagccacggacgcatcttctacatcgatcacacaacgcgaacaacctcatggcaacgaccaggagcggcgccaagtggaggaccagcaggcagagagcaacatcatcgccagcagctggataggcggtatcaaagcatccgacgcaccattaccaatgagagtagagctgcgcagctttacaacctgccaacctcggcgaatagtaatgccaattccacagctccagctgctcctccgcccgccacggctatacatccagccatcctgatgctctgccgcccggatttctactccctactgcacaccaacgaagctgcactggccatctacaatcgcaatgccgcactaaagcacatggtcatgcgcatccgacgcgatccgccgtgcttccagcggtatcagtacaacaaggatctggtggcgctggttaacacattcgcccagatgagcagggaactgccctcgtgctgggagaccaagctggatcaatcgggcaagcagttctttattgatcaccagcatcgtcgcacctcattcatggatcctcgtctgccggtggagtgtcctcgtgtggtacgccatcgccagcagcattcgcagcaacagtccagtgtgggctactactatccggatctggtggatggcaactgcctgtccgccaccagtgggcatattaacgccagtccagcatcatcggtctccggtgtaccgcccttacctccaccgagaccctcatcgtcgtcctcctcgtccagaagtagccatggacatggccacaactgcaacacaacgtcagccatctcctgtgccctcaacgccgaccgttcggcgtatggtgccgctggaatggccagcgctggagccactgcagccgggtacgaagatgtgcccatcgcctacaacgaaaaggtgcgtttcgcgtttcgctcgtttaacaaatgtaaaatcttgaactttccattgattacacatatttcttttcaggtcattgccttcctgcgccagccgaacatcctggagatcctgcgagagcgccagggccagcacacaatgtcccgccagttgcgtgagaaaatcaatatactgcgagtggagggtgttcccgcactcgaaagattgggccatgacctacaactgaccattttgctgaggtgagtgatctgattgcaatagaaactactagatcacttaacatgactatggatcgtagcggagattatagatagattgatatcgtctatatccaattcttgttcttttgctaagtcgaattatactcgaattattccgccagccagacagttggaggtaaaccctcggaactggcgtggtgctaatgaacccactgccatatagtcccgctcacatgacgcaccgttggccgtcaggcaatggctccacctgcacttgacgaaggtcccacaccaggctaggccgtatccatctggcctgaaattgcattgctgcgtcattttcttggctcgaatcagttttcggttttgatttgtagctgctggctgattcggttagcttcaatcgattttggcggcggtcctggttgagtgcaccgcatatgagtgctgctagtgggtttaattgtttttgaaaaccgtatcgaaggtcgctggctaattttccaaaacgccaaacgcgcgtccaacaatgcaagcggactaagccaactaccaacggcaaggcaaggctagcactttgccatcgtcttggcttttaatcccattgcttattgtctaattgaccgtgtttatgcgagaaataacacaacgaaatcaatgtacatttaccacaaaaattgaggaactgcagcacgtcaattcgcaatgtaagttgcgctgaccttaatcttaatcccaatctcggcggcaacaaaatggaaatcgatgttgagagattaagtcgccgcccctcattctcccaaactgtcgattactactccaccgttgctggctggccaccaaccattctgattcccattccgattgagccatttaattgcatttcaattagccaaattgtcgcgcttcattggcaaacgagtggtgggagtttttactatgcaatcgtatttattcgagtgcgaatactttgtacatctggttgttaaagttgtggtaatcataataaatttggaagaatcctgcgaaaatttgacgcaagattccatttaatatctttaaatattgctgaaaatcaagacgcttcctaaaaatttataatttgattgtatatattttcccctaaatgaaatccacttaaaaacaagcaagttcaatagaactttaggcaatga

SEQ ID NO: 1607 - DNA, 3005 bp, DROSOPHILA
tcacattgcactagacccgaaatatatattttatttagcttttgcaatatccttaaattaacaattgatcaactaaagccacggccttgcgggcagtgagcacagcacagcacggcccagaactggactcaatggctggaggacgcgaaatgctccggtcggaaggcagcaaacatcagaacgccaaagtagagcaactgcagctgtaactgtaactgttaaccctgggttggtcgcgggggcggggtggcagtggtggttgtggaccaggaagaggaagagcaagggtgctgggaaagaggaagagcacatcttgaggccaggaggcaaacgagccaatggagccaccagctgcaccggtacccctacagccactggcagcatcttccgcctgcctggcggacaggagtccagtggatcccattgcagtcagactgcagcaggaggagcaggcagaaggagatgacgaggaggaggaggaggaagaggaggacgatgatgatgatcccaaagaagaggaggccttctacgaggcgcgcaacggcaacgaaagtgacgagctggaacaggccttccagagtgcccttaccctgaccaacgatgtccatgtgagtgtcagcgaagtggaggaacatgaaccgcccttggcatcgagaaatcaggaggtggcagaggtggaggagcagcagcagcagctgggggcctgcgcactgccggaaccgcgccaccaccagacgctgctttccaccaaatcttgcgagacgccggccaataatgccacgctctcgccgaccaactcctacaatggcagcattggcagcgacggcggcagcagtgtgggcggtggcgcccgccgcaagtcctggaccctgtcgccgcaaagcggtggctccacgcccctgagcggagccaagaagaagaccaagacgggtgcgccaaccacaacactgtccaatgctaatggcgacggttttaatctgtgggtggcacgtgagtgcttcgaaacagtgcccgctgaaatggccagtgcccatgtgcagcgccgtcagcagcagcagcatcaccagcatcttcgccagccctcgccaccacagcatcgtccgctggaacgatcttggccgccgcgtgccgttggtcgggatctgaagcttcagggcgatgtctttcagttcgacatcctggacacggacgagcgactggccgaggagatggcacagggcagtgggagttcgaataattcacccctggccacgccgcctgtgcgctttaagccgctgctgaagaaaaagattggacccgatagctacatcaacacaattagcacacaaaaggtgccggtccaccagagctatgagttccccacctttccaagttcctcggcagttggatcgtcatcttcgtcgccgaatagtctgcaatttccgtatctgcgccagcaccgtccgctcacccgtgccctttccaatggcaaggccagttcatcggaggagcaagcctccccacgccttctgctctcaccaaaacgtccgcgaagtcctccttccggttgttccacgcgcagtgcctctccattggatatcagcctgagtccagagcagcactcgcccaccagaggcagaggagtgggtggtgctctgcaggatgcggtgccgcccggaactccaacattccatggtcagcgaccgcagcagcggctgctcaaacgtgtaggcggtggagcaggagctggtgctacgggaggcgcaaccggctcgccattggcgcgtatggacagccacggacgcatcttctacatcgatcacacaacgcgaacaacctcatggcaacgaccaggagcggcgccaagtggaggaccagcaggcagagagcaacatcatcgccagcagctggataggcggtatcaaagcatccgacgcaccattaccaatgagagtagagctgcgcagctttacaacctgccaacctcggcgaatagtaatgccaattccacagctccagctgctcctccgcccgccacggctatacatccagccatcctgatgctctgccgcccggatttctactccctactgcacaccaacgaagctgcactggccatctacaatcgcaatgccgcactaaagcacatggtcatgcgcatccgacgcgatccgccgtgcttccagcggtatcagtacaacaaggatctggtggcgctggttaacacattcgcccagatgagcagggaactgccctcgtgctgggagaccaagctggatcaatcgggcaagcagttctttattgatcaccagcatcgtcgcacctcattcatggatcctcgtctgccggtggagtgtcctcgtgtggtacgccatcgccagcagcattcgcagcaacagtccagtgtgggctactactatccggatctggtggatggcaactgcctgtccgccaccagtgggcatattaacgccagtccagcatcatcggtctccggtgtaccgcccttacctccaccgagaccctcatcgtcgtcctcctcgtccagaagtagccatggacatggccacaactgcaacacaacgtcagccatctcctgtgccctcaacgccgaccgttcggcgtatggtgccgctggaatggccagcgctggagccactgcagccgggtacgaagatgtgcccatcgcctacaacgaaaaggtcattgccttcctgcgccagccgaacatcctggagatcctgcgagagcgccagggccagcacacaatgtcccgccagttgcgtgagaaaatcaatatactgcgagtggagggtgttcccgcactcgaaagattgggccatgacctacaactgaccattttgctgaggtgagtgatctgattgcaatagaaactactagatcacttaacatgactatggatcgtagcggagattatagatagattgatatcgtctatatccaattcttgttcttttgctaagtcgaattatactcgaattattccgccagccagacagttggag

SEQ ID NO: 1608 - protein, 837 aa, DROSOPHILA
MEPPAAPVPLQPLAASSACLADRSPVDPIAVRLQQEEQAEGDDEEEEEEEEDDDDDPKEEEAFYEARNGNESDELEQAFQSALTLTNDVHVSVSEVEEHEPPLASRNQEVAEVEEQQQQLGACALPEPRHHQTLLSTKSCETPANNATLSPTNSYNGSIGSDGGSSVGGGARRKSWTLSPQSGGSTPLSGAKKKTKTGAPTTTLSNANGDGFNLWVARECFETVPAEMASAHVQRRQQQQHHQHLRQPSPPQHRPLERSWPPRAVGRDLKLQGDVFQFDILDTDERLAEEMAQGSGSSNNSPLATPPVRFKPLLKKKIGPDSYINTISTQKVPVHQSYEFPTFPSSSAVGSSSSSPNSLQFPYLRQHRPLTRALSNGKASSSEEQASPRLLLSPKRPRSPPSGCSTRSASPLDISLSPEQHSPTRGRGVGGALQDAVPPGTPTFHGQRPQQRLLKRVGGGAGAGATGGATGSPLARMDSHGRIFYIDHTTRTTSWQRPGAAPSGGPAGREQHHRQQLDRRYQSIRRTITNESRAAQLYNLPTSANSNANSTAPAAPPPATAIHPAILMLCRPDFYSLLHTNEAALAIYNRNAALKHMVMRIRRDPPCFQRYQYNKDLVALVNTFAQMSRELPSCWETKLDQSGKQFFIDHQHRRTSFMDPRLPVECPRVVRHRQQHSQQQSSVGYYYPDLVDGNCLSATSGHINASPASSVSGVPPLPPPRPSSSSSSSRSSHGHGHNCNTTSAISCALNADRSAYGAAGMASAGATAAGYEDVPIAYNEKVIAFLRQPNILEILRERQGQHTMSRQLREKINILRVEGVPALERLGHDLQLTILLR

SEQ ID NO: 1609 - DNA, 2955 bp, DROSOPHILA
ctgacattgcgcgtcaggaggcagccaactacagacagcaatttgagcaggctatcccgcttaaacacctgtgccaccgagtcgccggctacgttcacgcctacactctgtacagtgccgtccgccccttcggactttccatcattctcgcctcctgggacgaagtagaggggccacagctctacaagatcgagccgtccggctcctccttcggttacttcgcctgcgccagcggcaaggccaagcagctggccaagactgagatggagaagctcaagatggatatgaggaccgacgaattggtggagagcgctggtgaaatgtacgtttacagcaaaaaaaagggactgtttcaaaaatcgggcgggctttatcctagttccgagtggaaacttacttgctctgacaataggaagcatttttgggacatctattgcacttagaatctaggtttttattcataattaacatatctatcctatgtcttagcatctacaaagtccatgacgagttgaaggacaaggacttccgcttcgaaatgggtttggtgggcagggtaaccggtggcctacatctcataaatccctcagaactgacggagaaggcgaggaaagccggcgatgcggccaacaaggacgaagacagcgacaatgagacgcactagttcgtttgtgtgccagtgaatctaattctgggcctcatacataatgttaattttatatttccctaaagcgcaaaatgaataaacaaaatcgggtgaaatttaaggtttttatatttttatactctcattctttaatagttatcgttcgatataaatatattggctcgctggttatcggatctggttccttttgaatgtgcctgcagctattaaacctcgattgctacaaagaaaaaccttatcgctcacagctgatgcatttcgcgccatttgttgtactttattttggttttaacgacgcacgactggaatttcagtctattgttaataactacaatgactaccttaatagaacagttaattacgaaaatgggcctaagggaggagccaaacgtgctagagtaagcgataaataaatagttttaaaggtttacccagtaagatcgaatcctttcaggaaaaccaccgaactagtacgcctcctggaactgcgctccacgaatgtccctctgcagatcaacgagtacggaaagatagtgctgtgtgcggatctcgcttcctgcatgattgggatcgctttcgacaaggagcaggcactgaaattgtcaggattgcgaaagagccaatacctcaacaacaagcggatgttcgagaagctactggacctaaacaaactggctagcgtgaatgacatctgtgtccagctgggtctcaacgaagttgcccgcaaggcggaagagctaatgactctcttcaagggcgtagcggccaccgaggacatgggtaccgacaccagccatcctcagtacgccaccatggccgtgttccaggcctgccgcctgctcaaaaagaaggtttcgaaatcaaagctcatgcccttcagtaatttgcgaccctcccagtttcaactgctcgagcagcagtgggaacgcatgatagctaagcaccacaaggagagcaaagtaccatctagcaccgatatggagggtaaacttaaggagaaccagaatgagaatatcaagggtcatgaggcaaaaaaggcacataagcccccaccggaggactacgaaatatggaaggcgcgaatgttggccaaggcgcaggccaaattgaaggaattagaagcatcccaatcgcatatggatagccagcttctcgaggcttaggcatttatattttacatctttaaacatttcctagtgaaatccagtttgaattaattacttattatataacttatttattaaactgaacattcttattagttttaagtaaaacaaagagcgcattacaattaaaatttgcatcaattttcagagatattaatatgcccaagggacaactgaaacaactggtgtttgtgtggctaactggcgatgtgtttcgcgataaaatggttagggctgaaaacaggataacatcaatatcataaggaatcattatcatcaatcaatcattaataatcattatcatctatgaatcatttatataccatctcggcccactcacctttatagtcttttgtttgtgtttaatcacaaacaattttatgaatctatgaaactagaataatttggtattactacaatatatagatatatattattaaaaaacgtaatctttggaatcgtttttgatttcaagtcttagttggaaatttcgtcaatagttttggttttgttttgcatatgagctacaagcaattcgccaacatccaccaggttgcccttgctatcatgggctaaaaagaaaatagttatactctagtctacgaacatttcgttttcaagtagtttacaaaaccgttagaagagttgtcaacctacagttatagatgatgagctctacaaggtctcgagtctccggccaagtagtaataagttctttcaggtgcttgtagaacttgatccagatctctcgctttagttcctgcatctgccaggtacccgacaagttagagtacgtcgcatcgaagaaggatatcatgggcgtggcaccctcgacggcaaagtaataggtcctgccattgacctttttgttcattctgtagacatcgtgcttgaaaggacgatagacaccggctcggttgatgaactgggtctccaggggctagaaaacaaaatgctgtatttattgagcaaactttgttagcaattaccagttacctcagctttgtcaagtaagtggctttctagtacgccgttgacaaacatctcatcgggaatgaggataaccagtcgtttaatgccgaaggtaacattattcttgtcctgcgaaatacatttatgttg

SEQ ID NO: 1610 - DNA, 899 bp, DROSOPHILA
atgactaccttaatagaacagttaattacgaaaatgggcctaagggaggagccaaacgtgctagagaaaaccaccgaactagtacgcctcctggaactgcgctccacgaatgtccctctgcagatcaacgagtacggaaagatagtgctgtgtgcggatctcgcttcctgcatgattgggatcgctttcgacaaggagcaggcactgaaattgtcaggattgcgaaagagccaatacctcaacaacaagcggatgttcgagaagctactggacctaaacaaactggctagcgtgaatgacatctgtgtccagctgggtctcaacgaagttgcccgcaaggcggaagagctaatgactctcttcaagggcgtagcggccaccgaggacatgggtaccgacaccagccatcctcagtacgccaccatggccgtgttccaggcctgccgcctgctcaaaaagaaggtttcgaaatcaaagctcatgcccttcagtaatttgcgaccctcccagtttcaactgctcgagcagcagtgggaacgcatgatagctaagcaccacaaggagagcaaagtaccatctagcaccgatatggagggtaaacttaaggagaaccagaatgagaatatcaagggtcatgaggcaaaaaaggcacataagcccccaccggaggactacgaaatatggaaggcgcgaatgttggccaaggcgcaggccaaattgaaggaattagaagcatcccaatcgcatatggatagccagcttctcgaggcttaggcatttatattttacatctttaaacatttcctagtgaaatccagtttgaattaattacttattatataacttatttattaaactgaacattcttattagttttaagtaaaacaaagagcgcatta

SEQ ID NO: 1611 - protein, 257 aa, DROSOPHILA
MTTLIEQLITKMGLREEPNVLEKTTELVRLLELRSTNVPLQINEYGKIVLCADLASCMIGIAFDKEQALKLSGLRKSQYLNNKRMFEKLLDLNKLASVNDICVQLGLNEVARKAEELMTLFKGVAATEDMGTDTSHPQYATMAVFQACRLLKKKVSKSKLMPFSNLRPSQFQLLEQQWERMIAKHHKESKVPSSTDMEGKLKENQNENIKGHEAKKAHKPPPEDYEIWKARMLAKAQAKLKELEASQSHMDSQLLEA

SEQ ID NO: 1612 - DNA, 13327 bp, DROSOPHILA
tgtggcaaacattccccaacaatgtgtatcaaatatcatttcaaatatatatacagccaacatcccaacttcgactccatcttttggtatttacaattcccagacggcgagttaagcagctcgatttcggactgaaagtccgaggtcagcagaatgtttaacataaattcaaaacgaattgtgctcggagttgcgagcaaactggcagttacaccgagttctcactcccggaatcccagtgtgctcacacttgccagccattaagtttattacgcaacaacaataaagcaggccaatatgcatgcgaagggaaatgccgtgtgcaggatgtggatgtgtacgaggatgtggatgccccaaagggatccttcgaccaggcagaaataccataaataaaacatggcagcgggtcgaacaaacaacaaaaggcaaaagtcagtgtctgctggtcagttggcgaaaaagcaaaaaacggagtagcacatgagacacactgcagacaatcgaggaggagcatcagctgccatcagggttgggcggtaaacagggggcgtggcagatgcctttgcggttaacaatagcacaccccacggccatagtttgggtgctttttgcggttcctgcagctgcggcggccaccttttttcggggtgattccgtattcgattgccagatctccccggagaataaactcaatttattattgccactaggcgacgggacagacggggcgagaaaaagggaattggcattttaaagctttaacaaattaaattaaaccaacagcaaagcagcaaaaattgttgattgcccgactttggccgccttcgatttgccataaattgtttggtcgagaggaagaacgggccattttgctatttccacatttattttatcgccggcaaaggcacacaaaaaaggcagcaattttccaattgaataattgtcactggcaagttttcacttttgtcggcggaggacttagccaactggatggaaaatgggcgcaggacgaaagggaaaaggaaacgagggccgtgtctgtggccattcaatggctcaacagtttgccagtgtttccagtgtttgcctttgcctctctgcttctctgcctctcagccttttctgcttttatccctcctgtttatccccaggactctgctctgttttaacagcaattttcttgtctattttcaggatgatttgcccggccaggctctgctggatgtcgtcttcgccaggctcaatttaatcgagacctcatacttcggcatacgttatatagacgaggagaatcagacggtaagtgtgtagagcaaaaacgatcaaaatcgaaaaaagtgaaggagaccgcttccgctgggcacacatattggttttggaaattcattttcgttttcattgaaattcattcaggcgcgatgaaaaatgaaaacaaagagcccagcagccagactatggcaactctttgagagtcctttggctgcggggcaagttagatattttcgctttcgctggtcctgctggctgcgttgtccttcatttacctttacacataccatacacgttgctcatacgccacgtggttagcccttagatttatccctcatttgaatattcccacagcactggctcgatcctgcgtcgcgtatttctcgccaactcaagcccaagtcggatccttatgacttgtatttcggtgtgaagttctatgctgccgatccctgcaagctgctggaggaaataaccaggtgagcaaccaaaatcctatataatccgtagtccttcacaataaactagaccgcaaacatttatgggtattcgaaatcgaagtgagattcgtgtgagttctggtggcatttaaagaatatccttttgttcgcacaggcattaacaatttaagcatttaatttgtgccatcccatctttggtctgccataaattcggtaaattgaatttggcaaatttaatttgttaattgaggcacacagacgcataattataatgcaataaacaacaaatgaagcgaattgagatgcacgagctgaaagctgtgaactcgctctgcccactcaactaatggataatgcatcgagcaattaatgcatttatgcgcgcacatcaagcgaaataaattaaaataacgccagtggaaaaggccagcaggccgaagggaaaatgccaaatgtcgtcgcgaatggcgagcgaagtgggcggaaaaactgtggaaatgtgaccgtggccatggttttcatcgccacatcatcggtgttcggtcgtcctggggacctggtgtcctggtgtctggttatcctgggggcgattgctgcatttatcaagcatttggtgtgtgcaaatatttgctctccatacgacgacacgttggccataatcattcgccgagcgacggcaaaaccattggccaaacatcatcaaaatcctggccaactgccgctgaatccactgctaatattagcgcatataaatgcatcgaaatgcacttctgtccaagtggaaaggggcacggggcgtggcaatgcaattgccgttgcattattggaagtgcactagggccaaagaatatcgtgttattttagctatacaaagtctgcgccgcacaataaacggcaattgactttggtcaggacaaagttgaaaattccgagcgacgaggggatttccaggcagactgagccacgtcagacaggagaggattaaggcaaacaggcagcttgaagctcaaactttgcttgattttagcaaataattgtgaaatatgatgccggcctatgccgtctgccgtttaccagtatttgtttcgtttcatgatttccatgttacgcccaaagtcaacaagtcggccgaatgtttgttttcgacaagcattccaggggggggtggggatcaactaattttatgcccagatttctgtttgcccacttgttaactgcttctggttcttgttttcggctttttgtgctgccatgttggctaatgaaatttgtcatttgcaggtatcaacttttcctgcaagtcaaacaggatgttttgcagggacgactgcctgtggcctttgagctggccgccgagctgggagcctttgtggtgcaatgtaagtaaaggaaaggaacaccaagtgagtcacaggtgtcatacaatccccttgcaaatacgaatcgattttcagcttatatccttagacttgtgcttatatttaccaagaaccaccctcaacccttcattttttttaaagaaatttattagcatacaagaatgcacccgtttttaaagtttgctttcatccaataatcagagatacatacatgtttgctcccccagccgaacttggtgactatgatcagcggcgccactcgaagggctacgtgtccgagttccggctgcttcctaaccaaagcaacgagctggaaacccgcgtctccgaactccaccagcagctgaagggaatgtcgccctccagtgcggagctcaactatctggacaaagtcaaatggcacgatatgtacggcgtggatttgcatcccgttctggtgagtaatgtgctgatgctgctcatgtgtcaagccaaatcgggtgaactgccgaggaatgagggtgggatataggacccatggatacttctcgcatgtgacccgacccgaagttctgaaaccgcagatggttcaccaggcagacggtcttcgacgttcaaccagccgcattaaaggggtcagagggaaatgcaaagtttaatttcatttcagggcaaatattataaatcatttgctcacatttctgtgggggtccccaatcgggaaggggtggtaatcatttacccccgaaaaagcgagtctcgtgtgtctacgcttttgtgctgcgtaagttggcacttcatttgcattttttattgccctttactttgatatcaaacctcaataaatcaccagctgtgtttgtatacatgcgtggagttgggaataaccccgaacccttgtatcatactccatgtggcatggtatgctatgtgccataataaagcctatatccacccccatctcactcagtcgtcggccttgtgtttgtttatagacacaaatcattgactatcgcggcgccagaccgccgtcttttatatgctttgccgctctctcctttctttttaatttaattaacagccgaaattacatttatttcggctttttttcttggcggcgttataagaacgaggtatccataaaaatgccgcctgctgctaatgggcgaaaactttcttcttgttaacacattttttggcaatggccgaaaggaaacttttgcgcccgcctttgtttgcgaaagtttctcagcttctcattttctctactttttgcctacactttccccttttcccacagggcgaggacagcgtggagtacttcctggggctgactccgagcgggattgtcgtgctgcgcaacaagacgacggtggctcattactattggccgcgcattgccaaagtttattataaaggacgctattttatgctcaggataagcgataaaaatgtaaattctcaaacgcacccaacgcgacaatgggaactggaactggaaaactgtaaactgttagctggaaacccgaaacgacaatggccactgtgacgatgtggatgaggatccccatttcgtagcccatcccagccataaatttgtttgccgacaagtgctttttacaatttgcagttcgttccgcgagtgaatggtcgaaagttggcactaaagggtagtagacctatgacaaagtcgagtagaaagtatctgacagttgagagagttctaggcgtgctaaatagatgacgtgaaagaaatgtagaaaattcaataccaattcactttacttgatccttagtcattttcaaggatttatacgagtaagtcatgatatcctcgaagttgagtactttagtgtagtaaacacagatcgttctttaaaacttacagggtatcctatagtccatagctccctttgagtgctttcaatttcttattcccgttttgcagtgtcgccaatttttctgtgtgctccttatggcgacaacttttgcctgtcagcggcatcaagtggcgccaggagccagaagcgtaggaggactcgttagacaacaagtagctagtagctggtagatggaagatggtagctttggtagtagatagcagatagaggacgccaaatggctggagctgccgaaagttgcacactttcgggtgttaacgctttgataatcaaaaaagtttcccagccagttgacgcgcacaaaaggcggaacttaagcattttccttcgccttgatttttcccttttcctacccagcttttttttttttttcggccagtactttacagtttggaatgggagggggcgagcccgacaggggcactcattcagtcactccgcctctttgtcggcatgtcgagtcccagttgagtttccagttcccatcgtgactcgactcttgcgcttatcacacctttgcgattcgattctgttcctgtttcccgcagaacgagctgagcacctacggattcgagacgcctcgcaagtcggcctgcaagcacctatggcgctgctgcgtggaacaccatgccttcttcaggcaggtgcgagtggcccctctgcccagttcgcaatcgcatgccgccgatttgttccaactgggatcgcgcttcaggcacaggtgagtaaccagccagctggccagaaatagtggagtgccgggccgcactgggaactctccaggaagttcctgtgggtgcagtcgtgtgtgctccgcccatcagatggagtcgttaaaccaaaaaaaaaaaaaaccctgcttctccgttgcctaatttattggccaaacccaaaagcgcagccaattaagacgtaacgaatttcaatggcccagacactcgagttcaatccctggcctcaaagtgcacctcatgtgattagctcattaaggggcagctcgagtggagaaattgggctggactcgaagcgaacaagtgaactcgcttttgagagaatagatgactagatgcgccattccaaagggctaaatttcctataaaaatgttcggggatataggacatgcctgaatttactagcagtgtaaaagcaaggcacttaaatacctttttgttttgtttattttattaaaacatcttataaattcaatgtaatgtttgtattagacgaaattaatggtaatcaagttcagactaaatggaggcccactccagtttcaaaaaaacaacgccaatatgcaccaagttcgcatgtcagctcctcgagtttcccgccgaaccaattagagctcatctctggcccaagtcaaagtcaaatccaaacagaagcagcatccagatgcagcgcaatccgaccagtgttcatagatcaagtttacgccatcgcctgcatggtcaactaattggaagtccaataaaaatgtcggatctgcaggggtactgcagatggggatgcggatgaggatgaggttgaggctggggattcggattaggaagccttcggggcagtcagccaaaaagcaactcgagtgcaaagcccactaatgactttctgcgaaaaggcggctctaagctgctgcctcaccaaatgcaggcaattgtgcatgacgaatgtggcaggaaatcgagggaatccaggggaatcgacgggattcaggggaactctggggcttcaggtccttcatgtttatgactggacatttgcggtgactgcggctgaccatttagttgctgcggtaaactttcttgctcccggacacaaaatggagttcacgtggccaaccgtaactcagtgaaactattaacttggctggcagggcatttctagtggccgaaaacaaagttttttttaggggcgtcggctcagtttatgactgccccaagaagagaacgtttttaatttgagaaacaaatgaaagtttccgagtttccttggtttttattttatttggctgtctgtgctttacaacctttttatggttcactgttcattattagcgtcttctatgatccgtactctcgttttccttttttgtttttcacattttcccattttggttgttaatatttttggacgcctttatgcctacttttatgttgcccaacaccaccaccgcatgtctgccaaccccccgaacccatcgaaccacacccaaaagtcgcccggacaagcaaacggagaaggatgcactttccgccggacgatcgccgcctgccttcacccgtactccctcgaagcgccagccgcgccgcgtgattgatgacttttttaacagcaacggcaacggcaacggcaatggaaatggaaatggcaatggccatggccatggaggaagtggagcgggaacattaggaggcggcagccacatgggcaacaggccgctgccacagcccggaatgggcaccatctccaagtgagtactccagaatgcccatcatttgttttcattccgagcacaaaagttttgatttacccgaccgcccatgtgtagtaccctcgcgtttcgtattttacccatttatgtgcggcagctgcttcctttgacgtagttgtccttttttccggccaagtccttttttggccgccaagtccttttttgctttttagtaatcatttttgggagctggcgcgccggaagagctctcatgtggctcgttggagaggactcgcctttgatctctttttaattttcaaacatatatttttcggtatggctattgctatttcgaatcgccgggttcaatttgaaaggaatgcagccggagcacttcatcattccccgccttttccgcctgcgtttgcgtttgacaggacaaacaggatacatagatagaagctccttggcattgtcccggctcaagtgccctctggcactgtgggttctgtttcgaattcgtgttcaaaatccatttagttgccatttcgaaggcagttacattgtctagacgcagcatttattaaatgttttatggatgtgagcgcatcaaattatatggacaaataaaaatcatagaagtttcgggggaaattgagtcatgccaggcgatttatagtcagtgagtgagggagtgagtgtatactagtattccgttgtggagactaatcgaaagcgatcctcccaagaagcacttgaattggaaaattaccagccagcatttccagctgtccagtgtaagtgtttgcccaccatccgtgcataaattacacgctcaggtgaggctctaaataaggtaatagaagccaatcgtaatcgctggatgccttctcctgcaagacccgggatgagcaaatagcccgcgtcatttatcatttgcaaacaaagagaagcccaaacatcaggccaatcaggcagccgatccccgccacaccacaccacgccacatcagactatccagatcccagatcccagatgccagatcacaaatcacagatcgctgcatgccagggagcataaatcaccgggcacgttctggcttttctgggatcctcctcagtggaactgagtcgaaccgaactggactgaagcgacgactcctgggagtacaaaatgattgcccgctgattgccagtgcggcaattactcaattttgcacacgcgcattatttgtctgtgtcgatctcgtggtggctcagttgcctccccagatcgaattggacagcctaaatggccttccatgccgcggactttaatcaacgtttatgttaaacaatttaaatttatggcaaaataatgcgagatcgcgatgactgatcccccgcctttaatctctactcccttccctgaacagcaactacgacagcccctatcgctccacctacagcatacccaccagcttgggcatcagaccttgccatcagcagcagaacaacaactccagcagctacaacaacaacagtgggggcaacctgcaaacgcctgactcgcccaggagcacccggagtgctccctggcccagatcgcagcagagatccctcttcgggcacaatccatcgagtccgcgatccgtgagatccgcgagtacggcaggcggtgggctgcaccatcatcacagccaccacagccacggtcacggtaccagccaccatccgcaccaccaatcctcgtcagcgggggccacctcctcgacctcgcatcaccaccgtcagcagcgggccagctcctcatccgcctcccatcagcagcagagataccgctccagttctgtggagagccactcctctaacgactcgaggtccacgcgcaagtaagtcttagtaatattacgaattatttttacttcggacccgagtttgacctttccaagggcatcaggactgaatcctaggatgaagttagataaatgcgacgcgtgcgaattttatcgagctagatgcattaaggtcgtcaacacttaattaactttagaaggttaagtatgttaagatagagtccagtttatgtgacattttaagaccaattaagcattatcgacgtggacatcctcaggcatgcgcctagtttgagtggttggatgaactgattaaatttgtctatttatcttatctgcaaagatctgaatttcgcaagggaatttgaatttcccaatttttatgcgtatcaactttggtattttcacgtatctaatcaaggaactcttcggaatttgcaaatcattataattcaaggcataagcaccgtcatcgacgcacctcagataatgaaagcgagctttccagaggatcaggtcggtccggaagatcaggacgttcgcatcatcgcaagcaccgccgttcgcaccggcatcgaagggactcagccggaggatccgatcatgacagcacacgaggacgcagctactctggtcatcgcagctcttcgatgagaagtggaagtaccgagctcatagactccacatcgcaatggagggaagtgcaacgacgccaggcggaggccagtttggggcagagttccgtgcaacaggcagcggtttccaagagcagcatggtggccaggagtctccacagcaacgacagtcactcggacacccattcgcaccacaaatccaggaggcaccgcaaaaacaagtgagtacaaccaaaaaaaaggagccagtatcctttatttgcgatggatctcaatatatgtaaatttttaaacaaaaatagatccccatcggaatcacgaagccgcatgtggaacagtgagctggcgaagcacctacaattcgatctggtggacacggagggcatgtcggagcagcagttacgggaaattccctacacggtggtagagaccacttcgaagaggtccaactctaacctaaagatccacaagagcaacagcaagagcagtgtgggagcgaagagtacgggctctggtaacaccattacgaatggtagtggatctggaaatgcgggtcaggccaggaatcgcgtcgatcgcatcagggggtaagtactagttaaccaaccaatcactaaattactaataggaaagggaacgatttttagttcttgttctgattatttatcagctctcacttaactcatgtacataattgtagactttactatcaaagcacgcatccacacgaggccaacggaggtcctggagctggaggacatgcgccgaagaatggatccatccgctcggccagcactatatcttcaagggagtgtgaacggaataatggtctagttaggtgagtagaggaggagatgtcttcacaaattttggaatatgaatgtggatttccgaacttcagaatgatgtccagcatgagcatgggtgactttatctcgcccactggctccaatctgagtcctttggaaaactcagctctgcgggtgtcccacgagcatactgactctggactgggagccgatcaggattatgcatactcatcggaaaggtaagatcatttcatatttaccttaatttgtattaagtattttaaaagttatttcagtttaactaacctgcttactcttttaacataaacctccttaaaacttccagatccagcgacagcactcgctatggcaccaacaaatcctctggcgcctcgagcggatcgcaccggaagtcggggggcagtgccggcgggaactacaacaacttgatgcagcagaccgtgagtaaccagcaacagcagcagcgctcgctgttcgcgcagcagcagcggcagcagaagagcacctacaaatacgccacctcctcgccatcgtccactaacccagggagctcctcgggactggcgcccgtccacaacccgggctcgagttccaatcccagctccagtcaaaaccccaacagcgctactaactctaatcaacagtcgccggctaatcgcctgctccactacacgacctttgagaacaaccagtacaagttcagtctgaacaatgcgctggccaagagctccaagggcgtggtgagtggaggaggcagcattagcaatctggccggcaacatggtaacatctggtggtgtcggtggtccaggctctcaaggtggtggtggtgctttcagccggcagcgcagcttcgtggagtggcccagcaatccggcgtcgccctactattaccaaggtccttccacgcacgtggcgcaggtgaagcgccgggatgccaagtcagatattggggtgcccaccaggcggctctccggacagagtttgaccaaaacgcaacttctgacgggcggcggtaactcgcagttagccaatgcgggctgttatccgttgcactatgcgagcagcaatgttgcgggcgcgggctacaatcgtcccttaggtcaaagatcaggtggcaacggctcctccgccagtggctttggcctccagccagccaaatcggacctcttcttgtcctacatccacggcggggagtacgaaagaccctacatatacaactacaagatgccgcagatgccgggtggagccggggcaggagcaggagcaggagctggaacgggagcagtgggctccccaaaacaacagaccaccgcttaccacatttctgggtcgcagaccgcagatccgccgccaccccctcctccactgtacggcggcacggcgcccgccaacgacgtcatgtactatcagttcgacaaaggagccgccgtcgctgccggacctccttccacgtcgtcgtcctcgtcgccgcccattgtccagcagccgcggcaaacgggcggtccattagtgtatctgcaacatggccagaatccatctgtgcccgaggtgcagcagtcaactgtgagtacgaagtgcaaacctgtcgcatgtcgatgttgaatgttgatgttgatgttgatgttgatgtggatacgtccacctgcccctcctcctcatcttcagtttgtgcaacttgtctttcgtttgccactccattgtgttgcatgtttgtgttccgcgccttaattgaatccgtattttactggcactatcgcatccccagccaagtacttagcgtgtatggcatgatactcctcctcctcctttatattttcggtttgtatttctaaagagtactagagtctatggcgtagtgtgtatccgtatttgcccaagtgtaataagtaactgaagcttttatgttgattatttcgtaagacccattgtgtgagggttgagggagttgtgggggctgtcctcatttccgccaaatgaggaatccttatcgcacacacactccacccaaaggacctgtgtgtgtctggccctgtcgaaagccagaaatgttaacttgccgctatctcagctgcgggttgctctgaaatttaattaacttaaatttaaggcgtgagagcgccacttgggtttgggatccttttcagcactcgaatttcagtggaatagttgggcaaatcttggccagacatatgcccatatattcctaactcaaaagaatgtttcgcaaaactttgcccaatttcacgcatgcctaattaacaactgaaatattccaactaatttctgccggagcgcaaataaattacccgaaaaataaaaggccataaagacccagtaaagacaaaggttttggctagcgggggcaataaaagagaataaataataagcaactatttgcgctacattatccaagattatataacagacaggacctccagtccttcctcctccttgactttttctcttctcttctgctgcccgagcaaataatttcagccagagttgatggcacgaaagcagaaatacttaccattctaaaataaattctgggccagcttccaagctctcgaccgggtcacacgcatgtgtgtatatcctccag

SEQ ID NO: 1613 - DNA, 3600 bp, DROSOPHILA
atgggcgcaggacgaaagggaaaaggaaacgagggccgtgatgatttgcccggccaggctctgctggatgtcgtcttcgccaggctcaatttaatcgagacctcatacttcggcatacgttatatagacgaggagaatcagacgcactggctcgatcctgcgtcgcgtatttctcgccaactcaagcccaagtcggatccttatgacttgtatttcggtgtgaagttctatgctgccgatccctgcaagctgctggaggaaataaccaggtatcaacttttcctgcaagtcaaacaggatgttttgcagggacgactgcctgtggcctttgagctggccgccgagctgggagcctttgtggtgcaatccgaacttggtgactatgatcagcggcgccactcgaagggctacgtgtccgagttccggctgcttcctaaccaaagcaacgagctggaaacccgcgtctccgaactccaccagcagctgaagggaatgtcgccctccagtgcggagctcaactatctggacaaagtcaaatggcacgatatgtacggcgtggatttgcatcccgttctgggcgaggacagcgtggagtacttcctggggctgactccgagcgggattgtcgtgctgcgcaacaagacgacggtggctcattactattggccgcgcattgccaaagtttattataaaggacgctattttatgctcaggataagcgataaaaatctgagcacctacggattcgagacgcctcgcaagtcggcctgcaagcacctatggcgctgctgcgtggaacaccatgccttcttcaggcaggtgcgagtggcccctctgcccagttcgcaatcgcatgccgccgatttgttccaactgggatcgcgcttcaggcacagcaactacgacagcccctatcgctccacctacagcatacccaccagcttgggcatcagaccttgccatcagcagcagaacaacaactccagcagctacaacaacaacagtgggggcaacctgcaaacgcctgactcgcccaggagcacccggagtgctccctggcccagatcgcagcagagatccctcttcgggcacaatccatcgagtccgcgatccgtgagatccgcgagtacggcaggcggtgggctgcaccatcatcacagccaccacagccacggtcacggtaccagccaccatccgcaccaccaatcctcgtcagcgggggccacctcctcgacctcgcatcaccaccgtcagcagcgggccagctcctcatccgcctcccatcagcagcagagataccgctccagttctgtggagagccactcctctaacgactcgaggtccacgcgcaagcataagcaccgtcatcgacgcacctcagataatgaaagcgagctttccagaggatcaggtcggtccggaagatcaggacgttcgcatcatcgcaagcaccgccgttcgcaccggcatcgaagggactcagccggaggatccgatcatgacagcacacgaggacgcagctactctggtcatcgcagctcttcgatgagaagtggaagtaccgagctcatagactccacatcgcaatggagggaagtgcaacgacgccaggcggaggccagtttggggcagagttccgtgcaacaggcagcggtttccaagagcagcatggtggccaggagtctccacagcaacgacagtcactcggacacccattcgcaccacaaatccaggaggcaccgcaaaaacaaatccccatcggaatcacgaagccgcatgtggaacagtgagctggcgaagcacctacaattcgatctggtggacacggagggcatgtcggagcagcagttacgggaaattccctacacggtggtagagaccacttcgaagaggtccaactctaacctaaagatccacaagagcaacagcaagagcagtgtgggagcgaagagtacgggctctggtaacaccattacgaatggtagtggatctggaaatgcgggtcaggccaggaatcgcgtcgatcgcatcaggggactttactatcaaagcacgcatccacacgaggccaacggaggtcctggagctggaggacatgcgccgaagaatggatccatccgctcggccagcactatatcttcaagggagtgtgaacggaataatggtctagttagaatgatgtccagcatgagcatgggtgactttatctcgcccactggctccaatctgagtcctttggaaaactcagctctgcgggtgtcccacgagcatactgactctggactgggagccgatcaggattatgcatactcatcggaaagatccagcgacagcactcgctatggcaccaacaaatcctctggcgcctcgagcggatcgcaccggaagtcggggggcagtgccggcgggaactacaacaacttgatgcagcagaccgtgagtaaccagcaacagcagcagcgctcgctgttcgcgcagcagcagcggcagcagaagagcacctacaaatacgccacctcctcgccatcgtccactaacccagggagctcctcgggactggcgcccgtccacaacccgggctcgagttccaatcccagctccagtcaaaaccccaacagcgctactaactctaatcaacagtcgccggctaatcgcctgctccactacacgacctttgagaacaaccagtacaagttcagtctgaacaatgcgctggccaagagctccaagggcgtggtgagtggaggaggcagcattagcaatctggccggcaacatggtaacatctggtggtgtcggtggtccaggctctcaaggtggtggtggtgctttcagccggcagcgcagcttcgtggagtggcccagcaatccggcgtcgccctactattaccaaggtccttccacgcacgtggcgcaggtgaagcgccgggatgccaagtcagatattggggtgcccaccaggcggctctccggacagagtttgaccaaaacgcaacttctgacgggcggcggtaactcgcagttagccaatgcgggctgttatccgttgcactatgcgagcagcaatgttgcgggcgcgggctacaatcgtcccttaggtcaaagatcaggtggcaacggctcctccgccagtggctttggcctccagccagccaaatcggacctcttcttgtcctacatccacggcggggagtacgaaagaccctacatatacaactacaagatgccgcagatgccgggtggagccggggcaggagcaggagcaggagctggaacgggagcagtgggctccccaaaacaacagaccaccgcttaccacatttctgggtcgcagaccgcagatccgccgccaccccctcctccactgtacggcggcacggcgcccgccaacgacgtcatgtactatcagttcgacaaaggagccgccgtcgctgccggacctccttccacgtcgtcgtcctcgtcgccgcccattgtccagcagccgcggcaaacgggcggtccattagtgtatctgcaacatggccagaatccatctgtgcccgaggtgcagcagtcaactgtgagtacgaagtgcaaacctgtcgcatgtcgatgttga

SEQ ID NO: 1614 - protein, 1199 aa, DROSOPHILA
MGAGRKGKGNEGRDDLPGQALLDVVFARLNLIETSYFGIRYIDEENQTHWLDPASRISRQLKPKSDPYDLYFGVKFYAADPCKLLEEITRYQLFLQVKQDVLQGRLPVAFELAAELGAFVVQSELGDYDQRRHSKGYVSEFRLLPNQSNELETRVSELHQQLKGMSPSSAELNYLDKVKWHDMYGVDLHPVLGEDSVEYFLGLTPSGIVVLRNKTTVAHYYWPRIAKVYYKGRYFMLRISDKNLSTYGFETPRKSACKHLWRCCVEHHAFFRQVRVAPLPSSQSHAADLFQLGSRFRHSNYDSPYRSTYSIPTSLGIRPCHQQQNNNSSSYNNNSGGNLQTPDSPRSTRSAPWPRSQQRSLFGHNPSSPRSVRSASTAGGGLHHHHSHHSHGHGTSHHPHHQSSSAGATSSTSHHHRQQRASSSSASHQQQRYRSSSVESHSSNDSRSTRKHKHRHRRTSDNESELSRGSGRSGRSGRSHHRKHRRSHRHRRDSAGGSDHDSTRGRSYSGHRSSSMRSGSTELIDSTSQWREVQRRQAEASLGQSSVQQAAVSKSSMVARSLHSNDSHSDTHSHHKSRRHRKNKSPSESRSRMWNSELAKHLQFDLVDTEGMSEQQLREIPYTVVETTSKRSNSNLKIHKSNSKSSVGAKSTGSGNTITNGSGSGNAGQARNRVDRIRGLYYQSTHPHEANGGPGAGGHAPKNGSIRSASTISSRECERNNGLVRMMSSMSMGDFISPTGSNLSPLENSALRVSHEHTDSGLGADQDYAYSSERSSDSTRYGTNKSSGASSGSHRKSGGSAGGNYNNLMQQTVSNQQQQQRSLFAQQQRQQKSTYKYATSSPSSTNPGSSSGLAPVHNPGSSSNPSSSQNPNSATNSNQQSPANRLLHYTTFENNQYKFSLNNALAKSSKGVVSGGGSISNLAGNMVTSGGVGGPGSQGGGGAFSRQRSFVEWPSNPASPYYYQGPSTHVAQVKRRDAKSDIGVPTRRLSGQSLTKTQLLTGGGNSQLANAGCYPLHYASSNVAGAGYNRPLGQRSGGNGSSASGFGLQPAKSDLFLSYIHGGEYERPYIYNYKMPQMPGGAGAGAGAGAGTGAVGSPKQQTTAYHISGSQTADPPPPPPPLYGGTAPANDVMYYQFDKGAAVAAGPPSTSSSSSPPIVQQPRQTGGPLVYLQHGQNPSVPEVQQSTVSTKCKPVACRC

SEQ ID NO: 1615 - DNA, 3493 bp, DROSOPHILA
gcatcagctgcatgtgatgcggcatgtcggccttgaggtgctcctccaactgattggtctctggtcggcccacaaaatcgcacttgatcttggcaaacgggcacttctcctcctgcggctcctgctgccgccgatagggacaactgggcagatggcgatgcagttcgatgggcgaggcaaccaccgaacagcccagcgaggagttggggcaatctcgcttgagttgctcgatctcgcggcgcgtgtagttgtccggaaagatgtcgtgctcggcggacagacgcttgttgtccatggggcagcattgattgttcttttgcatccaggcggtgaggcagctgcgacaaaatcgatggccgcacgacgtcaacaccggctcatttagccaatcgatgcaaatggcgcactcgtatcgcgagtccagcagctcctcctcctgttccccggatgtatccgaaccgggtgcatagtgatggttctgattgagcgccagactcttgggcggagtgggtgctccgctggccccgcctcccgctgctgcgctgggcgtggcactgctactggccgcaattcggccagtcgacgacaagttggtcgtcatctcattgctattgtgctccttctcctccgcatgctgcaaactgtgcgcgtgcgaatgcgtatgtgcatgctggtgcattctggctggcttttggtcggcctggactcgctgcatcttggctgctcctctggccgcctgctggctatcctctttgaatcaactaattcaattttaataataattttcgttcatgactccgcggaacagctgtgtatccaacgaggattgtgcaacactggcgtcgcgttagtataccagaacacacgtgttcgcactgcacaaaaaactttagctggtagcgtgttaattgtgctaaatttagttattattttacatttaacaccaaatcaatgtaaaaccatcacttgtatagtttaattggttgttagaagctgatagcgtgtaaacaacatggcctgcgcagatgcaggccagtgtgaacacgctcgttttgttttggcggcggtgggcgagcatataaaacggcagtgtttttcggattggcgagcaatcagttacgggcaccgtacgctgaaaaaaagaaaagcagaacgaaaacagacagaactcaacacgatgtggatcgcgaacgaacgcactatctgcgcactgatgccactggtgattttggcgacctggcagctgtgccttcttcccgggacggatgccaagcacttggccatcagattgcgcgaccctcaaagcgaaatcgaatcggaaacggtgcccctagcccatgtccacagccacagccacacggacgagagtggcgttcgcggtgctgctgcagtgcatcgtcgggagcggcggcaactctccgattggctaattgcgcccaacacgcggtggtgcggacgcggcaatctggccaatggaacgtacaacgatctgggcggcgcttccaaggcggacaaatgctgccggaagcatgatcactgcaaaatgtggatcgatggcatgtccaatcgctatgatctcttcaactatcgaccgtacacgctgtcacactgcagctgtgatctacggttccgcacgtgtctgaagatggccggcgacgaggatgcgaacgccatcggaaagctcttcttcaatgtcgtgcagacgcagtgtttcggcctgaaggccgagaccgtttgcgttcagcggggcggctccggaaaggagaccgatccgtgcctcaaggaggaggtgcgtcacaaggccttcctgcgcgacaacaagcggttctaagagacctaggtgggtagagctaccattcatgtttatgctttcaaaggaagaatgatgtggttattccattcaattccatatcgcttctatcgttatgctttgcatttgaattggaatacagcttagctgtaatttctagaatcctttgagtttgagtaacaatatgcttttctttccatatttccagttggcccacgacgaccggcaggaatttgtgtatcccaaagtcgcctgcccgcaaaaggagctaaccaaacataccgccacatagtgctgcaattgggtttgaaactcaatgggagagcatggcaaaacaccatcatcatccgtacttagatgaacagattgtgagaggaggaggaggagagacagccagagacaccacgtctatgtattaggctaaattaccaacatatttatatgactgtcaagtgctattataatgcgtagtagtcgatacgatgtactaacacacctagttgtagtcactcaatctagtttaggccaacgaatcgataacaggctgccagaaaaccaagttttttttaaactagctgtagaccccatagataccctataaaccacctgtgcgtaattagttgtaggcgtagtaacttaataaatgaaatttccaaagagtaaaagcatatcataagacatatgtacatgattgtgattgtattgtgcaaatacgagctccgtaaaccggcaatccagcaatccatccatccatccgctgtggaatgtcgtactttgcactgggcactcggtatcagcatcccatccagccagccatagtatacgcgtatgtctggactgtgatcgccgcattgacgtagctattgcccatccagatgacccgttgacccatggatcgtaagctcgcctctcaattggctaccacttctaggtcagatgcgtcatggtggtgacctctgcgagctcgagaaggattcatggattagttcaagtccaaggtacatgtttatgtgatgattgggatttaattcccaatatttaatgatgatgatgatatatattgtatataaaggccacactgaagttttcccaggcctttttgtttggtgtagttaagctggcaaaaatatagcacagtgtgaggtctagttcaagagagtccagcattataatcagcattcagcattcagcaacgtgacgcaattaaatataaataaatattttgtattattattattcactattgattgattggccgtttacaacagaggggcccgtccgtattggagcttgtaaatacttcctgccatttggattcaatgtcatcgcatcccatcgtaatcgtagctttcgttttttttttcgcgtaaactcgactttggtttgaggtacgtatgtatactcgtagtacaacagtgcgtatactcaatgcattcgaattgttatgcgcaagcagtttatttgctgattttcgcaaatagttacgtcacgaaaactatttgtcgatttgcaaatggaaagtgatattctcacgcaatttggaaattaaaaacaatattaataatattaattgttaatcatggttgtgtttttccgtttcaaaatcaatcaacattgaatcaccaagtagctcgccgttgagttttcagagttttcgaaactatatttgctttgtcaaaattt

SEQ ID NO: 1616 - DNA, 1315 bp, DROSOPHILA
cgtgtaaacaacatggcctgcgcagatgcaggccagtgtgaacacgctcgttttgttttggcggcggtgggcgagcatataaaacggcagtgtttttcggattggcgagcaatcagttacgggcaccgtacgctgaaaaaaagaaaagcagaacgaaaacagacagaactcaacacgatgtggatcgcgaacgaacgcactatctgcgcactgatgccactggtgattttggcgacctggcagctgtgccttcttcccgggacggatgccaagcacttggccatcagattgcgcgaccctcaaagcgaaatcgaatcggaaacggtgcccctagcccatgtccacagccacagccacacggacgagagtggcgttcgcggtgctgctgcagtgcatcgtcgggagcggcggcaactctccgattggctaattgcgcccaacacgcggtggtgcggacgcggcaatctggccaatggaacgtacaacgatctgggcggcgcttccaaggcggacaaatgctgccggaagcatgatcactgcaaaatgtggatcgatggcatgtccaatcgctatgatctcttcaactatcgaccgtacacgctgtcacactgcagctgtgatctacggttccgcacgtgtctgaagatggccggcgacgaggatgcgaacgccatcggaaagctcttcttcaatgtcgtgcagacgcagtgtttcggcctgaaggccgagaccgtttgcgttcagcggggcggctccggaaaggagaccgatccgtgcctcaaggaggaggtgcgtcacaaggccttcctgcgcgacaacaagcggttctaagagacctagttggcccacgacgaccggcaggaatttgtgtatcccaaagtcgcctgcccgcaaaaggagctaaccaaacataccgccacatagtgctgcaattgggtttgaaactcaatgggagagcatggcaaaacaccatcatcatccgtacttagatgaacagattgtgagaggaggaggaggagagacagccagagacaccacgtctatgtattaggctaaattaccaacatatttatatgactgtcaagtgctattataatgcgtagtagtcgatacgatgtactaacacacctagttgtagtcactcaatctagtttaggccaacgaatcgataacaggctgccagaaaaccaagttttttttaaactagctgtagaccccatagataccctataaaccacctgtgcgtaattagttgtaggcgtagtaacttaataaatgaaatttccaaagagtaaaagcatatcataagacatat

SEQ ID NO: 1617 - protein, 272 aa, DROSOPHILA
MACADAGQCEHARFVLAAVGEHIKRQCFSDWRAISYGHRTLKKRKAERKQTELNTMWIANERTICALMPLVILATWQLCLLPGTDAKHLAIRLRDPQSEIESETVPLAHVHSHSHTDESGVRGAAAVHRRERRQLSDWLIAPNTRWCGRGNLANGTYNDLGGASKADKCCRKHDHCKMWIDGMSNRYDLFNYRPYTLSHCSCDLRFRTCLKMAGDEDANAIGKLFFNVVQTQCFGLKAETVCVQRGGSGKETDPCLKEEVRHKAFLRDNKRF

SEQ ID NO: 1618 - DNA, 4113 bp, DROSOPHILA
tctgctgcagctgcatacgcatatccagcggcagcttctgcacggcaccggccactgaaaagagagattttcggtcagccgcaaaaaaaaagaaacgcaaggagcgtgctaatttacccaagcttgtgatcttgacatgctcgcagattatctcctccagacccccgtgaaggaagttgtgcgtctgcaggccctgtttaagggccaggaactcgtggcgcaggtgaggcgatgtgcgacacagagtgtgtgcggccctttttagattctggttgactaggtagcctacaaaatggaagagcataaatattgcgagctagaaaagcgtccagggaaaacctacccaggaccaagcgagccacgtccgaatgcaggacaatcgactccatggctggactttccgactcagctaagcgtcaccatccactcgcttttcgccttgcctttcttttttttttcgcttgcaagactttaggtttatcgaacgcacttgtaatgccttattattgactgttgcaggtttaatcactcaatagttagtcggaattgaatcagcgctttaattcgagagagaataaaccattttctcgcctattcgccgactattttcgttttgttgttgccgattctagcggcgcactgtacaacacacataggttagcatagcatctgtgttttttttgccgcccgccaaaacaacgcagtagggttgccacagcgccgaactatcgatatagtcccgttgtttgcgcttggctgccaagccttattaggagcgtgggaaataatggtaataattaaagcaaagaaatacgtctctttcgcttaaaacaaattatagcagtttttattgctttgatggtcttgcttcaattcgtttttatgtgtacgttacagtacttagaatccgatattcgttaaactatcgatatgggaatgctgcaaatacctggcatcccagcaattcataactagacggcgttgccaaatagatcagaacgcaaaaaccaagtgcaatattttattcgagtgacttagattactggttaactggcactcaatggctgccaagagtatcgagaaggagaagggcgagggtcaggagcccgcgacatcagcggagaaacccgatccagccgcacccactgaaccagctgaggaaaattccaaagaaccggcgccggaagacgcatcgccggataaaaaggatggtggacgcaaaaggaagaggcatttgttcaattcgattcgcggtcaaatggaattctacttcggtgacgccaacttgagcaaggatcgcttccttcggcgctacgtagagcaggatccatgtgagtagctaaggttggctcaccagccaacataacactgatcatgttattcttttacagatgtaccattggaaatctttctcactttcaataagataaagacgctcacccaggatgtgcagcagatagccaaggcactaagcaactcccagcttctggagctggatgagaccgaactaaaggtcaagcgacgtaccaagctaccagatcagcgcgatgtcaacgacaaaaccttgtatgtagaggccctgcctgcaaatgccactcacgattggctgaaggaggtattcagccgctacggaccggtggcctacgtgtccctgccccactatccgggcactaagaagatcaaggaatttgcctttatcgagttcgaaaagagcgggtccttggagaaagctgtgaaggcttttgcccagatacagggcgttttgtccgtagaaaccgatcccagtgatctggccagtgtgcgctcctttcagcagcagcagcagatacaacagaaagcggagcagccgcagtcagaggctgaacaggttgagttgccaaagcgaaatctaaaaagggaggccaccgacaaggatcgcgaggagatacacgaggtgaaacgggttaagttggaggagggccagcctagcgagacctctacagctggggaaacagcgagtgaaacggatgcagagggcacagccgaagcctccgagcaggaggacaaaacagaggcaaccgatggcgatgaagctgccaaaaagcgccgtcgcaagcgcaagaagaaggcgatcgtggacaagccaaacattgagcccagtgccctggagctcaaggtgctacccaagactagttggagcagtatgcgcaataagtacttgaatctacagcgtcgcatcgtcagtgaggcaaagagcaagctgtggcgagaaaatcacccacaaaatcagcagcaccctcaccaccagcagaccagtcatccaaaccatccgaaaccttcacagctgcccgaggcagttaaagaggaggaaaccggaggcgaggtccctagcgatggcggtgaaggtgccgtagaagcagcgcctgtgccagccaagcgtcgcaaggcggtgcacaagatgaacatgaatttctacggcgccggcggcgtggaatccaccaaatccgaagaaccttcgcaggaacgcacgccgctctttaaatacgagcccgggctgattgtggagtgctccctgctaaaaccatgcaccaatgttaaagaatttaaggctgaaatgcgccaatatccggatattaaatatgtggatattaaggagggcgaccaagtggccctactacgtttgggcacgcctgccgcagccgaggaactgctacgccaggtcaactgctccgagaggcagctgaaagtgctctctggccagcaggagacgctctattggcgaaaaatcgagcaggatcgcgaggcgaaactctcgaaaaaggtgcgcgtgcagcaaaaacgcggtcgcgagaaagtgggcaaaatgctgggcaagcacattaagtttgatgatggcgatgatgaagtgcaggcggccgccatggactgagtcactttcagttgaggggtgagtttggatttcatttcaggaaactctataatataagctatataaatttataaatgtaagcaaaagatacatttagatctagcacaagatttcgtaatattagagtaatattgtaaaaacaaattgaatttttaaaaaagaaacttcctagtgaaattgaaataaatcttctgaatgaaacaaaccatttatttttacaaatttgtctgatcttacaggaacgagaaagagatggttatattttctctttcacttatttattgatacgatcaaagaattgtgctagataaaagatacaaaaaagaacttttggcattattaataaaatacatttcctaattaattatgtacacgtttttgagaagatcttgctattcctaatggttgcatatttgcattcgttattatgtacactgtaatggaaaagttagcttatgacctattaacccctgtaaaactaaactatatgtaaagtgagccatccgctggccccaaataatgcatcgagatgagcaggacatcgatgatggtccagacgccgaggccgccaaagctgaacagctttccaatcccttcctgccagtggcccaagtagaatcgatcggctccaaagccccctagcgtgaggctaatcagcagggctgtgctccaccgatagccctgcgtccagttgcatcgcaggttgcgggtaaaggatcgattgccgaggcagagcacatcatggtgcacggtgcagttggtacggaatagcttatccgtcgccgagttgcaactggagcgctggccacagctctgttgccacatttccgtttggtagcagtatcggcaattcatttgtcgctggaaactccgttcgcccaggcactggacattgttgatcacctcgcaggttacattcaagtcccggccgtagatgcatccatgattgtagttgcaacggatgcagggaaactgcaggcgatcacagggcgtttccttatcgtacgggcatagcatgttgttgttcccattgctgctactgctactgctgctgctgctgtaggcggttatgttgtccaggagtccaccggcacctcctccactcttggccaccatgctggacaccaggggcggcacatacacctcgttatcgttggcatttccattgccattgctcgcattgctgttatccttgtgatcgcctt

SEQ ID NO: 1619 - DNA, 2053 bp, DROSOPHILA
gcaaaaaccaagtgcaatattttattcgagtgacttagattactggttaactggcactcaatggctgccaagagtatcgagaaggagaagggcgagggtcaggagcccgcgacatcagcggagaaacccgatccagccgcacccactgaaccagctgaggaaaattccaaagaaccggcgccggaagacgcatcgccggataaaaaggatggtggacgcaaaaggaagaggcatttgttcaattcgattcgcggtcaaatggaattctacttcggtgacgccaacttgagcaaggatcgcttccttcggcgctacgtagagcaggatccatatgtaccattggaaatctttctcactttcaataagataaagacgctcacccaggatgtgcagcagatagccaaggcactaagcaactcccagcttctggagctggatgagaccgaactaaaggtcaagcgacgtaccaagctaccagatcagcgcgatgtcaacgacaaaaccttgtatgtagaggccctgcctgcaaatgccactcacgattggctgaaggaggtattcagccgctacggaccggtggcctacgtgtccctgccccactatccgggcactaagaagatcaaggaatttgcctttatcgagttcgaaaagagcgggtccttggagaaagctgtgaaggcttttgcccagatacagggcgttttgtccgtagaaaccgatcccagtgatctggccagtgtgcgctcctttcagcagcagcagcagatacaacagaaagcggagcagccgcagtcagaggctgaacaggttgagttgccaaagcgaaatctaaaaagggaggccaccgacaaggatcgcgaggagatacacgaggtgaaacgggttaagttggaggagggccagcctagcgagacctctacagctggggaaacagcgagtgaaacggatgcagagggcacagccgaagcctccgagcaggaggacaaaacagaggcaaccgatggcgatgaagctgccaaaaagcgccgtcgcaagcgcaagaagaaggcgatcgtggacaagccaaacattgagcccagtgccctggagctcaaggtgctacccaagactagttggagcagtatgcgcaataagtacttgaatctacagcgtcgcatcgtcagtgaggcaaagagcaagctgtggcgagaaaatcacccacaaaatcagcagcaccctcaccaccagcagaccagtcatccaaaccatccgaaaccttcacagctgcccgaggcagttaaagaggaggaaaccggaggcgaggtccctagcgatggcggtgaaggtgccgtagaagcagcgcctgtgccagccaagcgtcgcaaggcggtgcacaagatgaacatgaatttctacggcgccggcggcgtggaatccaccaaatccgaagaaccttcgcaggaacgcacgccgctctttaaatacgagcccgggctgattgtggagtgctccctgctaaaaccatgcaccaatgttaaagaatttaaggctgaaatgcgccaatatccggatattaaatatgtggatattaaggagggcgaccaagtggccctactacgtttgggcacgcctgccgcagccgaggaactgctacgccaggtcaactgctccgagaggcagctgaaagtgctctctggccagcaggagacgctctattggcgaaaaatcgagcaggatcgcgaggcgaaactctcgaaaaaggtgcgcgtgcagcaaaaacgcggtcgcgagaaagtgggcaaaatgctgggcaagcacattaagtttgatgatggcgatgatgaagtgcaggcggccgccatggactgagtcactttcagttgaggggtgagtttggatttcatttcaggaaactctataatataagctatataaatttataaatgtaagcaaaagatacatttagatctagcacaagatttcgtaatattagagtaatattgtaaaaacaaattgaatttttaaaaaagaaacttcctagtgaaattgaaataaatcttctgaatgaaacaaa

SEQ ID NO: 1620 - protein, 595 aa, DROSOPHILA
MAAKSIEKEKGEGQEPATSAEKPDPAAPTEPAEENSKEPAPEDASPDKKDGGRKRKRHLFNSIRGQMEFYFGDANLSKDRFLRRYVEQDPYVPLEIFLTFNKIKTLTQDVQQIAKALSNSQLLELDETELKVKRRTKLPDQRDVNDKTLYVEALPANATHDWLKEVFSRYGPVAYVSLPHYPGTKKIKEFAFIEFEKSGSLEKAVKAFAQIQGVLSVETDPSDLASVRSFQQQQQIQQKAEQPQSEAEQVELPKRNLKREATDKDREEIHEVKRVKLEEGQPSETSTAGETASETDAEGTAEASEQEDKTEATDGDEAAKKRRRKRKKKAIVDKPNIEPSALELKVLPKTSWSSMRNKYLNLQRRIVSEAKSKLWRENHPQNQQHPHHQQTSHPNHPKPSQLPEAVKEEETGGEVPSDGGEGAVEAAPVPAKRRKAVHKMNMNFYGAGGVESTKSEEPSQERTPLFKYEPGLIVECSLLKPCTNVKEFKAEMRQYPDIKYVDIKEGDQVALLRLGTPAAAEELLRQVNCSERQLKVLSGQQETLYWRKIEQDREAKLSKKVRVQQKRGREKVGKMLGKHIKFDDGDDEVQAAAMD

SEQ ID NO: 1621 - DNA, 3630 bp, DROSOPHILA
aaagaacctactttatatctagctgatgtcagtactgagcttagatttaaagatttagctaagcccaaaacgttgataatctttgtgaaaaatgttattgtcatatatagatttaagccttacaggctaagttgtagggaacgacgagaaaattccgaatatagaatatatacttaaccactgccaacaacaaattaaaagtgcctcgaaatcgaatcgaaagtccaatttaccggacacgagttaggatcaaaagaaaataattaaataaaaaaaaaagaaatcgaaagtattagcactaacttaatgcattactataaataatccacgcaactaaatttagcacacaccagcaagaatattcttattttgtttgttttccgtcagctattctaagtgatagtttttaaaattgtgagaaaaaaactagagatgttagttttttatgtatgtttttgtatgtatggggtcgagatgtagttaaattagttgtaaatataaattcgatagtactagctgtaaatagtaattatgttcttgatttattcaatatacacttccttttttttaaaccatttggtgttttgaattttctgtttggcgggcgtttgaagcgaacatgttcgaaccgaagtgccgtagcaggcagctatagcattgcagctgtctggcaaacacacttaaagaaattgtgcatatatacagaattggtagatttggtaagcaatatttaattcttgtttttttttccagttttaaacaaatatcgaacgcaaaagaatttactatgtgacattttggcgggcatttttaattcatagtaacgttaagaattttctgaactgttaaatcagaaggttgtctttttcgattggccgcatcgaatgcaataatttccaccttattaaatgtctgggcgcctgtttcgattttgcgatagatatcaatccccaaagtagaacccatagtcaatacgtaaaacaagaaaacaagcacagtgttacctattcggagcgaattacttataaagatttatatttcacacatttttaaggacattttccgtatgaggggcgcccgtgttataaatttacattaggaaatgttgaaaaaatgtgtcaatggagctcgcctattctttttatgcatagctatagctattagtggaatctatacagcatcggtttcttgtattgtacgccaatctcaacattacattctagacgtagtacaaatggattaatagttgatggtagttaggctacagctattgttcaatcactgctcttcaattaaagaattttgatgtttgtaaaccgaattggaaaatcttagctttttgagtagcgacaagaattgctgaccgtccgctctacgggctgattattgattgaaaagtaagatgatggaaaggaaaaaaaaaagttgaggctcgggcttcggaaatacctagcctaatacaggctttcggtatttgaggagcgcggcttctttagcttctcgaggttcttaataacaatgtcgtgcagcgaggagtagcgattgcggacctcacaaacgaccagccacaagctgaggtactccttctcgtcaagttcgacgactgcgcgccgataatcatcgatgtgcggatacttggccaccttggacaccaccttggcgcgcgacaagaaatagcgcgatatctggtcaaagaaggcggccgcctcggattccacagtttgaatttcggcaagcgtgtcctcttgaatggagacgccaaagttgttgccatcctcgatcttgggtatcataaaggagatccacatcttaagtagattggctgcaaaagaaatcaattcagaaattactaggtattcattaaaaagcttaatgtcaggcaaaactttagctactggcatttgtaccgttcgaatgtaaaaattcttggaattcattgttttaggaaaattgaaggggctcttgaatagcataaaaacatttattaggttgagacgcttgaatatacggtgtacttacaatcctccacaagcttcctgatgataggcttgacgaccttgatcatctcgcagagcggcttgttgcacggcactgtaccggcgggcagacccatgacaggctgcccagagacgatgacatccacgcgctggcgcttggtgggcagactgtcacgatcctccaactcgtttttaaccaggagaggcggcaggaccgggatgttgaggtcctggtgcacttcttcgaagttgcgctcgttgaagatcggcgtggccagcagctcgttcagccggacgatattctccgggaaccccttggtgattagcagctctgccttgaggatcaacgagtccttgtactcctgcacctttaccacagtgtcgttaggcatttcgttagctatgtggattccttttcgtgtccgtggaagcctttgatcctgagtcctgtctcctggcgtagtaccggttcttctcgttccttatcttctcaataacaatcagcaacgcggaccgtctgaaatcggcggacttttagggacttgtgtcggcggattgcgaaattgaaagcgggaaaaccagacttaccgacaaattttgatgcccaagcaacaacacgcatgtggtgctagaggtggaagaaaaagaataatcgatgcttatcgatagcgtcgaagtttgcagaaattttgcaaattaataccccacaagtatcttaaatatcttgaatgtcaatatatattttttctatactttttttagattgaaagtcttctaattactttcagtttcataaacaaattagctgaacattaaagttggcaaaacatatttaaatgcattaatgtacattgcagttggcatcatttatttaaatgcaacagctgaagctcgcttctcatttaccatgttaaacttgcatatactttgttgtaacgtgattagaatttaacggatatatatcatgaaatataaagaaataagacgcgcgccatttatcgatagtcttgtgtgcaccgcgtgccagaccgatagatttgtttaaataccaagtaagtttattatgtctccctttgtgcaatttaaaatgttttcatttaaatatctatatttttaaaatattttccatatatatatattataagtaatattaagctattaatatttttagagcaaacacgctataaataagtgtgcccaaatataagttttagtatacatcggcattcttatcaataatcgtcaaactgacgttttctcgcttcaccattatcgattctcatcgatgtttttccagctctatctagttggcatctcgttagttgcgatagttggcatgttacgtgtgttttcggcttcgtcgcttcattctcgtctcgttctcgtttccttcctcctttattccgattcctcgttttgcgtgtattgcgcggtacaacgcatacgaacaaatttatccgaagcgaaataccgcgtgcagcaacaaaagaaaaacacactcaacaacaacaacacacacgcatgcacacacgcatgcagtcattatcgcaacaccaataacaacaggaagaacaacaacaacaaaaacatttctaacgcgctgaaaattgcggagtccagccttttatatttg

SEQ ID NO: 1622 - DNA, 1362 bp, DROSOPHILA
tctagcaccacatgcgtgttgttgcttgggcatcaaaatttgtcgacggtccgcgttgctgattgttattgagaagataaggaacgagaagaaccggtactacgccaggagacaggactcaggatcaaaggcttccacggacacgaaaaggaatccacatagctaacgaaatgcctaacgacactgtggtaaaggtgcaggagtacaaggactcgttgatcctcaaggcagagctgctaatcaccaaggggttcccggagaatatcgtccggctgaacgagctgctggccacgccgatcttcaacgagcgcaacttcgaagaagtgcaccaggacctcaacatcccggtcctgccgcctctcctggttaaaaacgagttggaggatcgtgacagtctgcccaccaagcgccagcgcgtggatgtcatcgtctctgggcagcctgtcatgggtctgcccgccggtacagtgccgtgcaacaagccgctctgcgagatgatcaaggtcgtcaagcctatcatcaggaagcttgtggaggattccaatctacttaagatgtggatctcctttatgatacccaagatcgaggatggcaacaactttggcgtctccattcaagaggacacgcttgccgaaattcaaactgtggaatccgaggcggccgccttctttgaccagatatcgcgctatttcttgtcgcgcgccaaggtggtgtccaaggtggccaagtatccgcacatcgatgattatcggcgcgcagtcgtcgaacttgacgagaaggagtacctcagcttgtggctggtcgtttgtgaggtccgcaatcgctactcctcgctgcacgacattgttattaagaacctcgagaagctaaagaagccgcgctcctcaaataccgaaagcctgtattaggctaggtatttccgaagcccgagcctcaacttttttttttcctttccatcatcttacttttcaatcaataatcagcccgtagagcggacggtcagcaattcttgtcgctactcaaaaagctaagattttccaattcggtttacaaacatcaaaattctttaattgaagagcagtgattgaacaatagctgtagcctaactaccatcaactattaatccatttgtactacgtctagaatgtaatgttgagattggcgtacaatacaagaaaccgatgctgtatagattccactaatagctatagctatgcataaaaagaataggcgagctccattgacacattttttcaacatttcctaatgtaaatttataacacgggcgcccctcatacggaaaatgtccttaaaaatgtgtgaaatataaatctttataagtaattcgctccgaataggtaa

SEQ ID NO: 1623 - protein, 245 aa, DROSOPHILA
MPNDTVVKVQEYKDSLILKAELLITKGFPENIVRLNELLATPIFNERNFEEVHQDLNIPVLPPLLVKNELEDRDSLPTKRQRVDVIVSGQPVMGLPAGTVPCNKPLCEMIKVVKPIIRKLVEDSNLLKMWISFMIPKIEDGNNFGVSIQEDTLAEIQTVESEAAAFFDQISRYFLSRAKVVSKVAKYPHIDDYRRAVVELDEKEYLSLWLVVCEVRNRYSSLHDIVIKNLEKLKKPRSSNTESLY

SEQ ID NO: 1624 - DNA, 5212 bp, DROSOPHILA
cctcctacgcgagtgtgtgtgtgtgagtgccgcacgtgttgccaaacacagaaaatacgataaaaaaaaaaacaaaaaaagaacgcaatagtcgggtgccacgaccttgagatacccgccacacaagttatgctgcctagcttaaggcttacatattatagatccatatttaatggtatatattcaaccaaacttctgcatctaaattagaaaatatagtgtgaaataaccatagtacatatagtgtgaactgctgtcctgaaaatatattgtagcacactttgcagctcatgagaaaagagaacgtcgcctaaatggattttttattaactatgtggcaactttggatacaattccattcgaactgtccagtaagcctgtactacaccacggctaatgggtatgaaaccaccatgaccccaccaccacgtgaaccgtttggggcaccgaattccagttccccgtcaagatgatgatgcaagtgcttctaattatagccagccaatttcgtacgcctgcgcgatgtcctggcgaaaggttaacttaaggtgaaatggccacaggttgctgcccacgcacacacagccagcccacgtgcttgcatatacttacataagatggtcttgtacatgcaatggtggtagaaatgaatgaaataaaaagggtcactacacacgtgtatggggttgcaaaaactcatgtactacgcatttttcagtcagttgcaaagctgttcgtttgttttgatggatatacacgaacatttcgtatgaattgcttcttccctaattaagtaaactttttgaatttaacggttaaaaaccattaaaccattaaaaaccaagtggcaacgtcgtgcactcttgtaaatcaaattggcatcacttgttggtatttcgttgcagtataaatgacattctcagccacacggcgactgaccggcgataatatatcgatagcaaagcaaagctcgccaaactatcgatagtgtcgacggaagaacaacaacaatatgtctgatgttcgaaatcaacgcaaatattatttatcccccagttaatataattgagcccgcacaatgacaaccgacgagagcataatggaggagatgctgggtgagtgcagctgccaattcgcccgccgtaactagcataactaagccactttttgcggcatttcgcctgcaacgcagagagagcaacaaatccggcacagaaaatcgacgaactgggcgtgcaaatgttctgcattgtggtcaaaagcaacgcccaattggtgcacaaggcgcaggagatgattgtggccaaggtgcgatccacaaatgtgacggaggcgacgcgagcgatttcggtaaacggttatattttgcacttttcaccccatttctttgcatcgaacccccacatccccctttcacattaccacccacaaccacttaacggtaaaggggtatgtgtgggctatacacacgcagctgcacagtgggcgaaaagcgcacacatacgcacgcacttttatggctgcgtttgaattagcaacaacaatttcgttatcaattgttaatatttgcgatcgaaattgcgattgcctggccaactgggcgcaaaagcagctaaaacaatatgcaacagttagcggtatttgcatttttggtatccgacaactttcaaaacataaattaacttgcattattactagtttgtcttagtattattattgtttttattctagtttttcgcttgcacttgtcagctttcctaatctcttatctttggtttgtcaccatatttgttgctttatttttgtcgaggaaaaagaattagattatatatcttaattttaaatgtttttaacaaacattaatatttacagtgtaaaatagttactttttttcataacttgattgagcagaaagtgacatccattagtaatcaaaacactagtattggtaaaattccattaaaacatgagtaatctaaattaaagtaaatgttgatttaacccgttaaccgcttgcagctgctggaggagtgcatgacgcagtgcggcgacgacttccaggacgaggcgtccaaattccgctttctcaacgaactgatacgcctggtatcgaagaagtacaagggcgccgagacgccgcacgaagtgaagcagcggatcatggagtgcctactgctgtggaccaccgagttcccgcagcgtcagaagatacgcgatgcctacgacatgttgcgcaaggagggggacatcgaacacggcaccacggaggcggcggtggccaaaagggagagtgtactgggcactattgacgaggccatgttcgccaagctgatcaagagcaataatcccgagaacttcaagcgggccaatctactgctgcagtatcggatggcacaggaggcgcgtcgcaacgatctgctggcccagcatcgtctagtcctttgcgaggtgcaggagacgatgcagctgctcaaccaaatgctggacacctacgatcccgccaaccaggacgtcagcgaaacactgcacgagctatacaagagctgcaagaagcacaagcccatctttcagcatctgccgcagctgctggacgattccgatgcgcagcttgtaggtgggtgtggtccctcttgaatggttcaccatttagctctttatataacacgtccaactcccttcgcagctgacactctggatgccaattgcgctctactggccaccatgcagcgctacaagcttctggtgccatcgcccacaaggagcaccgctgctgccttgaccacgagtgctccaacagtagctagttcagtgaagtcgacggccagctcgaccacagccaccactagctccaataacgcccagttgctgaacgaactgctcggcgatttgctcatcgacggaagcaataaagctgcaactacagccaccacaagcctaccaaatgccgcggctagcggttcgaatccgctggccgatttaagtgacatctttagcagcgctctggccgaaagcgaagcgaagcagcagagtcagccattccagaatgcaaccacgctgctggagccgcaggtcattagtcagggcaccacaaccgaggctttggccaatggcaatggaggcagcgccagcaaagtgccggaaacaatcagaaagatgccgcaaatcgatatgctcagcgaggagctgttccagcagatcctgcccacccaggatcggatgcccagcttcaagcgggatcccgagaagatcacgctaaacgacttggcacgcgaacgaatgcacataaaggcgccagaggagccaacgactgctaatgacccagcttctgatagtgctcctgctattgccactgccacagctactgttgattccatagacgatgttcctttactcagcgatgatgtggaaaagaaggatgaagccgtcgtggctccagtgacagttgtaccgccggccaagccgctaagcgaaatcaatgtggaactggacaatatacaggccaccggggagcagcgcatcgttctcgacgacgacgacatgcagctcagtctgaacttcaccagcgatcggcccggccatcgtgtgtcggtgattgtgatatcggctcagaacaagagtcgccagccagtgcgcgactttcagttcgaggccagcgtgaagaaggtgagcgaatcagagctggagaagattactggtcatcgaggtgaccggactaacaagctatcattctattccgcagccctgcaaggtgcgcctgttgacgccgacggacagccaaatgccgccgcacaagcccttccgcccggccacgcccatcaaccaggtgatgctcctgctaaatccgacaggcaaggccgtggacgtaacatgcattgtgggctacaagctgggcgacgatccggatcccatcaaggaatcgattgtggccaaaggcattgactatgtggactaaaataccccgacatataagtatcacccgctcccgtccactgaaagcgcaggaggaaaatgaaaagaacgaaagacagtcaattttcccgcatctatgttgtgctccccattatcttaaagatacttttggtttttcaatttctgtattgtatgtgtatgtacgctgataagatttttattcaaattgcattttgcatacaaacgatttagtcgtaatataattatgtatcaaaggtttataaattatgaaaaagtcgctacaaaagccaagcgctcattttcagaggtattctcattaatctgttcaattgttgtgtggatgttgttttagttgatgcttcagttcagttcagttgtcgtgttgcccatatatggattcattgctactctccccactgtttcaaaaaatgccaaattatttgttcctggcggattgtctcgctgggttggcggttttgcggatgattgtacatctgagatatttgttgatttaactggcttaagatagatcgtaattaagttcggaagtgaattaatgagcactgctggcagtttttcaaacattaaggatatcaatttttttgagactatgaattaccattttatatatatgcatctaattgggaaacgtaagctgaactaaaacattgagtctaattaagagtagaaactaaaaccgcgatgcttaacaaaccattacaattgccattcattttgtgtggacttaagccagctaattggtagaatgactaaaactagtaggccaatctttggggaaagccaaatgaaaatccgccaccaggagccacttacaaagtgcctagactctagccgctagctactactactactactacaactactgctatttgcccacgatctcgtccttgaaggacagggcagtgatggccttggtgtgaccagtataatccctaatcgaactctttgtctgcagcttccacagtcgtgcaatgccgtcggatgaggctgtgaacagccatttagaatcggcgctaaaggcggcatcccacacccaatagttctcgatgcacagctcgcgccatttgctaaagtcatccgtcttccaaatgcacacagtgccatcgccggatgtcgtcagcagtagcctggaatcgggactgaatttgcagcgcagtatgtagcgagagtgggccggaattttcctgttcggccgcagcgtgctcatcttctgatcctgactggtcagcgaccagatgtagcagttgcccttgttattggc

SEQ ID NO: 1625 - DNA, 2166 bp, DROSOPHILA
aacaacaacaatatgtctgatgttcgaaatcaacgcaaatattatttatcccccagttaatataattgagcccgcacaatgacaaccgacgagagcataatggaggagatgctggagagagcaacaaatccggcacagaaaatcgacgaactgggcgtgcaaatgttctgcattgtggtcaaaagcaacgcccaattggtgcacaaggcgcaggagatgattgtggccaagctgctggaggagtgcatgacgcagtgcggcgacgacttccaggacgaggcgtccaaattccgctttctcaacgaactgatacgcctggtatcgaagaagtacaagggcgccgagacgccgcacgaagtgaagcagcggatcatggagtgcctactgctgtggaccaccgagttcccgcagcgtcagaagatacgcgatgcctacgacatgttgcgcaaggagggggacatcgaacacggcaccacggaggcggcggtggccaaaagggagagtgtactgggcactattgacgaggccatgttcgccaagctgatcaagagcaataatcccgagaacttcaagcgggccaatctactgctgcagtatcggatggcacaggaggcgcgtcgcaacgatctgctggcccagcatcgtctagtcctttgcgaggtgcaggagacgatgcagctgctcaaccaaatgctggacacctacgatcccgccaaccaggacgtcagcgaaacactgcacgagctatacaagagctgcaagaagcacaagcccatctttcagcatctgccgcagctgctggacgattccgatgcgcagcttgtagctgacactctggatgccaattgcgctctactggccaccatgcagcgctacaagcttctggtgccatcgcccacaaggagcaccgctgctgccttgaccacgagtgctccaacagtagctagttcagtgaagtcgacggccagctcgaccacagccaccactagctccaataacgcccagttgctgaacgaactgctcggcgatttgctcatcgacggaagcaataaagctgcaactacagccaccacaagcctaccaaatgccgcggctagcggttcgaatccgctggccgatttaagtgacatctttagcagcgctctggccgaaagcgaagcgaagcagcagagtcagccattccagaatgcaaccacgctgctggagccgcaggtcattagtcagggcaccacaaccgaggctttggccaatggcaatggaggcagcgccagcaaagtgccggaaacaatcagaaagatgccgcaaatcgatatgctcagcgaggagctgttccagcagatcctgcccacccaggatcggatgcccagcttcaagcgggatcccgagaagatcacgctaaacgacttggcacgcgaacgaatgcacataaaggcgccagaggagccaacgactgctaatgacccagcttctgatagtgctcctgctattgccactgccacagctactgttgattccatagacgatgttcctttactcagcgatgatgtggaaaagaaggatgaagccgtcgtggctccagtgacagttgtaccgccggccaagccgctaagcgaaatcaatgtggaactggacaatatacaggccaccggggagcagcgcatcgttctcgacgacgacgacatgcagctcagtctgaacttcaccagcgatcggcccggccatcgtgtgtcggtgattgtgatatcggctcagaacaagagtcgccagccagtgcgcgactttcagttcgaggccagcgtgaagaagggccgtggacgtaacatgcattgtgggctacaagctgggcgacgatccggatcccatcaaggaatcgattgtggccaaaggcattgactatgtggactaaaataccccgacatataagtatcacccgctcccgtccactgaaagcgcaggaggaaaatgaaaagaacgaaagacagtcaattttcccgcatctatgttgtgctccccattatcttaaagatacttttggtttttcaatttctgtattgtatgtgtatgtacgctgataagatttttattcaaattgcattttgcatacaaacgatttagtcgtaatataattatgtatcaaaggtttataaattatgaaaaagtcgctac

SEQ ID NO: 1626 - protein, 576 aa, DROSOPHILA
MFCIVVKSNAQLVHKAQEMIVAKLLEECMTQCGDDFQDEASKFRFLNELIRLVSKKYKGAETPHEVKQRIMECLLLWTTEFPQRQKIRDAYDMLRKEGDIEHGTTEAAVAKRESVLGTIDEAMFAKLIKSNNPENFKRANLLLQYRMAQEARRNDLLAQHRLVLCEVQETMQLLNQMLDTYDPANQDVSETLHELYKSCKKHKPIFQHLPQLLDDSDAQLVADTLDANCALLATMQRYKLLVPSPTRSTAAALTTSAPTVASSVKSTASSTTATTSSNNAQLLNELLGDLLIDGSNKAATTATTSLPNAAASGSNPLADLSDIFSSALAESEAKQQSQPFQNATTLLEPQVISQGTTTEALANGNGGSASKVPETIRKMPQIDMLSEELFQQILPTQDRMPSFKRDPEKITLNDLARERMHIKAPEEPTTANDPASDSAPAIATATATVDSIDDVPLLSDDVEKKDEAVVAPVTVVPPAKPLSEINVELDNIQATGEQRIVLDDDDMQLSLNFTSDRPGHRVSVIVISAQNKSRQPVRDFQFEASVKKGRGRNMHCGLQAGRRSGSHQGIDCGQRH

SEQ ID NO: 1627 - DNA, 3275 bp, DROSOPHILA
ttaggtaacaatgtccggttccgactatcagatacatatacagacatgaaatctgctgactgtaaagctctccgccctctggaacaaatattcgtgagagccggagccagctctagactcctcccaaaaacgcatattgttattctagtgtctttggtaagagggtatactagattcgttgaaaagtaagtaacaggtagaaggaagcgttcccggccatgtaaagtatatatattcttaatcaagatcaaaataataaaaaataacaaagataattaaacattaacaatggttaaccaattggtggttaattaaccatcaacaatggttaaccattacgctcttactctgcaacttaaatactgatagctacaccctaaacgaattataagatttgataaatgatcttatttaagcatgcttattgtgttctaatattaaattctatagaaaccttatcctgtaaaaggctcaaaaaagtgcaatcgtgccatatttgtggccagaataaatgagaattctaagtcttttaaaataagtaattttaaatcgaatatttcggcagcatatgcgcatattgaaactacgtatattgtatcttgcgtgtgtacatagtttaagttattacctgcggttttttctgtcaaaacgaatggatccaggctcaaagatctcaggagcaaaagcttgggaacgctattaatttaaatttactttaatggaaaattctttgtccggggagaagaatctcaactggatgaactgatgctctcgtcaatactgaaacgctatcggtgggatgcccctatttaagttgcggagatcatttaatttaataagcaaatgcaaataatcataagaccgtataacataatttgtaaaacacgttatgcagtgtgaccgtgcgataaagccagacttatcggctccattaaatatcgatgcgtcgatgtaccgtccttccacctctaattttataactgcatcgaagcgtcagcaattgttgttatttgtaatgcaaaaatcgagctaattccacggtattgtgatgtttttattgtgttcggcaaaagcaattgaaaatcgataataacttaagccgcttaccacaaaatgtaaatctgcagttgcgctatcaactcgaggcggatctaattggataaacaaagcaagtactttgatataacaatttgcatattacacatatatacgtatgttactcataaacagagttattgttcagattgataggctcgcaattggatagtagtagtttctaaatcgatatgtacatttctcagaatccgagagcacgtcatcattgacggatcgtcggctcattccccgataagcaaaacaaagcagtagcctgaggagctgaacaaccgcgcccttagcaaaggagaatctgtggcaccatgccgatactatatagtgtgatatcgcggggcaccacagtgctggcgaagtttgcggagtgcgtcggcaactttgccgaagtgacggagcacataatcggacggatcggggtgcataaccacaagatgacctacacacacggagactacctgatccactacacctgcgagaacaaactggtctacatgtgcatcaccgacaacgtgggtgaacgaaccactggcccaattagccacctcagttgcttattgcccaatcgataacgtatcgtttctttgtaggagttcgaacggtcgcgggccttcctcttcttggcggatatcaagcagaagtttatccagacttacggcctacaggtggccaccgccatcgcctactccatgaacaccgagttctccaagatcctggcccagcagatggtctatttcagtcagtcccgggaggtggacaccatttcgcgagtacatggtcagattgacgagcttaaagacattatggttaagaatattggtatgaaggaaggaaaatccgtatgttctttttgtttactattcccttttcatcccatttgcagacagcttgcgggatcgcggcgagaaactagagctgctcgtcaacaagaccgaaaacttgagcaataatgtaaggtgatgccaagcagagacttttaaatgtgtttttcatttgatctctcttacagtccgttgcattccgtaaggcctcccgaaatttggctcgtcaaatgttttggaagaacatccgcgtctacgtggtggtgggtctggtgataaccttcatcgtttacgtgattgtgagcatggcctgtggtggcctcgcttggcagtcctgtgtttaggacaagctttaaagttgtttatattgttataggctcataacacatgtatatttgcatataaaactctacagtactctcatctatgttctatgtaataaacttcaatgtataccggataaagtgttagaagagataatggaatattcacttgtcctccacatacacgacgtcgttggccttcacctttcccggcagccgaagtcccatatgaacgcccagagccggcgaactgtagttgaacaagcgatagctgtggattccagatatgagggtcgggttttgtaagtcgtacttctcagatatttccatgggtagtgactcaccttctgagcgttttgagaggctctccttcggaactcctctctgcggtcttcgcattaatgttggtaaaaatacagcgagtgcatggcgccaccgtacggaaaacagcatcttcgcctatacgcacccactgccaattgtcctcggcatagggctcatcaacatccattttcagttcgaagttacctcggaactgcagtgcatccaccggattctttaaccgagtattaagatcggcgaccgacgaaaggttcatcagcataaagctggtggcatcgttaaaagtgccctatggaaagaattcaaatcaagggtgatctgggtcctaacacttcgaattgcgcatcaggaacataccgagtcctcctgtctaatgaatggcatggactttaggcggggattggtgcatctcactggtttcggatagggatagtgaactagcttgaggccgctctccttcttcaggatggcctgggagaaccacgtgttgatccgatctccgcagggcatcacgtctatggaaacgccccaaacggaagttttcacatccttgccaggaccgtccagcttctcgaagtccagctccaggtctggcatgtcctgggcgctgaacacaagcttgctgggcgacaccttcttcgacttgatctgggtcataagcggatacacccgagccgtg

SEQ ID NO: 1628 - DNA, 941 bp, DROSOPHILA
ttgttgttatttgtaatgcaaaaatcgagctaattccacggtattgtgatgtttttattgtgttcggcaaaagcaattgaaaatcgataataacttaagccgcttaccacaaaatgtaaatctgcagttgcgctatcaactcgaggcggatctaattggataaacaaaatccgagagcacgtcatcattgacggatcgtcggctcattccccgataagcaaaacaaagcagtagcctgaggagctgaacaaccgcgcccttagcaaaggagaatctgtggcaccatgccgatactatatagtgtgatatcgcggggcaccacagtgctggcgaagtttgcggagtgcgtcggcaactttgccgaagtgacggagcacataatcggacggatcggggtgcataaccacaagatgacctacacacacggagactacctgatccactacacctgcgagaacaaactggtctacatgtgcatcaccgacaacgagttcgaacggtcgcgggccttcctcttcttggcggatatcaagcagaagtttatccagacttacggcctacaggtggccaccgccatcgcctactccatgaacaccgagttctccaagatcctggcccagcagatggtctatttcagtcagtcccgggaggtggacaccatttcgcgagtacatggtcagattgacgagcttaaagacattatggttaagaatattgacagcttgcgggatcgcggcgagaaactagagctgctcgtcaacaagaccgaaaacttgagcaataattccgttgcattccgtaaggcctcccgaaatttggctcgtcaaatgttttggaagaacatccgcgtctacgtggtggtgggtctggtgataaccttcatcgtttacgtgattgtgagcatggcctgtggtggcctcgcttggcagtcctgtgtttag

SEQ ID NO: 1629 - protein, 218 aa, DROSOPHILA
MPILYSVISRGTTVLAKFAECVGNFAEVTEHIIGRIGVHNHKMTYTHGDYLIHYTCENKLVYMCITDNEFERSRAFLFLADIKQKFIQTYGLQVATAIAYSMNTEFSKILAQQMVYFSQSREVDTISRVHGQIDELKDIMVKNIDSLRDRGEKLELLVNKTENLSNNSVAFRKASRNLARQMFWKNIRVYVVVGLVITFIVYVIVSMACGGLAWQSCV

SEQ ID NO: 1630 - DNA, 2910 bp, DROSOPHILA
cgctttttagtaatacttgttgccaatatattttgccagatttctgtcgtggcaagttaagctggctgataaaacttaaattattgcctgtacttggcaattgatgagtgccattattagagtaagtccatagtctgtaatgtaatccttcgatcttacaatttatataaaattaaagattgtcaagacgattatcacatttgcaaatcgaaccaacatacaaaaatcaaataaatatacatttacattacatactatcatattctatcagtaaaatatttactaagcagcagctttaaaagtcgcgatcgcatgacgaaatgaatcaacgctttaaattttgtcctttaaggatacttttcaattcttaagctaaacaggaaactagatatataaataattaaattctaaaagtcgtagtctgttacgtctttgacgatctgaaaggtttatgtttgatatttacgaggtacgcatatcttcctcaacaatcacacttatgtctctaatctagtttaggacacacgtacgatgaatgataattacttgagtagcgaccataaataaacgtctttctctactgataaaaatgtactactaggagctaccagctaaaaattatgaactgattgcggctttcattcattatttttgtactcattcagcattgcaatggaaagtccatactacgattactttaccattatatcaaaactttaaagactaacataaaaataaaaacaaaatgtttagggaaatatggtaagacaacggagttttcacacattacagaatatacgaaactttgaaatcttgagtacacgccatatattcacgaaagactcgttccgttcctcccacttctcagacgccaaacttatcatgccaaattctggacaaaatatacagccgtcgtttcctgggaatgataagccattgtattcagtataaaagtgcgttcagtttttggaaaaaccatgagttgtaagacctgtccaagatgaaactgctcgtattcctggctctggccgtggccgcagccacagccattcctaccccagagcaaaagttggtccccaccccggtgaaggatgtcaagatccagggtcgcattaccaacggctacccagcctacgagggcaaggttccctacatcgtgggtctgctgttcagcggcaatggaaactggggggtgcggtggctcgatcatcggaaacacctgggtcctgaccgccgcccactggaccaacggagccaggtggagtgaccatcaactacggagccagtctgcgcaaccagccccagtacacccactgggttggaagcggaaacttcgtccagcaccaccactacaacagcggcaacctgcacaacgacatctccctgatccgtaccccgcacgtcgacttctggcacctggtcaacaaggtggagctgcccagctacaacgaccgctaccaggactacgccggatggtgggccgtggcctccggatggggcggcacctacgatggcagcccactgcccgactggctccaggctgtcgatgtccagatcatgtcccagagtgattgcagccgcacttggtctctccacgacaacatgatttgcatcaacaccaacggcggaaagtccacctgcggaggtgactccggtggtcccctggtgacacacgagggcaaccgcctggtcggagtgacctccttcgtttcctccgccggctgccagtctggtgctcccgctgtcttcagccgtgtcactggatacttggactggatccgcgacaacaccggcatctcgtactaagtgaatgagcagtaacgaatttagcaaattttaaagaacactctgtctgcagtcatttagattacggatgagagactccaaataaataattgcaatgagaatataaccacctgttcagctatgaaatttgagggcaggagatggagagatttagagagtcacatcgaaatagttgtttacttagcatcacttgtgagggtgtttgtatctgacatctttgtttgcacagcgtttatgtctggatacgtgacagtttccaaatggaatatcgttctatttggctcagttcgtacctgaacaagaaccagtctacatcagtaactcgtggttcacagtgctctggtcataatgttggatcggcactgtctttatattgggattttccagcttataatttgggttggagtagcgaacggtgagttttactcatcggtggacagtatgcaggatctagcacaagtggaagaagaactcctaaatgccacgcgttcatatgtggagtcccagcaaaagcagcttgacttctaccgcaggtactacgacacaatacaaagtagtctggaaaattacttgagtatttaacaggtatgttgagcaaataaaacgggaacatgagtgggcgacatcccaattaaagctggatgactatctcgggcacccattgcacgccttcagattgatcaagcgattggttcgggattgggattcgctgatctttgaacccatactcgccaacaacgccagagaaggtaggtattgttatcccataattaactcatacaataaattctgaacacccaaaagagttccgtgcattcgtggaggttctgagcagggacttgggctacccagatcaatctgagctccagggagccatcaagggcttggccaggctacaaaaggtctataatctcgcgacctccgatttggccgatggcatcatcggcggtttaaactacggctcggacttacgatggcgtgaatgctacgaaatcggtgtacagctcttcgatctcggagaatatcagagatccctggaatggcttcaagttgcatttatccttcttcgaaatagtccaagagaggaaaaagatgcggatcact

SEQ ID NO: 1631 - DNA, 797 bp, DROSOPHILA
atgaaactgctcgtattcctggctctggccgtggccgcagccacagccattcctaccccagagcaaaagttggtccccaccccggtgaaggatgtcaagatccagggtcgcattaccaacggctacccagcctacgagggcaaggttccctacatcgtgggtctgctgttcagcggcaatggaaactggggggtgcggtggctcgatcatcggaaacacctggtgaccatcaactacggagccagtctgcgcaaccagccccagtacacccacatccgtaccccgcacgtcgacttctggcacctggtcaacaaggtggagctgcccagctacaacgaccgctaccaggactacgccggatggtgggccgtggcctccggatggggcggcacctacgatggcagcccactgcccgactggctccaggctgtcgatgtccagatcatgtcccagagtgattgcagccgcacttggtctctccacgacaacatgatttgcatcaacaccaacggcggaaagtccacctgcggaggtgactccggtggtcccctggtgacacacgagggcaaccgcctggtcggagtgacctccttcgtttcctccgccggctgccagtctggtgctcccgctgtcttcagccgtgtcactggatacttggactggatccgcgacaacaccggcatctcgtactaagtgaatgagcagtaacgaatttagcaaattttaaagaacactctgtctgcagtcatttagattacggatgagagactccaaataaataattgcaatgagaatat

SEQ ID NO: 1632 - protein, 230 aa, DROSOPHILA
MKLLVFLALAVAAATAIPTPEQKLVPTPVKDVKIQGRITNGYPAYEGKVPYIVGLLFSGNGNWGVRWLDHRKHLVTINYGASLRNQPQYTHIRTPHVDFWHLVNKVELPSYNDRYQDYAGWWAVASGWGGTYDGSPLPDWLQAVDVQIMSQSDCSRTWSLHDNMICINTNGGKSTCGGDSGGPLVTHEGNRLVGVTSFVSSAGCQSGAPAVFSRVTGYLDWIRDNTGISY

SEQ ID NO: 1633 - DNA, 9159 bp, DROSOPHILA
atcacggatttcaatttcgggctgggtgcagactacgggccacatactttggatgtcggcggcgaaacgcagcgcggaaaaaaatgtgcttacatgataattttttgtttaaaaatagatttaacagtaggacagtgacggaagcgtccacggactcggatacccagatcccggtgtcggtgtcgattaagcgaacaaatctacaggtcgccgccacctcgcttttggagcatctgagcgaaccgctgggtgataagcagcgacgtgtcgatgaatcggtcgacgcagttgctcaggcacgtctcggtggcgtggtccagcttggtactcggcttgccgatgcacttctcccagcagatctcgttgaactcgtgtatctggcgacgatataatgtgcgagggcatattgttatgattacgaatggttattatgtgtatgggggaacccggctcacctgcgcgttgacctgtgccttctgtttctcaatcaagaggaactcctgcagctccttgtcattgccggaaaggttctcaaaatcggacatcgtgtgattttcagtgagcaatctacaaattgaccgggctcgtccggaatttcatatattctaaggtttgaggttatataaacgacactgacagctgtgaactgtggaattacaaaaatcgatgtgtattcgatagcaaagctattcgatactggaaatgccgtgcatattgcactgtttgcactgttgtcatatttaaatggcaagaatatagacgccatagagcaaataacagtatatttttttttcttaagcatcctcctcctgccaacgagggtatacaattttcaagaatacatttctaaagtaagttgttatttatatttactgagaactatcgaaaaagaactagaacctcgcgttgccaaccactggttcgcaaggtgcgatagtacaggttattggacaatcgatgacaaagtggctcggccgtcggccaatcgatatcgtgaggtgcaaattgtccgatgaatttcactgaaattcgtggcttgtattgtagcttcgcaattgcagcttcgtttcgacagcaggcccactttcagatcgaaggcgtctataatcgccatccagtcccgtcgccctgttcccacaacgccccacaaatttcgggatctagctggcgtttcgggtgtctaatttcggaccagtgcactgtgatttccgatttccagtttactttgctgacggatcgcccaagtggcgaagtggttcttgctcggaaagttggcgcttgctaaaagaaggagcagtccaggtggttccccgccagtggcatcaatggaactcgcgctggagtttggggcaaccttgcaactgcaagggtaagagcatcgccgattccaggagcattcgcagtaagcccaaaaatagcaactcaagtcagtcgcggtggtcattgttattggcaagaagaagaggaaacggatagaacgcggcaaattcctaggaaagctcccatgatctagcttcagtgcggccgcgtaaggaaactgctccagccaaggaactgggcttgcaggagcagcagatagcacccagcccacaagggaccactcaccgacaatcctctcatggccctggccaacgggggagaggatagaatggacgacagcagcagcggacgcacttcgctggcggacagcgccagcctgacgaactcctcgctgcgcagcggcacctcctcgcagagcatccacaccaacgatggcacaatccgtgtgttcaacttcaccaccggcgaatttgagcgtttccatcccaacatgctgtgcgaggagatctgcaatacgatgtgccgccagctgggcattgcaccaattgcccagctgctctacggaatacgggagcactcgacatcgcgacgtccctcgccgctggtgcgtttggatctgacgtggtgcctgcccggcgagcgactcaactgccagctggtctattgctttcggatgcgtttccgtgtgcccgaattggatagccagctggagttgatcgatggacggagccacaagttcctctaccgccaaatgcgctacgatatgcggaccgagcaaatcccggagattcgctatccggagcacaaggacaaatcaacgggactggccgtgatggatatgctaatcgacgatcaggaacagtcggaggatcagcaggcgatgcgctccatcgagaagctttacaaactgtatttgccaccgagcttgtggcgcgcccacagcttctttgtgggctccaagatacgtgaggttttccgcagtctaaaagcgaattcgctgagtgtggagcgtttgaagtggcactatgtgcatcaggtatcccatttggcgcccacctatatgaccgaacagttcacctgcaccgttcagtatctgcccaacgaggaggtggcccgcggtagcggacccatcggcaccagtctggcccactcgacgtcgacgctggccagttctggatcgaccaacactctgtccacgctcaccaccaacaccaattccgttgcactcggcggcagtggcaagaaggccaaacgacgttccaccagcggtggaatcgatgtctatgtgcgagtctttccacacgattccctggagcctggactcaaggtggccagggtcacctccgaggccacactcaaggtacacactatgtttccttctgaaatcttatatggtttcttgtggttttcccatcgaaatgcgcattttaatgctggccattttaaatatggaaataccattaatattataatatttaaaaaacattttgatagatttctcaatttaattaacgcgattgtcttggtaatcaagttgcttatcgctggcaaagattcttgaaatattcatacatacataccatatgtaattgcactagcatcccattgataatcctcatttcctctgcagtggatccttgttggcgccgtggaaggaatttttatgatctccaaaatcaacgacacctctgtgcggctggaaatcgttggtctgcccaagggctacgagatgcagtttcagacggagaaggagatgaagtccttcatctcctacctgggtatctacatcaggtgagtggttcacttgtaatcggtgagctttagatcccaaagagttcgcttccaactaaattttaatcttttaagccgaacttgcttggtctttttttcaccagaatttataggcatctcattgtagtgttcgtgtaacaataatcagtgcccaatgttcttaatcaaactactcaattgttttttttaacatccattgatttaaaaaaaaaaacatcaagtcatcaattccacgaactcatttaataacataataattccacttaaaagttaatgattcccacataaatatgacatttgataacacgattaaatacagtgcttgaaatgcttgcttttttgtttaaagagtttgttaaaaccaagtccctgtttgttttgtaatccaacacacaaagtcggttttcgttatcaggctaaaattaaaacaagcaagaaatttaaaactaaatgctttcagaagatttcttcagttaaattgattaaataattacgcactaatcggttttaaatgttacattgctatttatatcgcctgcgtcaatgtgcagtacttctcaataactcaataaagttatatgtacgtaattgaaacaattgattcccagctatagaatcacttttcaaatgcaataataataataataataataataataacaatgccaatggacagcaacaaatgtgcgcaacttataactcgtatttgccatccgtttattccttgcagattgtcgagcaaatggatgcaggatctgtgccattcgtaccgcacgccctccctggaggagctgagctccctccactgccatggtccaatcggcggtgcctactcgctgatgaagctgcacgagaacggtgacaagtgcggcagctatattgtgcgtgaatgcgatcgagaatacaacatatactacatcgatatcaacaccaaaatgtgagtacatgcgcgccttcacacagttatcagttacttcctcctcgctggttatcaggcttacaaacatttctgtatgcaatgccacatgatacacaaaaatgctgtgtgcgctatgtggccaattgtttcgcttactgatgattgcctgtgtgtgtgtgtgattgatgatgcccaaattagatgtgatcggttttatctcatgcgaaaatcccgctcacctttgcagcatggccaagaaaaccgatcaggaacgctgcaagacggagacatttaggatcgtgcgcaaggactcgcaatggaagctaagctacaacaacggcgagcatgtactaaactcactgcacgaagtggcgcacatcattcaagcggatagtcccgatcgctatcgcatacccgcctccaaatatgacaagccgccgctgctgctactgctgctgccaaagaacctcaaggccaaaaagactgacctccagctgagcgaggcggagctgcagcgccgcaatccgcagatcttcaatccccgaacggatctgcagtggtatccaggtgggtcatactatatattctaatgccttgcttcgttctaatcgctcgtcttttgcgcagattcgatatcgcttagcgacgatggcatgatgtttacgatgcgcggcgattggatccaacagagtcccgtcaaggatgtgtccgtgacgatgaaaatgctaaagagcgatggcaatttcatggagttctttcgcttggcacagacctggagcctcatccagtcgccgcagttcctcaagctgtacggcctaacgctcgccgatccgtacacaatggtcatggagtattcgcggtatggtccgctcaataagttcctgcactcgatgcccaatgtaacactgcattgtctactggatctgatgcatggattggtgcgcggcatgcactatttggaggacaacaagattatccacaattacatacgatgcagtaatctgtacgtgaccaagtacgatccgaattcgtacgtgctagacgcgaaaattagcgatcccggctatccgcgtccctaccgagaatccgagtgagtagccgacaaatacaacttaatcatcttctcggttgggtcatactctttgataaaacaaaaaaaaagcaaacagcattttaaataacatcattcattctccactttcagctcgccatggatacctgttaagtattatcgcaatttgcaagcagccaaaacggatcagtttgcccagctgtgggccttcgctaccaccatatacgagatcttctcgcgctgcaaggaagatctgagcacactgcgccaggagcagctactcaggcagaaaaatctcgatggcaacatactcaagatgctcgatcaggacatctgtccggcgccgatattcgagacaatcatggatggatggtccgatgatgagaccaagcgcttcagtcaccacgacattttctcgcgtctcaacacgatcaaggcggaaattctgcccaattatatgccgccacccgagatcgcaacgagtaagttgagcagacgaaagcagcgttacgagattggcatacatttcatcttctatttttttttccagatggaactggagacgagaccgtgatcgatagaagcgacataccctttctaccctttccgcgttcgaatatgttgatggtcataccgctgaccagcgaatgtcgagtgatctacaacatggagaacatgatcgggcgcggtcattatggcactgtctacaagggtcatctggagttcaacgacaaggatcagccgcgcgagcaggttgccatcaagatgctgaacaccatgcaggtgtcgaccgattttcatcgcgagatcggcatcatgcgcaccctcagtcatccgaacatagtcaagttcaagtattgggctgagaagtcgcactgcatcattatggaatatctgcaatctggttccttcgacatttacctgcgtttcacggcacccaatctcaataatccacggctcgtcagcttcgctttagatattgcaaatgtgagtggttcgaatatggctttagaacggaacaagttttccggaaaaaagagggaaaactcaaagaaaaatctacaaatattttaagggtttttgcatcataacttggccaaaagtggtcaaatttcgaagggaatgactgtttttaaaagcttatgatcccaattaacaaatcctatttctttttttttgaatttggtggattcaaaatttttccatttttttgaattttttacaaggggtaacatcatcaaaatttgcaaaaaatggcaaaaaattaaaagttcccattttgaaccccaatcgattgggaattaaattacgagccaaacgaggtataacaatccatatttgggctactactacccaagatgtggccaaaaaactgcccattttggacaaaaaaccacaaaaaagaactttggtatagaaaactcatgtttacgactttagaagagatatttccttttgatccagtacttaatccaaatgcttctcgtcgcagggcatgaaatacttgtccgacatgggactcatccaccgcgacctggccgcccgcaacattttggtggaccacaacggcgatggtgactgcgtcaaaatctcagacttcggcctggcgcaattcgccaattccgatggatattactatgcgaaaagcaagcgtgatattcccattagatggtaagaaaaaaagaagatggattgacggtaggccactatcgcaactgaatatctttgctttccattggtcaggtactctccggaggccatctccacctgcagattctcatcgtattcggatgtttggagctatggcgtgacgctcttcgaaatgttttcgcgcggcgaggagcccaatttggtgccgatccagacatcgcaggaggatttcctcaatcgccttcagagcggcgaacggtgagttatcgtgagatttgggtccatcaacttgttgagtaattcgagtaattcgtttgcttacagcttaaatcgtccggccagttgtcccgatttcatttacgacctgatgcagctgtgctggcatgccacgccccgttcgcgacccagtttcgcgaccattgtggacatcatcacaagggaggtggccaccaaggtgacgcacccgacagatggacaccagtcgccgccgaatcagccgacggatgccgagtgactgttgacaactgaatgaaatcgatatacacacacaattaggcataaggtcttttaagatgttagcatttaaactgtacgtttttaaaacaacacaagccagaccccaaaaaccacttgacgcaatccttggcttaaagcgctatcggaagaatcacattgacccccaaccaatcaatcattcatccataccaaatccggatacacttacgccatcgcaagcatttttggattctcgccagatcttagttttatttgattgtgcttaccactggccacgcccccctacctccaatgtcattaagcccacccctcctcccccctcttgacaaagcgaaagtccacactttatatgatatatgtatatgtataaacaaattctcaacctactttgtgttatacattttagacaactttgttaaatattgttaagcttgagcttcaattttttttttgtaatgcccacaccacgcataaacactgaactaaactaaactaaattaatcataacgtgtaaataataattaaattagttaagggtttaatcgcgaaacggcaacacacggtaatttacaaaatgaatggacgtcgacagaatcgaaaggatgctgctgcgatctgttctgttcggcgactaagtcgaaccgcctaatctacgcaaaaaaaaaaaagtaacatgtgcacatatagtcgtaaggtatgtcaattaatgttgatcaaatgccattttaacctacaatacttcgaaacagaaacgaattatatatttacaagctatacaagccactatacaagccggtatatgcacaaccacacacccgcaggcacaataacttattattgctgttaacgagaaaggatatttccgaaataaatcaattttcttacgtgtttaaatgctaacttttattaactgcgaaccattaggttagcagcatatgggaattctaatctacacataacatcatataatgatgtcattatatatagaaggtttttctacgaaaacgaaagggatggagttacgttttccggaacaaccttggcttatcataattcttagtagtctatttttagctcatgagaagttgatattgtttagtagggcaactgtgctgattcatttcgtattagttgtatgtacggaagttgactgatctacagttgccttactaaatagttatcttactcatcttggatttaaatgtacatccgttctatcctacattctatattctagttttaacagctattagtgaaattcagttcttttatgtacagaagttgactgatctacagttgcctatcttgttatctgctttactcgcattggatttaaatttacatccgttctatcctatattctatattctagtcttcaaacgtcggtttcggacaatactatcaagaatattgtcataatatatcaaataaagacaattaacatttagaacgtaaatttcccacgtgctaattaaggatcacatacacatccctctgcttaaacataagttgattagttctatgctatcttctcaattacaagttcttagtctaaaatgaagaactgaccaatgcaatgggagttaacatccttaacagctagttatgcatatatggtaattgaagttcaaacttctctgagttgcaacttgttggttcacaaagttttttagaattccaaagactgctgcaatttaagctacaagctagtcacatgaatatggtaattaagtcataatatgcctatgttttgatgtttaaacttcctctctagatgctgactaataagtcataataagcttatgttttgatgttcaaacttcaaactctctaaatgctaactataagtatggtaatttaaatcttaagtaaattgaagttcaaactctct

SEQ ID NO: 1634 - DNA, 5045 bp, DROSOPHILA
gcaaattgtccgatgaatttcactgaaattcgtggcttgtattgtagcttcgcaattgcagcttcgtttcgacagcaggcccactttcagatcgaaggcgtctataatcgccatccagtcccgtcgccctgttcccacaacgccccacaaatttcgggatctagctggcgtttcgggtgtctaatttcggaccagtgcactgtgatttccgatttccagtttactttgctgacggatcgcccaagtggcgaagtggttcttgctcggaaagttggcgcttgctaaaagaaggagcagtccaggtggttccccgccagtggcatcaatggaactcgcgctggagtttggggcaaccttgcaactgcaagggtaagagcatcgccgattccaggagcattcgcagtaagcccaaaaatagcaactcaagtcagtcgcggtggtcattgttattggcaagaagaagaggaaacggatagaacgcggcaaattcctaggaaagctcccatgatctagcttcagtgcggccgcgtaaggaaactgctccagccaaggaactgggcttgcaggagcagcagatagcacccagcccacaagggaccactcaccgacaatcctctcatggccctggccaacgggggagaggatagaatggacgacagcagcagcggacgcacttcgctggcggacagcgccagcctgacgaactcctcgctgcgcagcggcacctcctcgcagagcatccacaccaacgatggcacaatccgtgtgttcaacttcaccaccggcgaatttgagcgtttccatcccaacatgctgtgcgaggagatctgcaatacgatgtgccgccagctgggcattgcaccaattgcccagctgctctacggaatacgggagcactcgacatcgcgacgtccctcgccgctggtgcgtttggatctgacgtggtgcctgcccggcgagcgactcaactgccagctggtctattgctttcggatgcgtttccgtgtgcccgaattggatagccagctggagttgatcgatggacggagccacaagttcctctaccgccaaatgcgctacgatatgcggaccgagcaaatcccggagattcgctatccggagcacaaggacaaatcaacgggactggccgtgatggatatgctaatcgacgatcaggaacagtcggaggatcagcaggcgatgcgctccatcgagaagctttacaaactgtatttgccaccgagcttgtggcgcgcccacagcttctttgtgggctccaagatacgtgaggttttccgcagtctaaaagcgaattcgctgagtgtggagcgtttgaagtggcactatgtgcatcaggtatcccatttggcgcccacctatatgaccgaacagttcacctgcaccgttcagtatctgcccaacgaggaggtggcccgcggtagcggacccatcggcaccagtctggcccactcgacgtcgacgctggccagttctggatcgaccaacactctgtccacgctcaccaccaacaccaattccgttgcactcggcggcagtggcaagaaggccaaacgacgttccaccagcggtggaatcgatgtctatgtgcgagtctttccacacgattccctggagcctggactcaaggtggccagggtcacctccgaggccacactcaagtggatccttgttggcgccgtggaaggaatttttatgatctccaaaatcaacgacacctctgtgcggctggaaatcgttggtctgcccaagggctacgagatgcagtttcagacggagaaggagatgaagtccttcatctcctacctgggtatctacatcagattgtcgagcaaatggatgcaggatctgtgccattcgtaccgcacgccctccctggaggagctgagctccctccactgccatggtccaatcggcggtgcctactcgctgatgaagctgcacgagaacggtgacaagtgcggcagctatattgtgcgtgaatgcgatcgagaatacaacatatactacatcgatatcaacaccaaaatcatggccaagaaaaccgatcaggaacgctgcaagacggagacatttaggatcgtgcgcaaggactcgcaatggaagctaagctacaacaacggcgagcatgtactaaactcactgcacgaagtggcgcacatcattcaagcggatagtcccgatcgctatcgcatacccgcctccaaatatgacaagccgccgctgctgctactgctgctgccaaagaacctcaaggccaaaaagactgacctccagctgagcgaggcggagctgcagcgccgcaatccgcagatcttcaatccccgaacggatctgcagtggtatccagattcgatatcgcttagcgacgatggcatgatgtttacgatgcgcggcgattggatccaacagagtcccgtcaaggatgtgtccgtgacgatgaaaatgctaaagagcgatggcaatttcatggagttctttcgcttggcacagacctggagcctcatccagtcgccgcagttcctcaagctgtacggcctaacgctcgccgatccgtacacaatggtcatggagtattcgcggtatggtccgctcaataagttcctgcactcgatgcccaatgtaacactgcattgtctactggatctgatgcatggattggtgcgcggcatgcactatttggaggacaacaagattatccacaattacatacgatgcagtaatctgtacgtgaccaagtacgatccgaattcgtacgtgctagacgcgaaaattagcgatcccggctatccgcgtccctaccgagaatccgactcgccatggatacctgttaagtattatcgcaatttgcaagcagccaaaacggatcagtttgcccagctgtgggccttcgctaccaccatatacgagatcttctcgcgctgcaaggaagatctgagcacactgcgccaggagcagctactcaggcagaaaaatctcgatggcaacatactcaagatgctcgatcaggacatctgtccggcgccgatattcgagacaatcatggatggatggtccgatgatgagaccaagcgcttcagtcaccacgacattttctcgcgtctcaacacgatcaaggcggaaattctgcccaattatatgccgccacccgagatcgcaacgaatggaactggagacgagaccgtgatcgatagaagcgacataccctttctaccctttccgcgttcgaatatgttgatggtcataccgctgaccagcgaatgtcgagtgatctacaacatggagaacatgatcgggcgcggtcattatggcactgtctacaagggtcatctggagttcaacgacaaggatcagccgcgcgagcaggttgccatcaagatgctgaacaccatgcaggtgtcgaccgattttcatcgcgagatcggcatcatgcgcaccctcagtcatccgaacatagtcaagttcaagtattgggctgagaagtcgcactgcatcattatggaatatctgcaatctggttccttcgacatttacctgcgtttcacggcacccaatctcaataatccacggctcgtcagcttcgctttagatattgcaaatggcatgaaatacttgtccgacatgggactcatccaccgcgacctggccgcccgcaacattttggtggaccacaacggcgatggtgactgcgtcaaaatctcagacttcggcctggcgcaattcgccaattccgatggatattactatgcgaaaagcaagcgtgatattcccattagatggtactctccggaggccatctccacctgcagattctcatcgtattcggatgtttggagctatggcgtgacgctcttcgaaatgttttcgcgcggcgaggagcccaatttggtgccgatccagacatcgcaggaggatttcctcaatcgccttcagagcggcgaacgcttaaatcgtccggccagttgtcccgatttcatttacgacctgatgcagctgtgctggcatgccacgccccgttcgcgacccagtttcgcgaccattgtggacatcatcacaagggaggtggccaccaaggtgacgcacccgacagatggacaccagtcgccgccgaatcagccgacggatgccgagtgactgttgacaactgaatgaaatcgatatacacacacaattaggcataaggtcttttaagatgttagcatttaaactgtacgtttttaaaacaacacaagccagaccccaaaaaccacttgacgcaatccttggcttaaagcgctatcggaagaatcacattgacccccaaccaatcaatcattcatccataccaaatccggatacacttacgccatcgcaagcatttttggattctcgccagatcttagttttatttgattgtgcttaccactggccacgcccccctacctccaatgtcattaagcccacccctcctcccccctcttgacaaagcgaaagtccacactttatatgatatatgtatatgtataaacaaattctcaacctactttgtgttatacattttagacaactttgttaaatattgttaagcttgagcttcaattttttttttgtaatgcccacaccacgcataaacactgaactaaactaaactaaattaatcataacgtgtaaataataattaaattagttaagggtttaatcgcgaaacggcaacacacggtaatttacaaaatgaatggacgtcgacagaatcgaaaggatgctgctgcgatctgttctgttcggcgactaagtcgaaccgcctaatctacgcaaaaaaaaaaaagtaacatgtgcacatatagtcgtaaggtatgtcaattaatgttgatcaaatgccattttaacctacaatacttcgaaacagaaacgaattatatatttacaagctatacaagccactatacaagccggtatatgcacaaccacacacccgcaggcacaataacttattattgctgttaacgagaaaggatatttccgaaataaatcaattttcttacgtgttt

SEQ ID NO: 1635 - protein, 1177 aa, DROSOPHILA
MALANGGEDRMDDSSSGRTSLADSASLTNSSLRSGTSSQSIHTNDGTIRVFNFTTGEFERFHPNMLCEEICNTMCRQLGIAPIAQLLYGIREHSTSRRPSPLVRLDLTWCLPGERLNCQLVYCFRMRFRVPELDSQLELIDGRSHKFLYRQMRYDMRTEQIPEIRYPEHKDKSTGLAVMDMLIDDQEQSEDQQAMRSIEKLYKLYLPPSLWRAHSFFVGSKIREVFRSLKANSLSVERLKWHYVHQVSHLAPTYMTEQFTCTVQYLPNEEVARGSGPIGTSLAHSTSTLASSGSTNTLSTLTTNTNSVALGGSGKKAKRRSTSGGIDVYVRVFPHDSLEPGLKVARVTSEATLKWILVGAVEGIFMISKINDTSVRLEIVGLPKGYEMQFQTEKEMKSFISYLGIYIRLSSKWMQDLCHSYRTPSLEELSSLHCHGPIGGAYSLMKLHENGDKCGSYIVRECDREYNIYYIDINTKIMAKKTDQERCKTETFRIVRKDSQWKLSYNNGEHVLNSLHEVAHIIQADSPDRYRIPASKYDKPPLLLLLLPKNLKAKKTDLQLSEAELQRRNPQIFNPRTDLQWYPDSISLSDDGMMFTMRGDWIQQSPVKDVSVTMKMLKSDGNFMEFFRLAQTWSLIQSPQFLKLYGLTLADPYTMVMEYSRYGPLNKFLHSMPNVTLHCLLDLMHGLVRGMHYLEDNKIIHNYIRCSNLYVTKYDPNSYVLDAKISDPGYPRPYRESDSPWIPVKYYRNLQAAKTDQFAQLWAFATTIYEIFSRCKEDLSTLRQEQLLRQKNLDGNILKMLDQDICPAPIFETIMDGWSDDETKRFSHHDIFSRLNTIKAEILPNYMPPPEIATNGTGDETVIDRSDIPFLPFPRSNMLMVIPLTSECRVIYNMENMIGRGHYGTVYKGHLEFNDKDQPREQVAIKMLNTMQVSTDFHREIGIMRTLSHPNIVKFKYWAEKSHCIIMEYLQSGSFDIYLRFTAPNLNNPRLVSFALDIANGMKYLSDMGLIHRDLAARNILVDHNGDGDCVKISDFGLAQFANSDGYYYAKSKRDIPIRWYSPEAISTCRFSSYSDVWSYGVTLFEMFSRGEEPNLVPIQTSQEDFLNRLQSGERLNRPASCPDFIYDLMQLCWHATPRSRPSFATIVDIITREVATKVTHPTDGHQSPPNQPTDAE

SEQ ID NO: 1636 - DNA, 4709 bp, DROSOPHILA
aatatgtttcagaaaaactgctcagcttgcagtctattgctatttattaagtatacaatttctttacattaatttgtaaaatttcgtacttattaaaagcataataagatcttattgaatggtcaactattataatatttaaaataaattttttgtatattaaaagacattgattttactcattttgcttttgctttccgagtccgaatcctccgaccaaaaatcatctggcaaacaaatcgctttccagcccattgcgtccgcatcgtcagagatggaattctgctcatccagctggttgaagggactggcattcaaaggacccgaccaactcgcgacgcgactaactggcggtggaataaggcaatcggaattctccttccgatacgttcgagccttcagtttgtttactgcgttgggcaattgcggtacaggcacctcctcctcgtcgtcgtcgggcgatgaagtggaattgggcacatttacgatgtagctaatgggatccaggcggatccctatggttttctgggaggatcggctgtgtggtcgcgtcagatgtggattgccctctcgacgtcgccgtgcgtttctattttccgtcttgagcctcccgtttgccgacctgccgccattgatgacgctcctcgtggatatattcaccgggggcgactttcgcctggcggccagcttcttcggatgcggaatcctgtagcgaccattcgcgtagtcattgcgcggactgacgaaaattccagccaaatatttaagcattttccaagaaagtttactaagaatttaaaataattgcaagcgacgcataagctccgattttatttctgacgatcgagaaatgtgacggaaaaatgatttgttacaaaatttggagaagaaattttggaaatgattaattttatggttttcaaatatagcatagtatagctaggacacaaacccttgtaattccgcatagaaaatagttgggatgatccggcaacgcagtgcggatcgaaataaaaaagaaaacaatgcgctcgcaagaaaattgaagcaacaacaaatagccgataaatcagagccaagggacaagcgcaaaatggctaggaacacgggcagctcctcgggctccacgcccgctgcatcctcatccggatcgagcgcagcagcagcagcggcggcggcagcggcagcagcagcggcatccaatgccaaacagaagcagcgcagcccgcgtttcagtttatcctcgaatttgatcctggacaaatggaaaacgatgattggttgcgtttgcctggcgatagcctcgtacttcggctatctgggctacctggagacgcgcgttaacacgcccttcgatcaccagaagatggtggtgcatgccggcctggagcaaccggatcgctactggggctcctaccgtccgttgacgtacttcggcatgaagaccagggatccgcactcgctggtcatgggcctgatgtggtatacgcccagtaatctgggccccggtggccagggcattcgacactggtgcgagcagggcgataaactggactcgtacggctggacgcatcacgatggccgcagttttggcgttcaagagatccaggatctgcccttcgagctgaagacctcgttcgttaagtatccagagggcaagcagtacggcggcgattggactgccaggatatcggtgaggaatacgacaagggcgtgggacaagagcatctcgctaatctggtatgtggcattggatgagcgcaccaatggacacattaagtacgtgtcggacgacaagagtccggagccgggcgtctatggtgaggcgcagggcctgggcgagttccaagtgcgtttccatgccgtcaagggcaagatactgcataaatcctatctcagcacggtggcaccgtcgctggccaagctcaaggatacgctcttctcgcacttccgcgccttcgccgacaagcgtggcaatcgcttcatcggcctgcccggcgagatagtctcgcagaatggcctgccatcctccaatccggagcccaatttcatagccatacagataacggcggaggtggacttcacgctggacattacgtaccagtcgacgtcgggcttttcgcttggcgagtcgatacccaagccgccgacgggacgagcctatcaggattcgcttcaggcgaaaatagcacaatttgagcagcgtttcgaggatcgtttccagctgaagcagaagggtcactcgccggaggaggtgcgatttgcgcgcaacgcattgagcaatctgcttggcggcattggttacttctatggctccagtcgcgtgcaatcggtgtacacaaagaatccggtgccctactggaaggctccactgtacacggccgtgccgtcgcgtagcttctttcccaggggcttcctttgggacgagggcttccacggcctgttgatcagtgcgtgggacatcgatatcgagctggatatcatatgccattggttcgatttgctcaacgtggagggctggatacccagggagcaaatcctgggcgttgaggcgctggccaaggtgcccgaggagtttgtcacgcaacggaatagcaacgccaatccgccgacgttctttcttacgctcaagaaactgctgaccagccaccgggcggagttgtcgcaaaacggcagattggccacgctggagcggctctatccgcgtgtccaggcctggttcaattggttcaacaccacgcagaggggtaagtcacttagccacctgccatcgctttctatgtggcgtctactaactaactgctccattctaggtgaagtgttgggcacatatttgtggcgcggcaggaacgcgaccaccacgcgcgaattgaaccccaagagtctgtcctccggcctggacgattatccgcgcgcctcgcatcccacggacaaggagcgtcacctggacctgcgctgctggattgccctggccgccggtgtgatggccgaactgtccacgctgctgggcaaggacgatgccaagtactacgagacggcatcgtacttaacggacaatgtgcgtctgaatcgcctccatttggcgccgtacagcgaacagtacgccgactggggcctgcacacggaccaggtgaagctgaagcgtccgccgtccatggcgccgcagcagcagcagcggcatcatcaccagcactaccagctgcccgagatgcaacgtgtgaccggcgagttgccgacctatcagttcgtggacagcgcctttggctatgttagcctgtttccgttgctgctcgagcaactggatcacgattcgccgtatctgaccaagttgctaaacgatctgcgtgatccggaacagttgtggaccaactacggtctgcgttcgctttcgaagagatcgccattgtatatgcaacgcaatacggaacacgatccgccgtattggcgtggacccatctggattaatatcaactatttggcggccaaggcgctgcatcactatggcaagatcgatggaccgaatgcggcgttggcgcgacaaatttacgccgaactgcgcgacaatctggtgggcaacatcctgcggcagtacaagcgcagcggctacttgtgggagcagtacgatgacaccagcggcgagggcaagggctgcaatccgttcaccggctggacggccaccgttgtcctcctgatggccgagcaattctagatctcgcctacacggttttcagcctgccaaaactgctgtgagttcctcaacgaacgaccctgtccccgcattcctggcgaagatcaatgcgtttttgtgtgtgtttggaatagctgggtgcttcaattgcaaacgtttggagtaccaaataaattttacttaaattgtagccaaaactatcatcatctatggagattcgtttgttagttttcgtgtgtgtgtccgtgttgtttgtgacacacgatataccaaagattaatataatgactcgctgtggttttaagtagtttgtgctaagatatttgattgccagttgggcgtgtagcttgtaagcttagagaacaaacccagctattcctagttagcaatttcacgctccagtttgctatacgcgatacttaagatacttggagtgcaaagtaatcatttctcctagcgttaaatagacgaattttaaaattgacaaccgatgtgtagttttatttaagctacaccaacttgtttccgcttcaagtgcaatgcaagttgagttcagtttttccacttttattccatagatctattgaaaattcctgtcgctgggaatactccggtgttatagctatattatacacgattttcttaactatatagtacacacacacaatcgcacacacacacacatacacacacgcaggctgatgatacatacatacatacatatatgtaaatcgtatttcattctactgttgcattaaaaaaggtacaaaaatgatatacctaatggaaaactagcgacataattgcttaatgtgcctacatttatgctaaaaggaaagcggatgaaagaagggaaagtggtcaagtggcatgtgcctccttcgaggagacactctgcatgcatatacaaaacatttagctggaggatgcagttcctctttgttcgctgcttaactcaagtgcttagtcatatctaaagggctaatcgaatcactcatactcgagccacagctcgtccgga

SEQ ID NO: 1637 - DNA, 2709 bp, DROSOPHILA
gcggatcgaaataaaaaagaaaacaatgcgctcgcaagaaaattgaagcaacaacaaatagccgataaatcagagccaagggacaagcgcaaaatggctaggaacacgggcagctcctcgggctccacgcccgctgcatcctcatccggatcgagcgcagcagcagcagcggcggcggcagcggcagcagcagcggcatccaatgccaaacagaagcagcgcagcccgcgtttcagtttatcctcgaatttgatcctggacaaatggaaaacgatgattggttgcgtttgcctggcgatagcctcgtacttcggctatctgggctacctggagacgcgcgttaacacgcccttcgatcaccagaagatggtggtgcatgccggcctggagcaaccggatcgctactggggctcctaccgtccgttgacgtacttcggcatgaagaccagggatccgcactcgctggtcatgggcctgatgtggtatacgcccagtaatctgggccccggtggccagggcattcgacactggtgcgagcagggcgataaactggactcgtacggctggacgcatcacgatggccgcagttttggcgttcaagagatccaggatctgcccttcgagctgaagacctcgttcgttaagtatccagagggcaagcagtacggcggcgattggactgccaggatatcggtgaggaatacgacaagggcgtgggacaagagcatctcgctaatctggtatgtggcattggatgagcgcaccaatggacacattaagtacgtgtcggacgacaagagtccggagccgggcgtctatggtgaggcgcagggcctgggcgagttccaagtgcgtttccatgccgtcaagggcaagatactgcataaatcctatctcagcacggtggcaccgtcgctggccaagctcaaggatacgctcttctcgcacttccgcgccttcgccgacaagcgtggcaatcgcttcatcggcctgcccggcgagatagtctcgcagaatggcctgccatcctccaatccggagcccaatttcatagccatacagataacggcggaggtggacttcacgctggacattacgtaccagtcgacgtcgggcttttcgcttggcgagtcgatacccaagccgccgacgggacgagcctatcaggattcgcttcaggcgaaaatagcacaatttgagcagcgtttcgaggatcgtttccagctgaagcagaagggtcactcgccggaggaggtgcgatttgcgcgcaacgcattgagcaatctgcttggcggcattggttacttctatggctccagtcgcgtgcaatcggtgtacacaaagaatccggtgccctactggaaggctccactgtacacggccgtgccgtcgcgtagcttctttcccaggggcttcctttgggacgagggcttccacggcctgttgatcagtgcgtgggacatcgatatcgagctggatatcatatgccattggttcgatttgctcaacgtggagggctggatacccagggagcaaatcctgggcgttgaggcgctggccaaggtgcccgaggagtttgtcacgcaacggaatagcaacgccaatccgccgacgttctttcttacgctcaagaaactgctgaccagccaccgggcggagttgtcgcaaaacggcagattggccacgctggagcggctctatccgcgtgtccaggcctggttcaattggttcaacaccacgcagaggggtaagtcacttagccacctgccatcgctttctatgtggcgtctactaactaactgctccattctaggtgaagtgttgggcacatatttgtggcgcggcaggaacgcgaccaccacgcgcgaattgaaccccaagagtctgtcctccggcctggacgattatccgcgcgcctcgcatcccacggacaaggagcgtcacctggacctgcgctgctggattgccctggccgccggtgtgatggccgaactgtccacgctgctgggcaaggacgatgccaagtactacgagacggcatcgtacttaacggacaatgtgcgtctgaatcgcctccatttggcgccgtacagcgaacagtacgccgactggggcctgcacacggaccaggtgaagctgaagcgtccgccgtccatggcgccgcagcagcagcagcggcatcatcaccagcactaccagctgcccgagatgcaacgtgtgaccggcgagttgccgacctatcagttcgtggacagcgcctttggctatgttagcctgtttccgttgctgctcgagcaactggatcacgattcgccgtatctgaccaagttgctaaacgatctgcgtgatccggaacagttgtggaccaactacggtctgcgttcgctttcgaagagatcgccattgtatatgcaacgcaatacggaacacgatccgccgtattggcgtggacccatctggattaatatcaactatttggcggccaaggcgctgcatcactatggcaagatcgatggaccgaatgcggcgttggcgcgacaaatttacgccgaactgcgcgacaatctggtgggcaacatcctgcggcagtacaagcgcagcggctacttgtgggagcagtacgatgacaccagcggcgagggcaagggctgcaatccgttcaccggctggacggccaccgttgtcctcctgatggccgagcaattctag

SEQ ID NO: 1638 - protein, 871 aa, DROSOPHILA
MARNTGSSSGSTPAASSSGSSAAAAAAAAAAAAAASNAKQKQRSPRFSLSSNLILDKWKTMIGCVCLAIASYFGYLGYLETRVNTPFDHQKMVVHAGLEQPDRYWGSYRPLTYFGMKTRDPHSLVMGLMWYTPSNLGPGGQGIRHWCEQGDKLDSYGWTHHDGRSFGVQEIQDLPFELKTSFVKYPEGKQYGGDWTARISVRNTTRAWDKSISLIWYVALDERTNGHIKYVSDDKSPEPGVYGEAQGLGEFQVRFHAVKGKILHKSYLSTVAPSLAKLKDTLFSHFRAFADKRGNRFIGLPGEIVSQNGLPSSNPEPNFIAIQITAEVDFTLDITYQSTSGFSLGESIPKPPTGRAYQDSLQAKIAQFEQRFEDRFQLKQKGHSPEEVRFARNALSNLLGGIGYFYGSSRVQSVYTKNPVPYWKAPLYTAVPSRSFFPRGFLWDEGFHGLLISAWDIDIELDIICHWFDLLNVEGWIPREQILGVEALAKVPEEFVTQRNSNANPPTFFLTLKKLLTSHRAELSQNGRLATLERLYPRVQAWFNWFNTTQRGKSLSHLPSLSMWRLLTNCSILGEVLGTYLWRGRNATTTRELNPKSLSSGLDDYPRASHPTDKERHLDLRCWIALAAGVMAELSTLLGKDDAKYYETASYLTDNVRLNRLHLAPYSEQYADWGLHTDQVKLKRPPSMAPQQQQRHHHQHYQLPEMQRVTGELPTYQFVDSAFGYVSLFPLLLEQLDHDSPYLTKLLNDLRDPEQLWTNYGLRSLSKRSPLYMQRNTEHDPPYWRGPIWININYLAAKALHHYGKIDGPNAALARQIYAELRDNLVGNILRQYKRSGYLWEQYDDTSGEGKGCNPFTGWTATVVLLMAEQF

SEQ ID NO: 1639 - DNA, 6638 bp, DROSOPHILA
tcttctatttatatatacacgtaccatacatacatacctagatatatgcatgtttatcggatcggtctagccactgtcataagtatgtttcggaaacgaactgcaacttaatattccttattgtgtaacacaaaattaaaagccaatattatttcaaattgttgcattttaatggcgagacaaacagctctgcggaatgggaaaagtactcaccccttttttttttttttttttgaacagccaacaaaaccaaagaaaacaatacgaactaggtgaacatttacattagctttgtttatattcttcggcgtttcattatgtcggcgtttcatttgtcgcccactgtttaatattacaatttgacttttgttcgtaagatattcgagaaaacgaaaagtttaggttcggtaaactaaaacaagtacaactaaaaacgttcgacgtaatactttaagtgagagattattgcacagtaattgcgttgcgaacaaccaaagtggaagctaagccatacatcgcacttaaacaagacctcaataaattaaatattaataaataacaaacaaaaaaataccataccaataagtaagtaaccaaacttaaactaaccagtgtctgtgcgccgttgctcattttgaatgtcttgagtacaaagttgccgcgtcgctaaaatcatttaacgtctttgactaacaagcgtgaaaggtgtcgtatatatgtatacatatatatatatatataaatatccaataaatccaagcagaaggtcgttaataggcagagtgactaaacatgtacacgggagggcgggcaatcggcagaagcatcttaattcaaattcaatcgattcgggttaggacctttctcctcatttaagccatcagcagctcctcgtgcagaccatcggcatccagggatttgttcgacttgaatatgtagttgttgtcgctggagccctgcgacttggaactggaggtcatgttgtacaaatcatcgagatcctggctgcggcgatagctgtaccatgtgatttatcacttaattactcgaatcgaagtggaaacttggtcaaaactcacgtgctcagtggcctgctgtaggtggacatggccgggctggccggattgttgttgctatggttgctgttgctattgctgtcattgtcggcattgtcgttgtagagatcgcaattgtccaagtactcggagcgcagatacgtgtccagatcattgtcgcactcgtcctcctgatcggcgtagtcctgctcattgtcctggtcctgctgcgactccaccatgcacagccactgcgaattgtggttgcggaacttctccagctgccatgtaacaacgagaacaagaaaacacaaacaagtttgtactaagatatgccatatttggactggcaagcaactcaccttgatgcgcttggcccactcgctgtcgcttatggcaataatgtccaagcaatagtcgcacaccttgcggatctcctcgttcttgtcgtgcatcagatcgatgagataggccgccgattccgtctctttgatcatgtactccctggtgctttcgtgtcgcaggatttgctgaaacacaaagatgatctgcagcacaatctcgtcatcctcctgcttcgctttaagcaactcgatcagggatataaccactttggcgcggcagaagagcagggcacacaactcgtcgcaggcacaggtgcccaagtaaacaatggtgtccagcacaaggtcgtccattctggcgcacggcagcagtatctgtctaatccatggaatcagttggaagttctgcaagatctgcgagtaatccaaatcggtgagggccaggttacccaaaatgccgaggcactcgactatgaaggcctcgtcatcgcagatggtcaaaatgcgcgccagatctcccacatagtcgatgaactgcagctgcagggactcgtgctgcgacaagttgcgcagcagcttcatcagcaaggcatcctggtacttgaaggcccgatccattaggctatgcaatctttggccctccaccataatctgggcattacggcgatttagcgagagattaatgcacaaggcaatgagatccaaatcgactttaacattgaggtttaggattatggcatccgtggccatttgcacgcactccgtttgcgtgaacatgcccttcactttgtcatccaagctcatgtggtacagtattttcacagcaatgccgtgatgcttctcatcgttgatgaacatcaccagcatgggcagatagccggcggcgatcatcttgcgacgcagtccgccgtcgaaggagagattgaagaccagcttcaaggtgacctgcaccagatccgtgtgcgtgctctggaacaatcgtggcaacttggccacaatgttcaaagcgcccatctcgtccttgttgtcgcccacaatcgatagcttcttgaggaacgtgctgacgagcatgagtagatcgatattctgcctatccagcgccttgaccaacatcttaacgatatgcttgcggcgcatcttctcctccagcttaacattctcggccatgttcagcagcaggtagaaggccacgcgcaacagttgctcctgctttttggcaaagatcttaagctgcttgttcagccgatcgatctcctccttcttcactttgggatcattcctgtccagcgactcgttgctttgggccttctgttcagcgggcacagccggagtatcgccgccaggtgaaccgccggcgcaaagggactcgtgatagctgctattcaggatctgactcttgatcagcgacgatgacatggagccgtgaaagctgctccaattgcccgacttgggacgctgttttagctccggaatgcgacgacgcggcggctccatctgaaagtgaatttgttgagtattcgatagatatgtttttcaagaacttatagaaataaaattacctccttgggcttctcctcgttcatgatgtccaggaaatcgtcggtgctgcggttcagcttctccttgctggcctttgccgaatgtggagtggatgatccattgggctgtttgcgcacgtccagctcatttctcattgtctcgtagcgacgcagctcatagtcaatcacatccatgcacagcgatccaatctgaaatagattaacaacgattaaatgagtgcttagaacttaattaagaaactctattcccaccttatattgcacaatgagcggatgaaacttggtgtatgtggaaaagcagaagaatatgtagattatgttggtggagagatccagggatttgcgccagtcctcgcgcagaacacgtgacaaggcgctgaggcaggcttctaaaatgatgaaatagtacattgggtttgggttcaaaactacagaactgcaaacttatccttaccattcttttccagctcttcaagattatcgggatttcgcgccatctgtaggatcatggccgagcctcgaatgcgttcgcccagctcctcgtacagcagctccacatactcatcgatattgtttatggacacatccgccgtgggcgtggcggcactcagggcattcgagacaccattgctagctccagtggatcctccgccgctgccggtgctgctggtcatggccgccacactgctgtgcgatcgagcagaggagcgggtgtgcgaagtgtgcagcgccgccgatcgccggctgtgagtgttgttatccggtatatctaatgggtactgagtgttagtatggatttctgctaacaatctaactgcttaccattgcttgcattatccttgcgattcttcagataaaagattatctgctcgacgtcattaagctgggacttgtggatgagatcgcacttctccaccacttctcgtgccaaggcagccggatccgttttggcgttcagcgaacggagtcgtatgattttttgacagtgctgggcgattaaatacaatacatgcattagttaacgactgaaataatgtactattaggctaattgtttttgctgttattttgctatttataaacatagagtaattattaggattgaggaactagtttaggaccacttcagggcaattaaccacttcgcatctaagctgaaaacttttttggtcgccaatatttatggccaagagcaaaacataagagacttacttatgtagtacatatttatggtcgtgaacaatcggcgaaaaataagcttgtcgctcggccaaaaaacgtgaattgaggttaaagacccggccaaccaaccgcttttgggtatctttttttttttgttgctgtggttttacatttttcactcactacttggagcgcaggccgtcatcgaccccgttgttgttgcgctatcgattgggccgctcaatgtcagcttctgccccccgccccttaacccttttcggggcacaccggaagaaacagaagtagcttttttaagtactcattcggatgtttttgtagaacaatgactgctagtatttaaactaataagcaatatatgtatgtgtacacatctagatcaatttttcaacctattcgattaaggatcaactttgtttcctttttttttatgaacctaacatagttaagaactaagttacagatgttcgcatattgttgttattatattctttccctatcaacatctttgataccaataatgctggtcctattttaattttctaatatctactagcattttctcccagtgcagcgatgtgtaaccgtgcgttcttaccttcttttcctcgatcatcggattgttgggctccccgaagacggtggcctccagttggtagttgacaatcagcgccttatccgtgggatgcgggtcaatggatccgcctttccacctccttcgttgtttgtttgtttgttgttgtcgttgcatttgttttggattgagagcgagacaaattgttggatcaatcataaattatgcggttcaatgcgtaatgaggtaatagatttttcaatccaattctttttttgagcctggcttaacttgtgcttttgttttaataaaacgaacaaaaaagttaagaacccaacgaataacgaataacgattaacggttgcaaataacaaaaaacaaaaggaggaagcgtgaacgcaaagtggaaaatcaatagagagcgccaggtgattgtggctctctttctgacgcatgacgagtgctttagctatttcttttgttcttcggccacttgtacacccacacatgaaaacaaacaaacacacacacgcacgcacgcacgatctaatcccatacatacgcacttttttataaacttggcgtcatcgtttgtttgcattgcagttgttgttgctgctgctgtcggagagcgactagaatttgtcaaattgtttatggaaagcacaggctcctcttcggtgggtggcggatgcggggggtggcggttttggtggcgcggagtggggctcctttgcagctgctgctctctttgcgctctcttctgctcgcacagatcgccggcaatcgcatttattatgtaatagacgtagtgaatcacaattggcagcagcaccaggcccgagattatttggaaaattaataacaaaacaaattgcatgcgattgcaatgcgacttccgatttaatgtcgataagtgctagtgctggcacaactgtctgctcactggcggtactatcgatggtgccacggcacccggcaattaccgatagcactcaatcgatacaaaccaataagcgaatgttcaaattcaagttggcggttgtattctaattgggaacttgccattcataatatgcagtatactaacaactttgtttttcctcgaacttccttgaccggctagaaacaggtgtgattagccaagagagcatcactgttctgttctgggtgccaagaaccaaagtctggcaacgactgcagccagaacagctgggccggcgttgccaggtgcaaagaacgtagatgagcaacagaaaagcaaacgaaatggaatgaaggaacaacaataaaagaatcgctactttgtagtattattaaccaaaaaaaagcgcggcgcgatcacaatgtttctgactgcgaacggtgtcggttgtctctactgcgtgtgagccgagtggagcgcagcgccgcgaattgtttacattgtgctaggaaaatcacaacaaacaaaccagcaaacagtctcgactgacaataacaataacaatagcaaataacatgcaaataaaatgcatttcaagccgcgcaaatactaaatactgattcaaatgaaacgcactatacgatgaccatttaaaagaatcgccaagcaggaggaagcgaaaagaattcgaaaagcgcaaagcgagccgaagaaagtgtacaaaatcaggccaaaccgatttgttttttttttttttttttttgttctgtcgtattttcccttcttttttctaccgtttttttttgtgtttttgttgtggtgggcggtcgcttctcttttcgcgcaagaacaacaaatgaggtggagcagcgcctgacaatggaatttctggagaacctgtacaaaacgctgcactccctgttgtgtgagtaatatcgaatatttggcgcccgataaggcgcaccgctgacctatgtacata

SEQ ID NO: 1640 - DNA, 3114 bp, DROSOPHILA
ttaaatcggaagtcgcattgcaatcgcatgcaatttgttttgttattaattttccaaataatctcgggcctggtgctgctgccaattgtgattcactacgtctattacataataaatgcgattgccggcgatctgtgcgagcagaagagagcgcaaagagagcagcagctgcaaaggagccccactccgcgccaccaaaaccgccaccccccgcatccgccacccaccgaagaggagcctgtgctttccataaacaatttgacaaattctagtcgctctccgacagcagcagcaacaacaactgcaatgcaaacaaacgatgacgccaagtttataaaaaagaggtggaaaggcggatccattgacccgcatcccacggataaggcgctgattgtcaactaccaactggaggccaccgtcttcggggagcccaacaatccgatgatcgaggaaaagaagcactgtcaaaaaatcatacgactccgttcgctgaacgccaaaacggatccggctgccttggcacgagaagtggtggagaagtgcgatctcatccacaagtcccagcttaatgacgtcgagcagataatcttttatctgaagaatcgcaaggataatgcaagcaatgatataccggataacaacactcacagccggcgatcggcggcgctgcacacttcgcacacccgctcctctgctcgatcgcacagcagtgtggcggccatgaccagcagcaccggcagcggcggaggatccactggagctagcaatggtgtctcgaatgccctgagtgccgccacgcccacggcggatgtgtccataaacaatatcgatgagtatgtggagctgctgtacgaggagctgggcgaacgcattcgaggctcggccatgatcctacagatggcgcgaaatcccgataatcttgaagagctggaaaagaatgaagcctgcctcagcgccttgtcacgtgttctgcgcgaggactggcgcaaatccctggatctctccaccaacataatctacatattcttctgcttttccacatacaccaagtttcatccgctcattgtgcaatataagattggatcgctgtgcatggatgtgattgactatgagctgcgtcgctacgagacaatgagaaatgagctggacgtgcgcaaacagcccaatggatcatccactccacattcggcaaaggccagcaaggagaagctgaaccgcagcaccgacgatttcctggacatcatgaacgaggagaagcccaaggagctaaaacagcgtcccaagtcgggcaattggagcagctttcacggctccatgtcatcgtcgctgatcaagagtcagatcctgaatagcagctatcacgagtccctttgcgccggcggttcacctggcggcgatactccggctgtgcccgctgaacagaaggcccaaagcaacgagtcgctggacaggaatgatcccaaagtgaagaaggaggagatcgatcggctgaacaagcagcttaagatctttgccaaaaagcaggagcaactgttgcgcgtggccttctacctgctgctgaacatggccgagaatgttaagctggaggagaagatgcgccgcaagcatatcgttaagatgttggtcaaggcgctggataggcagaatatcgatctactcatgctcgtcagcacgttcctcaagaagctatcgattgtgggcgacaacaaggacgagatgggcgctttgaacattgtggccaagttgccacgattgttccagagcacgcacacggatctggtgcaggtcaccttgaagctggtcttcaatctctccttcgacggcggactgcgtcgcaagatgatcgccgccggctatctgcccatgctggtgatgttcatcaacgatgagaagcatcacggcattgctgtgaaaatactgtaccacatgagcttggatgacaaagtgaagggcatgttcacgcaaacggagtgcgtgcaaatggccacggatgccataatcctaaacctcaatgttaaagtcgatttggatctcattgccttgtgcattaatctctcgctaaatcgccgtaatgcccagattatggtggagggccaaagattgcatagcctaatggatcgggccttcaagtaccaggatgccttgctgatgaagctgctgcgcaacttgtcgcagcacgagtccctgcagctgcagttcatcgactatgtgggagatctggcgcgcattttgaccatctgcgatgacgaggccttcatagtcgagtgcctcggcattttgggtaacctggccctcaccgatttggattactcgcagatcttgcagaacttccaactgattccatggattagacagatactgctgccgtgcgccagaatggacgaccttgtgctggacaccattgtttacttgggcacctgtgcctgcgacgagttgtgtgccctgctcttctgccgcgccaaagtggttatatccctgatcgagttgcttaaagcgaagcaggaggatgacgagattgtgctgcagatcatctttgtgtttcagcaaatcctgcgacacgaaagcaccagggagtacatgatcaaagagacggaatcggcggcctatctcatcgatctgatgcacgacaagaacgaggagatccgcaaggtgtgcgactattgcttggacattattgccataagcgacagcgagtgggccaagcgcatcaagctggagaagttccgcaaccacaattcgcagtggctgtgcatggtggagtcgcagcaggaccaggacaatgagcaggactacgccgatcaggaggacgagtgcgacaatgatctggacacgtatctgcgctccgagtacttggacaattgcgatctctacaacgacaatgccgacaatgacagcaatagcaacagcaaccatagcaacaacaatccggccagcccggccatgtccacctacagcaggccactgagcacctatcgccgcagccaggatctcgatgatttgtacaacatgacctccagttccaagtcgcagggctccagcgacaacaactacatattcaagtcgaacaaatccctggatgccgatggtctgcacgaggagctgctgatggcttaa

SEQ ID NO: 1641 - protein, 935 aa, DROSOPHILA
MQTNDDAKFIKKRWKGGSIDPHPTDKALIVNYQLEATVFGEPNNPMIEEKKHCQKIIRLRSLNAKTDPAALAREVVEKCDLIHKSQLNDVEQIIFYLKNRKDNASNDIPDNNTHSRRSAALHTSHTRSSARSHSSVAAMTSSTGSGGGSTGASNGVSNALSAATPTADVSINNIDEYVELLYEELGERIRGSAMILQMARNPDNLEELEKNEACLSALSRVLREDWRKSLDLSTNIIYIFFCFSTYTKFHPLIVQYKIGSLCMDVIDYELRRYETMRNELDVRKQPNGSSTPHSAKASKEKLNRSTDDFLDIMNEEKPKELKQRPKSGNWSSFHGSMSSSLIKSQILNSSYHESLCAGGSPGGDTPAVPAEQKAQSNESLDRNDPKVKKEEIDRLNKQLKIFAKKQEQLLRVAFYLLLNMAENVKLEEKMRRKHIVKMLVKALDRQNIDLLMLVSTFLKKLSIVGDNKDEMGALNIVAKLPRLFQSTHTDLVQVTLKLVFNLSFDGGLRRKMIAAGYLPMLVMFINDEKHHGIAVKILYHMSLDDKVKGMFTQTECVQMATDAIILNLNVKVDLDLIALCINLSLNRRNAQIMVEGQRLHSLMDRAFKYQDALLMKLLRNLSQHESLQLQFIDYVGDLARILTICDDEAFIVECLGILGNLALTDLDYSQILQNFQLIPWIRQILLPCARMDDLVLDTIVYLGTCACDELCALLFCRAKVVISLIELLKAKQEDDEIVLQIIFVFQQILRHESTREYMIKETESAAYLIDLMHDKNEEIRKVCDYCLDIIAISDSEWAKRIKLEKFRNHNSQWLCMVESQQDQDNEQDYADQEDECDNDLDTYLRSEYLDNCDLYNDNADNDSNSNSNHSNNNPASPAMSTYSRPLSTYRRSQDLDDLYNMTSSSKSQGSSDNNYIFKSNKSLDADGLHEELLMA

SEQ ID NO: 1642 - DNA, 3431 bp, DROSOPHILA
tatatatatatcccttccatctaatttttgtttaaatactatacatttttaaaactatattaaaactaaagttatccactatcagtatacatgcatggaagcagttttatgaaacaaacaatttcttttatttgagtacatacctttgtcgtttattaatttaataatccccgttaaaatgatcgtctaaatatatctgatttaagtgcaaatcaaatgttattttcaataagttttatccaatgtttgcaatccactcacaataacatccacagagtcactcaaaaatggtctagctcttggaataagtattattttacagcgcagcttccgtattctgtgataagttgaaataactctatatacgccgagttcagtaaacgacaaaactaggcggcaatggacggaaatcgatgtggttttggggtgaagcccataatgacacgaagataccaaaaatcgaagctatttaacgcggacgcccaacggcgaaggtgttttcacaactatttttagtagtccatagccacttgggtttgtgctcccttgctgctcgcattttctcgccgacacttgggttttgataagctcgcgatttgcacaattaacagtgatgggtagagcgggcgcggggaacacggggacgggtcaagcatccgcggcacttattgtgattttcttgggctgcgagcgcgctttgtgcatttaataggcacgataaaagcggcggagctttgagcatgtacgcagcaacagatttgagaatatttttttgctattgttataacaacaacaattagttgaaacttatgttagtttcacaccgctggcagttttgttctcacttttgtcaagtttattgagatttgcaaaattttattttcaaataattttcctttggcgccaaatgagcatccatccctggcagtgcttcgtgatcagctgattttagtgcctatcaacttatacgtatgcatactaaaaacggtcactctgcacgccagaagtcatattcattgcttataagcaattattaatttcaactaatttcatacgtgtctcgctttagtgggcattatggccgacaatttggagcccctggagcccagcctgcagaatctcgtcgagcaggactccctcaagtggatcttcgtgggcggaaaaggcggcgtgggcaagacgacttgcaggtaaaacaacaacaacaagccaactttctcggttgatctaattaatcttcgtgttaaacatagttctagcctagccgttcagctgtcgaaagtgcgcgaatccgtgctaatcatatccacagatccggcgcacaacatatcggatgcattcgatcagaagttcaccaaggtgccgacaaaggttggtggaagaatccggaaatgaagtcatttaccattgtataagctaaactaaagcacatcgcaattccttttccgcaaccaggtaaatggctttgacaacctgttcgccatggaaatcgatccaaatgccggtctcaacgagctgcccgaggagtacttcgatggcgaaaatgaggcgctgcgcgtgagcaagggcgtcatgcaggagatgatcaacgccctgcccggcatcgacgaggcgatgagctatgcagaggttatgaagctggtcaagggcatgaacttctcggtagtcgtcttcgacacggcgcccacgggacacacgctgcgtctgattgcatttccccaggtggtggagaaggggctgggcaagctgctgcggctcaagatgaaggtggcgcccctgctgtcacagttcgtctccatgctgggcatggctgatgtgaacgctgacacactctcccagaagctggacgacatgctgcgcgttatcacccaggtcaacgagcagttcaagaacccagtacgtagaaacatgtatttagctcgtacaacgcctaatccgcattcgtccttcggcaggatcaaactacattcgtctgcgtgtgcatagcagagttcttctcgctgtacgagacggaacgacttgtgcaagagctaaccaagtgcggcatcgacgtccacaacatcattgtaaaccaactgctgtttctgcagaactcgcacgactcgtgcagcatgtgcgcctcccgcttcaagattcaggagaagtacctggaccagattgccgacctgtatgaagacttccacgtaaccaagttgccgctcctcgagaaagaggtgcgcggtccagagagcatccgttctttctccgagaaccttatgaagccctacaaccccaagggcgagcccaaggaataggatagcccgtccaaccctttacccatccgtttgtaagtttcttccttagtttgtgtgaacagaaagtgcgtaaaataaattaaagttgaggcagcgatccccgaagggatctgcttcgacgtgtaatgcgtagacaacgcttaacggatgcagtattccaaactggagagggttacaacgaatgatactttcaaagaccgcccccggcacgctccatttgcattacggtgggaaagttgctgccttgcatctgccttttgtggtccagatacagccgtgcgtaccgcaggtactcggtgttgccctgcacaatagccgacatgagcagaaggaactcatacaggttcaccttgccctgggcatggacatcaatgtcccgcaggacatcgtgcatcaggtcgacgggcacctcctttacgcccatcgttttcattgccttgcagcagtctgcaatcgacacgtaccccgtattgttatcatccatttgcctgaactgcccggcaaacttgcgcacttggcgcacgctcatcttaatgggaatgctcatctgcgaagcgctctccttggtcagctggcccatctgggagttaagaaaagttcgcgtctggcggatctgctttttaatttgatctcgcgaccagttcagctccttggccatgatgttggccacttgcggcagtatctcctcggccacctggacatttaaaaaggccactcgcagtcgccgcgccaccatgtcctccagcgtgcaagcaaagtctcggacgccctgttttacctccgcctcaatatacgggaactccgagtggaggcgcttacccacaatgggccatgcctttccactgctgtccgcactcacggccactttgaaggcattcgatccgtacgtgttcgacaggtgctcagccacgtcccgctccattccgaagtcctgcaccagccgtatgaacatcttcggactccagccactggctccgtccagtttgcaggactctgcggtcaccgattccttacgcagcggtgaaagatctccataccggatggctgcattcacggttttctcagccagaacccgaaacgacgaccacgtgccaccaacgatggaaagcatgtttcgaggtcctagctggattacat

SEQ ID NO: 1643 - DNA, 1225 bp, DROSOPHILA
ccagaagtcatattcattgcttataagcaattattaatttcaactaatttcatacgtgtctcgctttagtgggcattatggccgacaatttggagcccctggagcccagcctgcagaatctcgtcgagcaggactccctcaagtggatcttcgtgggcggaaaaggcggcgtgggcaagacgacttgcagttctagcctagccgttcagctgtcgaaagtgcgcgaatccgtgctaatcatatccacagatccggcgcacaacatatcggatgcattcgatcagaagttcaccaaggtgccgacaaaggtaaatggctttgacaacctgttcgccatggaaatcgatccaaatgccggtctcaacgagctgcccgaggagtacttcgatggcgaaaatgaggcgctgcgcgtgagcaagggcgtcatgcaggagatgatcaacgccctgcccggcatcgacgaggcgatgagctatgcagaggttatgaagctggtcaagggcatgaacttctcggtagtcgtcttcgacacggcgcccacgggacacacgctgcgtctgattgcatttccccaggtggtggagaaggggctgggcaagctgctgcggctcaagatgaaggtggcgcccctgctgtcacagttcgtctccatgctgggcatggctgatgtgaacgctgacacactctcccagaagctggacgacatgctgcgcgttatcacccaggtcaacgagcagttcaagaacccagatcaaactacattcgtctgcgtgtgcatagcagagttcttctcgctgtacgagacggaacgacttgtgcaagagctaaccaagtgcggcatcgacgtccacaacatcattgtaaaccaactgctgtttctgcagaactcgcacgactcgtgcagcatgtgcgcctcccgcttcaagattcaggagaagtacctggaccagattgccgacctgtatgaagacttccacgtaaccaagttgccgctcctcgagaaagaggtgcgcggtccagagagcatccgttctttctccgagaaccttatgaagccctacaaccccaagggcgagcccaaggaataggatagcccgtccaaccctttacccatccgtttgtaagtttcttccttagtttgtgtgaacagaaagtgcgtaaaataaattaaagttgaggcagcgatccccgaagggatctgcttcgacgtgtaatgcgtagacaa

SEQ ID NO: 1644 - protein, 336 aa, DROSOPHILA
MADNLEPLEPSLQNLVEQDSLKWIFVGGKGGVGKTTCSSSLAVQLSKVRESVLIISTDPAHNISDAFDQKFTKVPTKVNGFDNLFAMEIDPNAGLNELPEEYFDGENEALRVSKGVMQEMINALPGIDEAMSYAEVMKLVKGMNFSVVVFDTAPTGHTLRLIAFPQVVEKGLGKLLRLKMKVAPLLSQFVSMLGMADVNADTLSQKLDDMLRVITQVNEQFKNPDQTTFVCVCIAEFFSLYETERLVQELTKCGIDVHNIIVNQLLFLQNSHDSCSMCASRFKIQEKYLDQIADLYEDFHVTKLPLLEKEVRGPESIRSFSENLMKPYNPKGEPKE

SEQ ID NO: 1645 - DNA, 8560 bp, DROSOPHILA
ggtcaaactaccgtccgggggtcaaagtacagacctaattgccccgcgatgcaagttagagtcgctacatgtggctacgtgggcttgggcttgtgctggggctgggcccattagctcatcgggacaagtgaaacccagataaggcccaatagcaaacgatgacccccatttagtggtgggagcgggtgcggggcggtggcactcagctgcgacgtgttccgtgcgattctcacctcgttgaggaaggcggtgacgtcgtagatgttgttgtgtatgagcagccaggtgtccttgttcgtgttgtgcttggcgacctcggcccgcgtgaaagtctttgtttcctcgctcgacatggtgatcacttgttgatttctactgcgcgtttgatttgtgtcacggaaaaactatttgtccagcctcgcactcttcctccagggcgcacggtctcacagaactggtggccggcggtcacactggcgcgcagcaagatggcttgtttacaccaacgcctatcgatatcgaatagtgaccgtttagactagccagattgtttgtggtatgagcacatattttattataatatataatagcttataacttatttatctagcttataatttgtttacagcacccaatacacaatatatcggatttggagcggtggttatgcgatgcgattgtatagtggatcacggctattttaccatcgacatgtaaagaatactgcatacttttgggcgcgataagaccagtgctccaaagcacctcattaattttggcgcccaatttgaaatgtgagaaaaccctttagtgaaataaacgattcaaatgaaatgtacaaacaaaattcgtaagcaaatttattttgggcagaccatttcattaataaaaatgtatttcgagcggtatcccagcgaactggttccaccagcgacgaatgcgcagactcggatcttgtatttacactcaagccctgcctttattccatactcggcaaaggagacttcaaagtcaaacgtatcctgctgtacgccgtgcggctgcggcgctccttcaataaaaacagtcgacacgcattgtgaagagttttccaaaagctacagcgctgtccaatagcgcaattcaagttaacaacaaactaagcataaatatattgataagtgacggcgggtgtgcttttgatacgcagcgcttttagcttttttacaaaggtaagttccttattacgcaattggcatcctggagtggcctacgtgcggtggccattttcttgggtccgatttcctttctctggtatacatccaccactatgtttccttttccgcttcgctgatgcgtaattcaagtgacgggatttatgcgttaaaaagttattaagttttgccaacttcaatcatgcccttggatcccgatttacgcgtgttctggagccccgtgggtaaacaactcttatgggggacaatccaaaactgagtcgagtggcccgtaaatcattcagattgtttgtgtcttcgggttatcagcacctggagatttgactggccagtaaacacttaccagccgggggatacctgtgcaaggtgttaggagaagcacccaagctctggatttatgtatccattgcgggttatatgcgatattcttggggtaggcgtaatgtgattgattacttgtcagaatagtggagtataatgccaaaattaggtgtgggtttggtttatatatagatatagtatacttattataacccatttaaacgcaatcgacgattgtaaattagtaccacacacgcactactggaaaacaagaaaaacaaagtcggaaactcagatcttgattgcgatcgaaggcattattctcactcacacaaaggctctaaaaatagccctgttcctgcatattttttacaccgagagttcacttcggttggccgccagcgattcaattaaattttatgtctcattgctgcataattgacgacattttccgtttcgggcggggaaaaggtgagacagtggtcaacattttcctggcgcgacagcaccactaaatttgcattgccaatccgtcattagactcgattgattccgccattaaatacaattgactagaattgacgaacaaatgttttcaattcaagcgcaacaaaaaaaatgaataaataaataattcagtaaatatttttcttgctcgatgatcttttgatccgtacatcgaatggggagggggggggggtggtatatcttcgagggacggattttaattggtcagaaaaagagttcgttcagtcgctgtttttaattgaacacatactgtttttaattgtggcttttgcgaatttcgttcaacgaattgttatgtcactttcgctttcaccttcgaccagattaaggttaaacaacttaaatatcgccacgaagtcttaatgtttataaatgtaaagtgaaacgatgataaatcttatcttattctttgttgtgtttttgcaagaaatttcattgttaatgatttaatatacatatttgatgtttgcatatggcatatgtaagttaataataagtaaatgtgtacttattcattgatataggggttgttaacaccaataagtaacttgttttgaccattttgctgaagttctgcctaattatgaaaataattcttctcagtgtttgaggctgttgattaaccccaaaaagtaatacatacatatgtataaatgtaaatatatacatatatgtatgtacgtacatacattttttggtaaggatgcaaatgtgtaaaacgtaactgcgtaaatgtaaggcgtatttatagcggcttatttacgcattgttgttgtgtgggccgtacaaagaagaacaacaaagcagaggaaggatgcccatttatgcattcgtgctgcgccaaggagcgagcgagacagagagacaaattgagtgagggagagaaaagaaaaacaacgcgctccctctctcactcactcactgtctgggcatgccactcaggcgtgattatcatgcagcgagcacgtgtacatgactttggttttgttttgcttgccgctgccccctcaccaacgcctatcagtttcttctcaacgtttcattaccatgcaaacatccaccgttcctcgctccgcaaacacaagcaacaacaatcgcaaacagttagaggtgcgcacacacgacatacgtagatacacagatgcatacatagatacagcaagctaacagtttgatgcattgattgagataaagatacaaaatgagagtaccgacaaaaataatttttcttaccaaaaagaagatatgtaactagatttagctaaatacccagaacctgaaaagcttagaacattcgctttcataaagtaacactgtaagtatctatctatctatacaccatgcatatgtaagttgtttgtttatttggctttcgagtgaaggccgcacgacgcattttaattgcatattgcaagcatttgataaatttccactcgaggcagaccgcttccatttttccattttccactggagtccaacgctttgcttgcgattaactgttaccacccgccgagaatgatgagaatcaaatcgtgacgtgactaatggggcatcctcctccgatctgcctagcagctttctaagaagaacatattgtcatcgaaagttctataaacggatccgatggccacttggcaacgtgctctagatggcttccgttcttggaggggtttttggccagctcctggactttgttttggccataaatctgtcgcacgcgtttgcctaatgcatttgttgttctttattaaattgttttgattgctctgcctgtgggcttgtttttctctcgacttctgcgtcctccgtgttaattcgaatgtgtaaacaaaagataaacaacaatctggttcaagtacactgctacaatattgggcaaactgatatcaacatatgtacatatcaatagaagaagttcaaaaaccaattagaggaatttatgaatgtttattgaaaatatatgcaaaacattaaacaaaagcaatagaatgtttattttccagtggtgtaagtaatagttgtctataaataaatgtgaaatgctccgaaattcacaaaatatggaaatgcatttctatagatgcaaatgcggccatgcaatccacacaaatgaatacactcatttcaaatgtttcacgcattccctgcgtgccgtgtatgtgagcacacagtggcgtgcggatggtttaaccaaggggttaaggattactaagctgagtaagcagagttttggagttaaatttagcaactaagagtgctgttggaatttaaacttaagtttacattttgcaatctaatgtaatcagggataaatgaatttatttgatgctttttagtaaaggtttaagagagtttttcaaaactgagataaaaaggttgatagtattccgtgagtaatcttttaccactatctttaaaaacgaaatttatatgtatgcttatatgtaaacccacgaatggcatacaatattatttgttggatagatgaatttgcgaccccctttgctgggcccctgtgcgtgatgagtgcgtgtgtggctgtgtgagagttccactcgttccatttcgtcaccggcttttttgctttttagctgccgcatcgagtgaagcggctcagatgttctttggaagtgcgctggtcaagtcgtcggaaaagcgccgagaagcaattgcagctaaagaaaaatctagccaattcacaagtaaaagtgttagtcagtttgtataataaatacacaacgcagttgagttgcagtagtgcaaaaaaacaaaaaaaaaaaaaaagtgaaaaaattaacagagaacaattacgaggacagcaaaatgccggtcgatatatgcagtcaaccgcacaatttgctcagttcaatgaggtaaactattaaacgatgctgattgaattttccccattctccccaatcgagttttccaattaccatggcctctaaagtgaaaatgcaatatgtatcgggaaaatatcttgagtcttaggatttcttttaatttttattagtttttaatagcgtgtttaatttagagattttactcacagttttgagtcataaattctcccaaaaaagtacaaatgggaaaaaattgtgtaaattttaagtataaataattgttttttgttttttaataatgtggcatttattgctagctggtgcactgagataaaaactgatcccttatggtttcaattgagcacttccagagttgaaatcatagaaaagtaacgaaagtgcaagtggagtaagctctgatatgatacgattcgtcaccatctcttatcaaactaattgaagcgccagacttcagaccagactaatatccgatattatatctgatatctttatggccatggctttccggctttgctgtatattaaccaaatctaatgtgtccgattctagctctatcttttgtcagtttattgatgtggagtgattcgtatctggattgtcagcaagtccaatacttgaccttttagatgtgtgctcactgtaattacagcacacaaaaagtagctacattaatgatatttacatcgagaactctgaattgtggctggcattgaagatcaagatagtcgtttagagtgtttgtatataggaaaggcgaaatagaactgccatatcatgaggcggcattgaaactattgagaactacgcaatgcgaccttggatatgtaatacgcaatcgaagctatagcaatcaaaaacaatcagagatatacatatctttaaatatatttagctatcaaataaagggtaattctcaagggataatcaattaaaaatcagaatatatgtacaaagatacaaagatatattttcgaaatgagcaagccaagtttagtgaccatttaattcttaatggcaacacctctaaatatgatgtatccattcctttgtctgattgcagtggaacaacagatacctcgttgtcgctgaactcattgtccctgacttccgttctgccgccaacggatcccgatcaccataatccacacagtacacacagtacgcacaacatgaacaagctgtgccgccaagtgtcaattgagtcgcccggtccgggcgccaagaactgcgtcttcaacttcttcgtgcccatcgaggacacgccggcgttgggcgcccgcatccggatcgtttgcgccggagcctgctatcgtcgtcgcgatcgcgccaactccatcaccagcatgtcctcagtgtcctcggagctgagcgactactgtccgtcggtgaactcgatgtcctcgcccgcacaccagggcatccgggagggctccttctttcccggcttcgaggtggccggcgtcatcgagtccctgggctcggagatcaccgaggccaacaaccgtggcctgcgcattggacagcgcgtgatcgtctatccgttcgatgagaccccagccggctatgccgagctgctggtcgtgccggacctgaagcacgtggtgcccattcccgacagtctgcccatggaggtggccgccatgctgccgacgggcgccctgctcgcctggaatgccgtcttcaaggctcaggccgttgtcacacagattctcagccagcgggctgccacggagccgaagcggaagcccaagatcctcatcgtgggcactggcggcctggcactctgggccgtgcgcatcgcctcctatcactttgccacaactggagccgacaacgtggacatcacagtggccagtctgcgggacgagggcttccgcctggccacagaaatcaaaaagtaagcatcttgaggtccctctgatgtgtcatgctctaaccatctaacatcctcctccttcctccagtgtcagcgtggtccagtggaacgaatgcctgtacgagccgcagctgatcgagcgcaccaaggacgtgtgcggcggagccgtggacgtggtcattgactttggcacaacctccaggagtctgcaccgctcgatgcactgcttgtcgaagggcggcgttgtgctgatcagcgacgaggtggccgagaagctgctgcccaagttctcgcgcctgtcggagcagtaccagcaggagatcatcgccatctcgaacggcaccgccgagcagctggctgagctggtggagctggtagccaacaagaagatcgagccgccgccgcactccgtcttcccctgcgagcaggcggccgaggtcatcgccaagctgtgcaactccgagatacccggacgcgccatcctccgtttccacgacattgagtaggcgtggaggaggatatggttccccatcaaggcattaactcatttaatatggatatctgttagctgtattcggaagacaaccgacaaaaccgacaaaacaacctgcaacctgcgacactctcgaagcggattcagaaatgtgcttattttgtagccggtcattgttttgtaaccttaattttggactgcagacgaactcctcgttttaattgatttagcgttttaggcatttttagtattatgtacatatagattgtgatttattttatttgtaagccaccaccatgattctacttttgcaaagtcacccatcacatcgccatattagccggagtcaaaattcggcggcttcttcaatgattttcgattaagcaaaaagcccagcagaagcggattacaaaataaatgttatacatactatacacgaaattgttacgcatgcgatgcaaatgtttgattcaattgcttgatgtttgtactcattacgtacccaacattatactctactcttattcacaaataaaaaccattaactatcaatccatgggggctgatctaggttgcaactgcttttcctgatatttcttaggtgcctccgtaggatggccaatttggcctctatatgctaatctttctttagcatactgttccttttttcaaaagatattgtaggcaatatcattcgattacaaagagtatatcatcgctagcataaaattgatgtatagatatcaaattagtttcaggacagactagttttagccgatgaagcttaaggtgcagcaaattttcactttaaaaacgttttttttttagtttcaaatgtaacagctatttttaaaggtgagcaacaaacagatgtggcaaccccataagcgcttctcttatggttggcagcccaagccggactgattggtgttggaaaacgccgcaggtggaattgcgccaaaaactgtaaacagcgcggcaagctgatcgcaaaagcaagggagtcaatctagtgaagacccaattgaattattgctgacgttggcgacttgttaagcgactgatagggaatcgcagcgcgatggttaataaagagaacgcccgcagtgtgggccagcaggtgaagtggatcggaagccaagacgaactgccgccggtgaagaatctggagcacaagaacgtctacttctaccagaagtgcatctacggtccgctgactttgtccgttggcgactttatactggtgtcgaacgcggatgccgcc

SEQ ID NO: 1646 - DNA, 1717 bp, DROSOPHILA
agacttcaaagtcaaacgtatcctgctgtacgccgtgcggctgcggcgctccttcaataaaaacagtcgacacgcattgtgaagagttttccaaaagctacagcgctgtccaatagcgcaattcaagttaacaacaaactaagcataaatatattgataagtgacggcgggtgtgcttttgatacgcagcgcttttagcttttttacaaagtggaacaacagatacctcgttgtcgctgaactcattgtccctgacttccgttctgccgccaacggatcccgatcaccataatccacacagtacacacagtacgcacaacatgaacaagctgtgccgccaagtgtcaattgagtcgcccggtccgggcgccaagaactgcgtcttcaacttcttcgtgcccatcgaggacacgccggcgttgggcgcccgcatccggatcgtttgcgccggagcctgctatcgtcgtcgcgatcgcgccaactccatcaccagcatgtcctcagtgtcctcggagctgagcgactactgtccgtcggtgaactcgatgtcctcgcccgcacaccagggcatccgggagggctccttctttcccggcttcgaggtggccggcgtcatcgagtccctgggctcggagatcaccgaggccaacaaccgtggcctgcgcattggacagcgcgtgatcgtctatccgttcgatgagaccccagccggctatgccgagctgctggtcgtgccggacctgaagcacgtggtgcccattcccgacagtctgcccatggaggtggccgccatgctgccgacgggcgccctgctcgcctggaatgccgtcttcaaggctcaggccgttgtcacacagattctcagccagcgggctgccacggagccgaagcggaagcccaagatcctcatcgtgggcactggcggcctggcactctgggccgtgcgcatcgcctcctatcactttgccacaactggagccgacaacgtggacatcacagtggccagtctgcgggacgagggcttccgcctggccacagaaatcaaaaatgtcagcgtggtccagtggaacgaatgcctgtacgagccgcagctgatcgagcgcaccaaggacgtgtgcggcggagccgtggacgtggtcattgactttggcacaacctccaggagtctgcaccgctcgatgcactgcttgtcgaagggcggcgttgtgctgatcagcgacgaggtggccgagaagctgctgcccaagttctcgcgcctgtcggagcagtaccagcaggagatcatcgccatctcgaacggcaccgccgagcagctggctgagctggtggagctggtagccaacaagaagatcgagccgccgccgcactccgtcttcccctgcgagcaggcggccgaggtcatcgccaagctgtgcaactccgagatacccggacgcgccatcctccgtttccacgacattgagtaggcgtggaggaggatatggttccccatcaaggcattaactcatttaatatggatatctgttagctgtattcggaagacaaccgacaaaaccgacaaaacaacctgcaacctgcgacactctcgaagcggattcagaaatgtgcttattttgtagccggtcattgttttgtaaccttaattttggactgcagacgaactcctcgttttaattgatttagcgttttaggcatttttagtattatgtacatatag

SEQ ID NO: 1647 - protein, 381 aa, DROSOPHILA
MNKLCRQVSIESPGPGAKNCVFNFFVPIEDTPALGARIRIVCAGACYRRRDRANSITSMSSVSSELSDYCPSVNSMSSPAHQGIREGSFFPGFEVAGVIESLGSEITEANNRGLRIGQRVIVYPFDETPAGYAELLVVPDLKHVVPIPDSLPMEVAAMLPTGALLAWNAVFKAQAVVTQILSQRAATEPKRKPKILIVGTGGLALWAVRIASYHFATTGADNVDITVASLRDEGFRLATEIKNVSVVQWNECLYEPQLIERTKDVCGGAVDVVIDFGTTSRSLHRSMHCLSKGGVVLISDEVAEKLLPKFSRLSEQYQQEIIAISNGTAEQLAELVELVANKKIEPPPHSVFPCEQAAEVIAKLCNSEIPGRAILRFHDIE

SEQ ID NO: 1648 - DNA, 4114 bp, DROSOPHILA
gccggctacgtcagctctaagtgttttcactggcggaccaggaggaggtggctcacaaccggatgccgactactcctttctgatcagcctgcatccgtacatcaaggagatgaacggcaagcagaatcgaaagtttcgacagaaggtcgtcggactcatcgacgatattctggataacaaggatgtctaatttgtacacggaaaaaaaaccgaagatgcttacgtttcagcgatgaaaattacgatttgtaaacggctctatcaaaattaccacacacaagagatgcatattttgaatgattgtgcggaaatattctacataccaaatgcaacattatttcaaaaccaacattttcaccactttcagatttcattctggccatcatattgctaacttttagacaatgaacttagtttttaaatatttatgtctaagttaagtgtgaacgtacatgaaatttatatcgaagtttatatgcactgcatcgaaatttgtaaagcgcccagtggaacaggatgaaatcaccagttatgtgatattttctctccgtgaagaaaaaaagccacaagaatcgaagaaaacacacccagttgatagaaaacgccaacagtgcccatttattagatgtgtagagcgtactttaattacgctttttattgttgttgttaagcacacacacaaacacgaatttgttattgtcgaataaaacatttaaactacgaacattttattttacttcagacggaacagaaacaaaatttgcgtatatatgtcgcatttgctggcgatatgcgaaattgcggattaaaatcaaaacgaaactttcaaaattatttaatgtataaatttctagctttttttttgaatttctagctagccaaccgccttaatcgagtgcaatcgatagattcagcgcacagctgatgcaccgatagtacgcaaagcttcctggctttgttgttgttgttgtcgccgttcgcttgttgttgcactaaaaagacgaaaaaaggaaggaaaatcactggcgcggaataacaattaacaaaatggaataattgcattgctgtcgccgtaactcatcagttaaatgtgcgccagtaaacagtcgatgcagcaacgaaacacatgagctattgggtgagctatgcgcgtgtgtgcgtgcgccatgtgtttggcctgcatgcgtgtgtgtgcgtgtgcgtgtgagggcctgaggttttggctttatatcactttttttttgtttttgctgacttttccgatacgaaagtgatgtaatttttggctggccacaaataagccaactcactcgcacgtcaaccgccgaagcatttaccacgctcatcgcacagttaaagtttgtttatgggcctagaaaattacataaagtaaatacttacacacacacacacacacgcaaaaaaaagatatttttcggcgaaagttttttttatgttttatttattgagtgctaatagttgctcttttgactttaacagcgtgtgacgtcatcgtttttgctagccagggcacggccacgcctcccacaaacattacgcccactgagcaccatgaacgaatgccggaagaacatcacaaacatcacaaacattacagcgaacaacagcattctatgcgcaaagagcattagcaaaaagcatttgtttctagagaaacggagcatgtcggatcgttcggagaactccaaggatgtggcaaagggacaggatatatcaaatccaatggaactaacagccgaggatcgactggccattgaggagcggcaaaataaagcgttcgccttcttcgccgaaaccctgcaaatctacggcgtcgaggagctaattttctgtttcaacggcggcaaggattgcaccgtgctgctcgatctccttatgcgttacctgcgccaggagaacatctccagcggcgacattcccatgctgtacattaaatccggcgattcgtttccggaaatcgatgagttcgtcgagcgttgcgtacgcaactaccgcgtccagttggttcagtacgagggtacgctcaaggaggcactcacccacatgtcgtcggacatgccgcggatcaaggccgtcttcgtgggcagccgcaacacggatccctactgccagcatctggcgcccatgcaggtgaagctggttaggaatatagcaatcaggagataaatcatatttaaatgttttgcactgaaatgctcaggagttcgtaggttcaagtgtgaagaaaagtttctttctcaagagtagtagattgattataaagccaagttatcaaagtcacagccttagtatcaaaattatgccattgttaatctagaaaagtatgtgccctttgccaatatcacagtgacagtggcattttcgaatgtcatgattccattccgcagataagcgagttctgtggttcaccacctaacatagaatttattcgagtattttacaaaaccaaatgtatcccgcttatttgaaaatctcacaagatcacaaagataataatgaagctagcttgaaatagttttggaaagttcgaaactgctgtttcctattaggaaaccccaagtgcctagtgatgctaatttcgattttttttttagcccacggacaacgactggccgccgatgatgcgcctgaatccgctgctggagtggagctaccacgacgtctggcactacatccacttgaactcggtgccctattgcagcctgtacgatcggggctacacctcgatcgggaatcgtgcgaacacagtgcctaatccgcacctccgacgcaccgatgccgagtgtgaatgtggttctaattccgatgccgtctgctcctgcgatctgggtggctatcggcccgcctgggagctccaggatgccaccatggagcgtgctggtcgcctgcccaggaagtaggattccatttgcgtggctatagtgtaattgaatagcttaaactccagttagtcacgaaactttatatagctgtgtatatatattaacgtgtgatctggatttcggtaaacaaacttaatttagtaaaattttgtacgacctaaggtatgccgctgaataaatgtggcctctgttagcaggccacttaagcagtattcctagtttttatggagtatttaaatttttagttgtttagttgttgaatgtttctttctaattttgcataaaagctgaagcaagctaaaagagccaaagaaacagcactggcttcagtgcaaaatctagtgctgcagcaagctggcttttaaaagctagaaaaagctcaagatgccatggtgccactgttaaaacgccagcatggcagcactagatggccagtcagctgttttgccagctgattttcgccgcattttcacaacattacgcgattctttgaactttttttgctgtgatatttttacgagatttacgtaatcctacgcgccgatcatcaccagcgaatcacccacgcgagagcagtgcacaataaaccagtatttcctcgctccgcgatgtcgcgatccgcacaagaagctgcggcgctgctgcggggactgcggatcttgttggaggcgtgtgggcgcgagcatctcgcccacggtcgtcatctgtggagcaattcaagcattcgtgagctaatcgccgagaatgtggcgcacacacagcagctggtgagaagttccagtcaaaatcccaccgaggagctgaaaaaactgcagcaaactgtaaaagaaacgggcgaaaggggctacgtggtggccaaaggtatttgctcgctgctggagacgaaaatcaagatgtcccgcgaggaatcggccatctctgagcctgcacaagtctcctcaattcgtaaatccacacccacggcacaaaatccagcaagttgggacgccgccaacttggatatatcatccataacgctgcaggagttcgaggagatactctcgcgccggaacaaagatcgtagtgttagcttgcgcaccccggcaaccaaaagcaaccagaccatgcccaaaaaagaaacgtcaaccaatccgggcatcattacccaggacacggagtatgtaaacaatgtgctgcggtttgtggcgggcgccaaggtggaggagcagcca

SEQ ID NO: 1649 - DNA, 1288 bp, DROSOPHILA
acgaaaaaaggaaggaaaatcactggcgcggaataacaattaacaaaatggaataattgcattgctgtcgccgtaactcatcagttaaatgtgcgccagtaaacagtcgatgcagcaacgaaacacatgagctattggcgtgtgacgtcatcgtttttgctagccagggcacggccacgcctcccacaaacattacgcccactgagcaccatgaacgaatgccggaagaacatcacaaacatcacaaacattacagcgaacaacagcattctatgcgcaaagagcattagcaaaaagcatttgtttctagagaaacggagcatgtcggatcgttcggagaactccaaggatgtggcaaagggacaggatatatcaaatccaatggaactaacagccgaggatcgactggccattgaggagcggcaaaataaagcgttcgccttcttcgccgaaaccctgcaaatctacggcgtcgaggagctaattttctgtttcaacggcggcaaggattgcaccgtgctgctcgatctccttatgcgttacctgcgccaggagaacatctccagcggcgacattcccatgctgtacattaaatccggcgattcgtttccggaaatcgatgagttcgtcgagcgttgcgtacgcaactaccgcgtccagttggttcagtacgagggtacgctcaaggaggcactcacccacatgtcgtcggacatgccgcggatcaaggccgtcttcgtgggcagccgcaacacggatccctactgccagcatctggcgcccatgcagcccacggacaacgactggccgccgatgatgcgcctgaatccgctgctggagtggagctaccacgacgtctggcactacatccacttgaactcggtgccctattgcagcctgtacgatcggggctacacctcgatcgggaatcgtgcgaacacagtgcctaatccgcacctccgacgcaccgatgccgagtgtgaatgtggttctaattccgatgccgtctgctcctgcgatctgggtggctatcggcccgcctgggagctccaggatgccaccatggagcgtgctggtcgcctgcccaggaagtaggattccatttgcgtggctatagtgtaattgaatagcttaaactccagttagtcacgaaactttatatagctgtgtatatatattaacgtgtgatctggatttcggtaaacaaacttaatttagtaaaattttgtacgacctaaggtatgccgctgaataaatgtggcctctgttagcaggccacttaagcagt

SEQ ID NO: 1650 - protein, 294 aa, DROSOPHILA
MNECRKNITNITNITANNSILCAKSISKKHLFLEKRSMSDRSENSKDVAKGQDISNPMELTAEDRLAIEERQNKAFAFFAETLQIYGVEELIFCFNGGKDCTVLLDLLMRYLRQENISSGDIPMLYIKSGDSFPEIDEFVERCVRNYRVQLVQYEGTLKEALTHMSSDMPRIKAVFVGSRNTDPYCQHLAPMQPTDNDWPPMMRLNPLLEWSYHDVWHYIHLNSVPYCSLYDRGYTSIGNRANTVPNPHLRRTDAECECGSNSDAVCSCDLGGYRPAWELQDATMERAGRLPRK

SEQ ID NO: 1651 - DNA, 3952 bp, DROSOPHILA
ctgggaaagagcttcacccaggtgtggtcgccggcaaaggaaacaactcgattctgctgttttagccggtgcaagaacgagtcctgcatctgctccgtatgacccacgtttagcgcaatgtcgataaagttcgaaagggtgccggtggtgatgctcttcaagcgtggcatagtcaccgtcggtatgtccacatggagcttaagcttctcgcaggccctagaataagccaccggcatagacgtggcatcgggaaaatcatcgcgcaacgcgtcgaccagtaacagcacaaaggagtcataggcaggtggcggcggcgtcagtctgtaaagggtaacgagcattataggggcgctatctcacgcaattatcagctcataaactcactccatgccaagcagagcggtgggccggccctctggcacggtgctttccttctccgccaccgagtaggaggccggaaagaagccaatcagaaagagcacggcgccgcaaaggaacgccgtgagcatgccgatggtatagaccagccaacttttgtgctgttccatcttcttgttttcatcgaaagtaccgcgctccaccgaaaaccacaacaaattcaatataattgccgcccgtcagctggaagtcaaatataaaggctagacaatcgataagtgctgtatgctatcgatagacggcaagcaaaacttcaggggcgtaggcacataaaactaataaatgctaaagtcttacgtataatttatatttattttaaaactattgatacgaaagagttaagagaggaaatttgttagctttatggaaaaaaagtattaatatttacataatattactaacgttttgccatttctcgaagtgtatattattttatacttaatttatcttaatttacatttaaaatcttacatataaaagaaattttttaaatttgatacttataaaacaaacgaatttaatatcgtctgtcgaacccttttgcccatttgtgaatgcgcccatggtctctcatagtcggatatgtataaacaaacgcttttgattgttatttctaacttaaaatggaaacttgcggccttatttgtgtgagcagggactacgagaagttcctgatgcgctgctcctactgtccaacggacgtggaggtggcccagtggcaggagtttgtgctgcacatccgcaacgtgcatagcaaagtaaggagcatggaagacgacttcgagccagtgggggaaaattctacggagtctgggcacgtagatcctccagaggagaaaccccaagcggaagagtcgatattccagcaagacgaatcggcggacggagcctgtgtacagctgcatattgacgcagtgcgttcgtcgacaaacgagactgaggagtcggacgtatctttggttacagatgaagaagaatccgtccaggacgaggatccaagtgaaccagctcttgatgatgccaatttaaaaaccacacccacatacaaggtacttctagaagccattcatgaacgcgctaaactaatctcagcattcaacttcagtttcatccatccttctttcgccgagatcaccgaaccataaagttcatagagatctacaaggaacacccgtgcctttggaatcccgctcacagcgactacaaggaacccaagaaatgcaaagaagccctgaagcgtatggccattgacttggaggcaactgtatccgtattcctgaacgagatggccttaaagctggccatcaagaaagtccacatgcagttcaacaccgtgcacaagcgggtggtgtctggaaaacagaaacctcaatcgctggctttcagtatatacaaattgtgttgcttcttgaacgctagcaacgatgaagaaggggctacgaataacgaaaaaattaaggcaagatatttgaattaattcaaattgaaattgttaacaagcatactttgcccgcagcttgatttctccaagaaaaacaagctgactaccgacctgatagagatgtacgcaaactttccgcagctatacgactccaaccacaaggagttctccaatatgagctctcgaaaacaggcatacgagagcatggctgcggaaatctcagtgcccaatgtggacatcaacagcgatgacatattccgcgccatccagaatctccgccaatggtactacaagaacactaagcatgccatttatgccggaagtacagccgagaagttctacctagaggtgtgtcggttcatgcctgcaaagatgtacaagcagcggctggtctgcgaattttgccaccagattacgtcctcggatcatgtcctgcagtcgcacatcttcaaggcgcacaacatcggcgagctgcccttcaaatgcaccttgtgcgaccgaagttttgtgggacgttgcgagctggctaatcacatacagcgggtccatatcggcaagacccacaagtgcacccattgtgagcgttcattcgctgtgatgtcggacctgcagctgcacatccgtacgcacactggccacaagccttacgtctgcgagcattgcggcaaggccttccgactgcggtcccaaatgacgctccacgtcacggctattcacacgaagatcagagccttcaagtgcaccatgtgtcccaaagactttgtgaaaaaggtcgacttatcggatcacatcaagggccatttaaacatccgcgacaaaatctgcagtgtgtgcggtaagggattcaccagctgccatgcactcatccgacaccggcagattcactccgaggtgaagaagtttgtgtgcaaactctgcgactccaggttctcccagtttgtgggtcttaatacgcacatgaagcgcacccacaacattcttcgtaataattcacaaaagggtaaagatgctgtggatgcagagaactgaatttgattaaatttgcaataaaatgacagtttataaataggcaatcttttgcaaatggggggaaataaaaatacacaaatgagagtgaaacaatatgtttaaacaaatttatttatataacggtttaagaatgtatattaataattaagaatataaattctacattatctggccatgtccatctgtcgaaatctggggatgtacatctaaaagcctaaacacattcccctgcctacgctgcgctattttttccaaaatgttggcacgcccacaaggcgccgacaactgtaacgcccatacatttgaaaaacgttttggtgttttcctgttcatatttgtctcgctattttctatcgatatgacaaaaaaaatataatttctcaacaaataagcttgattgattttgatttttccaaatggttagtactagaattttataacattttttttcgaaaattgaaatgtactagttactttaaagattcattcatgaaatgcagatttttaatcatttttaagcaccaccaacagttgttaaaacgttttcttttaagccttcataaaattgtgtttaaatattattttaaaaatagatttttatcgaatagtctatcgatacataattatttcagtcgttgtccaacacagtcccaaacgcataaaaaaattgttaccttaaataaacgaatatattttcagaaaaggaacatttttcaagctgaagtcagatcagagcgcacaacgtaagcatggagctgtgcggcaatgtgatgaccaactccaagtacgagatgttccggctgaaatgcctctactgcagcatagagagcgagctgaaggattgggagctgttcatcgtccatgtgaaatcggcgcactactgcgaagacgaggacgttaggattaatgaaatcaaagaggataccgaggagctatacagcgtcgttgacgcggcggacccagccatcgcctatgggccggatgagttcttcgaggtgatcgaaaacagcaatggggtcgatcaatggatggaagctgatagca

SEQ ID NO: 1652 - DNA, 1725 bp, DROSOPHILA
atggtctctcatagtcggatatgtataaacaaacgcttttgattgttatttctaacttaaaatggaaacttgcggccttatttgtgtgagcagggactacgagaagttcctgatgcgctgctcctactgtccaacggacgtggaggtggcccagtggcaggagtttgtgctgcacatccgcaacgtgcatagcaaagtaaggagcatggaagacgacttcgagccagtgggggaaaattctacggagtctgggcacgtagatcctccagaggagaaaccccaagcggaagagtcgatattccagcaagacgaatcggcggacggagcctgtgtacagctgcatattgacgcagtgcgttcgtcgacaaacgagactgaggagtcggacgtatctttggttacagatgaagaagaatccgtccaggacgaggatccaagtgaaccagctcttgatgatgccaatttaaaaaccacacccacatacaagtttcatccatccttctttcgccgagatcaccgaaccataaagttcatagagatctacaaggaacacccgtgcctttggaatcccgctcacagcgactacaaggaacccaagaaatgcaaagaagccctgaagcgtatggccattgacttggaggcaactgtatccgtattcctgaacgagatggccttaaagctggccatcaagaaagtccacatgcagttcaacaccgtgcacaagcggcttgatttctccaagaaaaacaagctgactaccgacctgatagagatgtacgcaaactttccgcagctatacgactccaaccacaaggagttctccaatatgagctctcgaaaacaggcatacgagagcatggctgcggaaatctcagtgcccaatgtggacatcaacagcgatgacatattccgcgccatccagaatctccgccaatggtactacaagaacactaagcatgccatttatgccggaagtacagccgagaagttctacctagaggtgtgtcggttcatgcctgcaaagatgtacaagcagcggctggtctgcgaattttgccaccagattacgtcctcggatcatgtcctgcagtcgcacatcttcaaggcgcacaacatcggcgagctgcccttcaaatgcaccttgtgcgaccgaagttttgtgggacgttgcgagctggctaatcacatacagcgggtccatatcggcaagacccacaagtgcacccattgtgagcgttcattcgctgtgatgtcggacctgcagctgcacatccgtacgcacactggccacaagccttacgtctgcgagcattgcggcaaggccttccgactgcggtcccaaatgacgctccacgtcacggctattcacacgaagatcagagccttcaagtgcaccatgtgtcccaaagactttgtgaaaaaggtcgacttatcggatcacatcaagggccatttaaacatccgcgacaaaatctgcagtgtgtgcggtaagggattcaccagctgccatgcactcatccgacaccggcagattcactccgaggtgaagaagtttgtgtgcaaactctgcgactccaggttctcccagtttgtgggtcttaatacgcacatgaagcgcacccacaacattcttcgtaataattcacaaaagggtaaagatgctgtggatgcagagaactgaatttgattaaatttgcaataaaatgacagtttataaataggcaa

SEQ ID NO: 1653 - protein, 539 aa, DROSOPHILA
METCGLICVSRDYEKFLMRCSYCPTDVEVAQWQEFVLHIRNVHSKVRSMEDDFEPVGENSTESGHVDPPEEKPQAEESIFQQDESADGACVQLHIDAVRSSTNETEESDVSLVTDEEESVQDEDPSEPALDDANLKTTPTYKFHPSFFRRDHRTIKFIEIYKEHPCLWNPAHSDYKEPKKCKEALKRMAIDLEATVSVFLNEMALKLAIKKVHMQFNTVHKRLDFSKKNKLTTDLIEMYANFPQLYDSNHKEFSNMSSRKQAYESMAAEISVPNVDINSDDIFRAIQNLRQWYYKNTKHAIYAGSTAEKFYLEVCRFMPAKMYKQRLVCEFCHQITSSDHVLQSHIFKAHNIGELPFKCTLCDRSFVGRCELANHIQRVHIGKTHKCTHCERSFAVMSDLQLHIRTHTGHKPYVCEHCGKAFRLRSQMTLHVTAIHTKIRAFKCTMCPKDFVKKVDLSDHIKGHLNIRDKICSVCGKGFTSCHALIRHRQIHSEVKKFVCKLCDSRFSQFVGLNTHMKRTHNILRNNSQKGKDAVDAEN

SEQ ID NO: 1654 - DNA, 4044 bp, DROSOPHILA
ttccgactgcggtcccaaatgacgctccacgtcacggctattcacacgaagatcagagccttcaagtgcaccatgtgtcccaaagactttgtgaaaaaggtcgacttatcggatcacatcaagggccatttaaacatccgcgacaaaatctgcagtgtgtgcggtaagggattcaccagctgccatgcactcatccgacaccggcagattcactccgaggtgaagaagtttgtgtgcaaactctgcgactccaggttctcccagtttgtgggtcttaatacgcacatgaagcgcacccacaacattcttcgtaataattcacaaaagggtaaagatgctgtggatgcagagaactgaatttgattaaatttgcaataaaatgacagtttataaataggcaatcttttgcaaatggggggaaataaaaatacacaaatgagagtgaaacaatatgtttaaacaaatttatttatataacggtttaagaatgtatattaataattaagaatataaattctacattatctggccatgtccatctgtcgaaatctggggatgtacatctaaaagcctaaacacattcccctgcctacgctgcgctattttttccaaaatgttggcacgcccacaaggcgccgacaactgtaacgcccatacatttgaaaaacgttttggtgttttcctgttcatatttgtctcgctattttctatcgatatgacaaaaaaaatataatttctcaacaaataagcttgattgattttgatttttccaaatggttagtactagaattttataacattttttttcgaaaattgaaatgtactagttactttaaagattcattcatgaaatgcagatttttaatcatttttaagcaccaccaacagttgttaaaacgttttcttttaagccttcataaaattgtgtttaaatattattttaaaaatagatttttatcgaatagtctatcgatacataattatttcagtcgttgtccaacacagtcccaaacgcataaaaaaattgttaccttaaataaacgaatatattttcagaaaaggaacatttttcaagctgaagtcagatcagagcgcacaacgtaagcatggagctgtgcggcaatgtgatgaccaactccaagtacgagatgttccggctgaaatgcctctactgcagcatagagagcgagctgaaggattgggagctgttcatcgtccatgtgaaatcggcgcactactgcgaagacgaggacgttaggattaatgaaatcaaagaggataccgaggagctatacagcgtcgttgacgcggcggacccagccatcgcctatgggccggatgagttcttcgaggtgatcgaaaacagcaatggggtcgatcaatggatggaagctgatagcaaggtaagactctttcactcgcttaccaagggtggtcaaataagtgagctctcgttgaccgcaggatatccagtacgaggaagacgccaccgcttggtctgcagctacaaacaattcctgggagttcggtccaggcggcagctctttggaacttccagccggaaaggaagtcacacaaatggacgagtcttcccaaaatcacatacccctaaacacagacgatgatgatgttgattgtagtgacttctttatgtctgaggatgacttggcacctcctagaaaacctggacgtccgcccaggcgaacaagaccaggacaggttttcaaggttagtacgtagtatatttcacttaagctgaaattcattccacttaacggcgtcattcagttcaaagtttcgtttattcggagcaatccccgtgtgctgcatttgatccaagcgtacaaagagcatccctgcctgtggaacccttccgatgaacactaccaggacgagcctgcacgaagcatggcctacgaggcgataatggaacgcatggaccgcaaggccaatgttctcttcaccgtggaagaactgaagaaaacgctcgagcaactgcacgtgcagtacacgctggctttggagacaaaacaaaggggaaagcttgttggacttgcagcgcgttactttgccaagtgcgagttcctcagtgtggcgcctgttgtaacgccaagggagaacgaggaggacaacgacttgactgcaattaaggtaataactagcccactataatgtagctcttttctgaccaaaaatccttttttcagcttaattttaaggaggaaaacctgataaccacctcattcatagagacctatgccaactatcccgtgctgtataatcaagcgttgccagactttggctcaatagagatacgtgcagatgccttcaaaagaatggcaaaggaattccagccagtggtgaaggccaacgaaacggacgtttacattgcggtcaacaagctgcgccgttggctttacgatgccattcgtcgcctcaaatccaaggaactaattcagaagtgcagcaagcaagaggttcagtatctgcaaatgtgcagcttcttgcccgccaagggttccgaaagtcaggtgctgtactgtgactactgcgataaacgtttccacggcgactacaacctacgggtgcacatcgtcaaggcgcacgaggtgggcgacctaccgtacctctgctcgttctgcccgaggcgcttcgaccgccacgtagacatggaccgtcacaagctgcgttcccacttcgaacgcaagttgaagtgccagtactgcgaaaaatcgttcgccgtggataccgacctaaaggtgcacacactaatccacacgggcgagcggcctcacgtctgtgacatctgcggcaagacattccggctcaagctactcctggaccaccacgtcaacggagttcacctgaacattagaccctacagctgcaatatgtgcaccaaaaccttccgcaagaagttcgagctggccaaccatatcaaaggacatctgaatatccgtgataagaagtgcgagtactgtgatgctacgttctatgaccattcttcgctttccagacatcgccgcagccacagatcggaatgaactctcgccttgagggacatttttagaaactgctttattttttgataacgagaatcagtaagcttcatttgatgtaaatcaagaataaacttacgttagagtagtgataataacaagcgtgttgttaagcacttacggcttttgtgtatttgataagaacatgtgtatgataatcatatgcacaagcttttcctttttcatactttccttttcaaaatttggtttaaggaatgtattattcataaaaaaaagaagaagccggaaaaataagttcgttttaagataaatttgtataaccgttacttgtagaggagatattagaataacatatgattttttggttctggctctagatctagagctggcttgaggctctcccgagtttttgttcaaaagtcagagagcggagagctctagagctagcagctctattattattatttttgatcaaatgacgtgtacaaaattttatatatattcatttttaacaatgtatttatatttcttttatgaaatatatttttttaaatgtattttcctttttgccaaatttatatttttaattacaatagttataataacgatttaagactttatttagtttattagcttaaataatgatgaaaataatttttatacggtacaagatactgctcatagacccttgttgaagtatgtcgtcagtgcaattttaaatatttttaattataagcaaaaataaataagcggtatttaattaataacaactcttcttaaaagaatagtcaaggcattaaattttaaataactctgtagtagatcgtattgcaacaagctttgaccaaaactttaaatatgtatgtatgtaccttcgtttctgagatcaaaattgatttcgagacgaaagttttctagcacaagtatgctcatatacactttctcgtttgttgttttaacacacacaaggaagtacattctattttaagaaatttacgctctccattttacgcgtgcggagtga

SEQ ID NO: 1655 - DNA, 1867 bp, DROSOPHILA
cacagtcccaaacgcataaaaaaattgttaccttaaataaacgaatatattttcagaaaaggaacatttttcaagctgaagtcagatcagagcgcacaacgtaagcatggagctgtgcggcaatgtgatgaccaactccaagtacgagatgttccggctgaaatgcctctactgcagcatagagagcgagctgaaggattgggagctgttcatcgtccatgtgaaatcggcgcactactgcgaagacgaggacgttaggattaatgaaatcaaagaggataccgaggagctatacagcgtcgttgacgcggcggacccagccatcgcctatgggccggatgagttcttcgaggtgatcgaaaacagcaatggggtcgatcaatggatggaagctgatagcaaggatatccagtacgaggaagacgccaccgcttggtctgcagctacaaacaattcctgggagttcggtccaggcggcagctctttggaacttccagccggaaaggaagtcacacaaatggacgagtcttcccaaaatcacatacccctaaacacagacgatgatgatgttgattgtagtgacttctttatgtctgaggatgacttggcacctcctagaaaacctggacgtccgcccaggcgaacaagaccaggacaggttttcaagttcaaagtttcgtttattcggagcaatccccgtgtgctgcatttgatccaagcgtacaaagagcatccctgcctgtggaacccttccgatgaacactaccaggacgagcctgcacgaagcatggcctacgaggcgataatggaacgcatggaccgcaaggccaatgttctcttcaccgtggaagaactgaagaaaacgctcgagcaactgcacgtgcagtacacgctggctttggagacaaaacaaaggggaaagcttgttggacttgcagcgcgttactttgccaagtgcgagttcctcagtgtggcgcctgttgtaacgccaagggagaacgaggaggacaacgacttgactgcaattaagcttaattttaaggaggaaaacctgataaccacctcattcatagagacctatgccaactatcccgtgctgtataatcaagcgttgccagactttggctcaatagagatacgtgcagatgccttcaaaagaatggcaaaggaattccagccagtggtgaaggccaacgaaacggacgtttacattgcggtcaacaagctgcgccgttggctttacgatgccattcgtcgcctcaaatccaaggaactaattcagaagtgcagcaagcaagaggttcagtatctgcaaatgtgcagcttcttgcccgccaagggttccgaaagtcaggtgctgtactgtgactactgcgataaacgtttccacggcgactacaacctacgggtgcacatcgtcaaggcgcacgaggtgggcgacctaccgtacctctgctcgttctgcccgaggcgcttcgaccgccacgtagacatggaccgtcacaagctgcgttcccacttcgaacgcaagttgaagtgccagtactgcgaaaaatcgttcgccgtggataccgacctaaaggtgcacacactaatccacacgggcgagcggcctcacgtctgtgacatctgcggcaagacattccggctcaagctactcctggaccaccacgtcaacggagttcacctgaacattagaccctacagctgcaatatgtgcaccaaaaccttccgcaagaagttcgagctggccaaccatatcaaaggacatctgaatatccgtgataagaagtgcgagtactgtgatgctacgttctatgaccattcttcgctttccagacatcgccgcagccacagatcggaatga

SEQ ID NO: 1656 - protein, 586 aa, DROSOPHILA
MELCGNVMTNSKYEMFRLKCLYCSIESELKDWELFIVHVKSAHYCEDEDVRINEIKEDTEELYSVVDAADPAIAYGPDEFFEVIENSNGVDQWMEADSKDIQYEEDATAWSAATNNSWEFGPGGSSLELPAGKEVTQMDESSQNHIPLNTDDDDVDCSDFFMSEDDLAPPRKPGRPPRRTRPGQVFKFKVSFIRSNPRVLHLIQAYKEHPCLWNPSDEHYQDEPARSMAYEAIMERMDRKANVLFTVEELKKTLEQLHVQYTLALETKQRGKLVGLAARYFAKCEFLSVAPVVTPRENEEDNDLTAIKLNFKEENLITTSFIETYANYPVLYNQALPDFGSIEIRADAFKRMAKEFQPVVKANETDVYIAVNKLRRWLYDAIRRLKSKELIQKCSKQEVQYLQMCSFLPAKGSESQVLYCDYCDKRFHGDYNLRVHIVKAHEVGDLPYLCSFCPRRFDRHVDMDRHKLRSHFERKLKCQYCEKSFAVDTDLKVHTLIHTGERPHVCDICGKTFRLKLLLDHHVNGVHLNIRPYSCNMCTKTFRKKFELANHIKGHLNIRDKKCEYCDATFYDHSSLSRHRRSHRSE

SEQ ID NO: 1657 - DNA, 5545 bp, DROSOPHILA
ggcattttcgaatgtcatgattccattccgcagataagcgagttctgtggttcaccacctaacatagaatttattcgagtattttacaaaaccaaatgtatcccgcttatttgaaaatctcacaagatcacaaagataataatgaagctagcttgaaatagttttggaaagttcgaaactgctgtttcctattaggaaaccccaagtgcctagtgatgctaatttcgattttttttttagcccacggacaacgactggccgccgatgatgcgcctgaatccgctgctggagtggagctaccacgacgtctggcactacatccacttgaactcggtgccctattgcagcctgtacgatcggggctacacctcgatcgggaatcgtgcgaacacagtgcctaatccgcacctccgacgcaccgatgccgagtgtgaatgtggttctaattccgatgccgtctgctcctgcgatctgggtggctatcggcccgcctgggagctccaggatgccaccatggagcgtgctggtcgcctgcccaggaagtaggattccatttgcgtggctatagtgtaattgaatagcttaaactccagttagtcacgaaactttatatagctgtgtatatatattaacgtgtgatctggatttcggtaaacaaacttaatttagtaaaattttgtacgacctaaggtatgccgctgaataaatgtggcctctgttagcaggccacttaagcagtattcctagtttttatggagtatttaaatttttagttgtttagttgttgaatgtttctttctaattttgcataaaagctgaagcaagctaaaagagccaaagaaacagcactggcttcagtgcaaaatctagtgctgcagcaagctggcttttaaaagctagaaaaagctcaagatgccatggtgccactgttaaaacgccagcatggcagcactagatggccagtcagctgttttgccagctgattttcgccgcattttcacaacattacgcgattctttgaactttttttgctgtgatatttttacgagatttacgtaatcctacgcgccgatcatcaccagcgaatcacccacgcgagagcagtgcacaataaaccagtatttcctcgctccgcgatgtcgcgatccgcacaagaagctgcggcgctgctgcggggactgcggatcttgttggaggcgtgtgggcgcgagcatctcgcccacggtcgtcatctgtggagcaattcaagcattcgtgagctaatcgccgagaatgtggcgcacacacagcagctggtgagaagttccagtcaaaatcccaccgaggagctgaaaaaactgcagcaaactgtaaaagaaacgggcgaaaggggctacgtggtggccaaaggtatttgctcgctgctggagacgaaaatcaagatgtcccgcgaggaatcggccatctctgagcctgcacaagtctcctcaattcgtaaatccacacccacggcacaaaatccagcaagttgggacgccgccaacttggatatatcatccataacgctgcaggagttcgaggagatactctcgcgccggaacaaagatcgtagtgttagcttgcgcaccccggcaaccaaaagcaaccagaccatgcccaaaaaagaaacgtcaaccaatccgggcatcattacccaggacacggagtatgtaaacaatgtgctgcggtttgtggcgggcgccaaggtggaggagcagccaccagatgcgcagccgaagaagaagtccgaccagccggccattgaagtgcccgaactgagcaaggtggccaaacagcgcaaggttccctcctcccggataggcagaatggcctcctttggcggcctgttcgccggcctgggcctgggaaccctcaacgagctgaccaagggtgcactcggcctgggcggttcgaccagcatgcgagaggcgttgctcagtcccgccaatgctgaacgcatcgtggacacgctatgcaaggtgagaggagctgccctgaagatcggacaaatcctgagcatacaagattccagcgttgtgtcgccgcaactggccaaggcgtttgagcgggtgcgtcaggcggcggactatatgcccgattggcaggtcgaacgcgtgatgaacacccaattgggtgccgattggcgacagcgtctcaagagtttcgaggacaaaccctttgcggctgcctccattggccaggtgcatcgggcaacgctgagcgatggcatggatgtggccattaagatccaatatcccggtgtcgcccagagcatcgagagcgacattgacaatttggtgggcatgctgaaggtgtgggatgtctttccacagggtttcttcatcgacaatgtggtgcgcgtggccaaacgtgagttgcaatgggaggtggactatgatcgcgaggcggaatacacggagaagtttcgcgaaatgatcgcgccctatcccgagtactatgtaccgcgtgtggtgcgcgatctgaccacgtccagcgttctgaccaccgaactggtgcccggtgtgccgctcgataagtgtttcgatctgaggtaagctaatgatgcaaacgcacatgcatatagtaatcaatgggcttcattgaaaattcacttccagctacgagcatcgccgccacatagccgcatccgtgctgaagctctgcctgcgcgagctcttcgagattgagtgcatgcagacggatccgaattggtccaactttctgtacgatgcgcccagtcgccggctaatgctgatcgacttcggttcgacgcgcttctataggcatgaattcatccgcaactatcgccgggtgatcatgagcgccgccgagaacaatcgtcagggcgttttggagatgtcgcgcgaaatgggcttcctaaccggctacgagacgaagcaaatggagcaggcgcacgtggatgcggtgatgatattgggcgagatctttcgctacgacggtgatttcgatttcggtcgacagaataccaccgaaagattggccgccctggtgcccacaatggtggcgcatcgattgtgcccgccgcccgaggagatatactccattcatcgcaagctatcgggcattttcctgctgtgcgcgcgtctgaatgtgcgcatgaattgcgtgcccttctacaaggacatcgttctggggaagttcaaggactagtgagcacagctcacccctcttcccttgaccattttctttttttttttttttgtccaatccaatcccagttgtaaaccataagtgcgcttaatttgtaaatgcgattcgctgcaagattacatatgttaatttcccaactaacgtgtttatccttaactgactgggtcagggttagttgtcaattgaattggaaacaagtaggttttgagcaatccccaacagctaacacacacacacacacattttagttaaaaaccccaacaataaaacactacacaaaaaaaatatatatacattgtatctaatgcaaaaaacatgaagacatttgtgaagacccaaagcatgaagaggaagaacgagttgtttcaccatgattgcgtctcggacatcgacggatccgtatccgatgggagcgaggagttggaggagcagtcgccggagcaaatcgaggagatagcctggccgcaaatgaagcgtgagattggcgccatgaatcgaacgctggacgaaatacaggcccagttggccatcgattttcacgagcgcgacggcggcagatcgtgttgggaggaggaacaggaggcgttggccaagggcctggaaccggaggactcgcgctggatgatcatgcacggtagcagggaggcggccttgcgagaactgcaatggaataacctgcgcattcgcaggcaactggcggatctcgttcgctgctcggaactgggcagagcacgcatctcggcactggatcgtctgttccaacggcagacgaaggagctggtcgggtgtcggcaggaccacgagcgcgtcctctccttccacctgaccaagcaactggaggcgggcaagtgcctgcagcgctatcgctacgcgcgtgacttgtacgccagctggcgtgagctcttcaagatgggtcgccacctgaaggaggcctacaagaagatactcgagcgcacgcagtctcgcttggagtatgcagagatcaagcggcaggcactcgacgagatgacggtggcccacgagatgtgcctgggctcaacgcgaagtctgttggcccgcgtccgggatctggagctcggcctggcaccgctgggcttctcaaggccatcggttatgtcccgcaaaatcggtagcctcggcacgtctggcgccgggcatgccgatagcaatcgcgccgaggagcatcccggcaggcccgtctgggtgaaggccaaggcctggcagcgtcgttcctatcggaccgtcaagttctcccgcggcgaattgctcgagctgccggtggttgtgccgcccgaggcgaagacctggtacggcaaaatgttgcgcatgctgcacaatccgcccaaaatctattagtgtttgtttgccaattgtttagctcatttaaagtaataataaacaaaaaattcaaaataagcaacagttttttttttattcaagcgcactgttagctaacattgctgcttaacaggcagttagcagcgagctgcacggtcacactgatagcgaaagcgcatttcccgccgatcggctagccggtcacactgcaaaccgtcgcgtttcatttcgcgaaggctgcgcgcgcggattacggttaattttcagttggtttacaaactttacaaacggcgtacgcttatcgcgatcgcttttaatcaacaaaccgaattagttgccaaaataacgggaatgacacaggaaatgtgctgccggtgctcaaatgctagcttaattgagtgaaaaagtgcaagtgatcgaactgcaacggttacaaaaaaaacggttgtttttctctttatttttgttttataaactaagaaatcgttctataaattgcatttatttgaatatctgtaagcccgcgtttatctcaaatgtacttgtgcgcgccacctgttttttaattaatattttactacaatcggcgtgataaaaagtgtatgaaattcgttattttttttatttttttggtttttgttgagagtgcaagatcgtgcagcttgtgcgtgtgtgtgcgttcagtgtgcttgtgaggaagttatagtttaatgttggttagcttcaattgtcgagcaacagagaaaaaaagaaataaataaataaaacagcagcagcaacaacaacgatgtgatgctgattgatgtcacacacaccacgaaggaaaaaaaaataaaaaataaataaagtaagtagcagacaattggatttgcatgggggaagaagaagagcgaagagccgagtttatcaatgaaagtgaactgtgggagttgctcgctttcagtgggtgtgtgtgtgtgtgtgcacagtggcgcagccaaacggggatttctggggttaataacccccagcataccgg

SEQ ID NO: 1658 - DNA, 3136 bp, DROSOPHILA
caacattacgcgattctttgaactttttttgctgtgatatttttacgagatttacgtaatcctacgcgccgatcatcaccagcgaatcacccacgcgagagcagtgcacaataaaccagtatttcctcgctccgcgatgtcgcgatccgcacaagaagctgcggcgctgctgcggggactgcggatcttgttggaggcgtgtgggcgcgagcatctcgcccacggtcgtcatctgtggagcaattcaagcattcgtgagctaatcgccgagaatgtggcgcacacacagcagctggtgagaagttccagtcaaaatcccaccgaggagctgaaaaaactgcagcaaactgtaaaagaaacgggcgaaaggggctacgtggtggccaaaggtatttgctcgctgctggagacgaaaatcaagatgtcccgcgaggaatcggccatctctgagcctgcacaagtctcctcaattcgtaaatccacacccacggcacaaaatccagcaagttgggacgccgccaacttggatatatcatccataacgctgcaggagttcgaggagatactctcgcgccggaacaaagatcgtagtgttagcttgcgcaccccggcaaccaaaagcaaccagaccatgcccaaaaaagaaacgtcaaccaatccgggcatcattacccaggacacggagtatgtaaacaatgtgctgcggtttgtggcgggcgccaaggtggaggagcagccaccagatgcgcagccgaagaagaagtccgaccagccggccattgaagtgcccgaactgagcaaggtggccaaacagcgcaaggttccctcctcccggataggcagaatggcctcctttggcggcctgttcgccggcctgggcctgggaaccctcaacgagctgaccaagggtgcactcggcctgggcggttcgaccagcatgcgagaggcgttgctcagtcccgccaatgctgaacgcatcgtggacacgctatgcaaggtgagaggagctgccctgaagatcggacaaatcctgagcatacaagattccagcgttgtgtcgccgcaactggccaaggcgtttgagcgggtgcgtcaggcggcggactatatgcccgattggcaggtcgaacgcgtgatgaacacccaattgggtgccgattggcgacagcgtctcaagagtttcgaggacaaaccctttgcggctgcctccattggccaggtgcatcgggcaacgctgagcgatggcatggatgtggccattaagatccaatatcccggtgtcgcccagagcatcgagagcgacattgacaatttggtgggcatgctgaaggtgtgggatgtctttccacagggtttcttcatcgacaatgtggtgcgcgtggccaaacgtgagttgcaatgggaggtggactatgatcgcgaggcggaatacacggagaagtttcgcgaaatgatcgcgccctatcccgagtactatgtaccgcgtgtggtgcgcgatctgaccacgtccagcgttctgaccaccgaactggtgcccggtgtgccgctcgataagtgtttcgatctgagctacgagcatcgccgccacatagccgcatccgtgctgaagctctgcctgcgcgagctcttcgagattgagtgcatgcagacggatccgaattggtccaactttctgtacgatgcgcccagtcgccggctaatgctgatcgacttcggttcgacgcgcttctataggcatgaattcatccgcaactatcgccgggtgatcatgagcgccgccgagaacaatcgtcagggcgttttggagatgtcgcgcgaaatgggcttcctaaccggctacgagacgaagcaaatggagcaggcgcacgtggatgcggtgatgatattgggcgagatctttcgctacgacggtgatttcgatttcggtcgacagaataccaccgaaagattggccgccctggtgcccacaatggtggcgcatcgattgtgcccgccgcccgaggagatatactccattcatcgcaagctatcgggcattttcctgctgtgcgcgcgtctgaatgtgcgcatgaattgcgtgcccttctacaaggacatcgttctggggaagttcaaggactacatgaagaggaagaacgagttgtttcaccatgattgcgtctcggacatcgacggatccgtatccgatgggagcgaggagttggaggagcagtcgccggagcaaatcgaggagatagcctggccgcaaatgaagcgtgagattggcgccatgaatcgaacgctggacgaaatacaggcccagttggccatcgattttcacgagcgcgacggcggcagatcgtgttgggaggaggaacaggaggcgttggccaagggcctggaaccggaggactcgcgctggatgatcatgcacggtagcagggaggcggccttgcgagaactgcaatggaataacctgcgcattcgcaggcaactggcggatctcgttcgctgctcggaactgggcagagcacgcatctcggcactggatcgtctgttccaacggcagacgaaggagctggtcgggtgtcggcaggaccacgagcgcgtcctctccttccacctgaccaagcaactggaggcgggcaagtgcctgcagcgctatcgctacgcgcgtgacttgtacgccagctggcgtgagctcttcaagatgggtcgccacctgaaggaggcctacaagaagatactcgagcgcacgcagtctcgcttggagtatgcagagatcaagcggcaggcactcgacgagatgacggtggcccacgagatgtgcctgggctcaacgcgaagtctgttggcccgcgtccgggatctggagctcggcctggcaccgctgggcttctcaaggccatcggttatgtcccgcaaaatcggtagcctcggcacgtctggcgccgggcatgccgatagcaatcgcgccgaggagcatcccggcaggcccgtctgggtgaaggccaaggcctggcagcgtcgttcctatcggaccgtcaagttctcccgcggcgaattgctcgagctgccggtggttgtgccgcccgaggcgaagacctggtacggcaaaatgttgcgcatgctgcacaatccgcccaaaatctattag

SEQ ID NO: 1659 - protein, 999 aa, DROSOPHILA
MSRSAQEAAALLRGLRILLEACGREHLAHGRHLWSNSSIRELIAENVAHTQQLVRSSSQNPTEELKKLQQTVKETGERGYVVAKGICSLLETKIKMSREESAISEPAQVSSIRKSTPTAQNPASWDAANLDISSITLQEFEEILSRRNKDRSVSLRTPATKSNQTMPKKETSTNPGIITQDTEYVNNVLRFVAGAKVEEQPPDAQPKKKSDQPAIEVPELSKVAKQRKVPSSRIGRMASFGGLFAGLGLGTLNELTKGALGLGGSTSMREALLSPANAERIVDTLCKVRGAALKIGQILSIQDSSVVSPQLAKAFERVRQAADYMPDWQVERVMNTQLGADWRQRLKSFEDKPFAAASIGQVHRATLSDGMDVAIKIQYPGVAQSIESDIDNLVGMLKVWDVFPQGFFIDNVVRVAKRELQWEVDYDREAEYTEKFREMIAPYPEYYVPRVVRDLTTSSVLTTELVPGVPLDKCFDLSYEHRRHIAASVLKLCLRELFEIECMQTDPNWSNFLYDAPSRRLMLIDFGSTRFYRHEFIRNYRRVIMSAAENNRQGVLEMSREMGFLTGYETKQMEQAHVDAVMILGEIFRYDGDFDFGRQNTTERLAALVPTMVAHRLCPPPEEIYSIHRKLSGIFLLCARLNVRMNCVPFYKDIVLGKFKDYMKRKNELFHHDCVSDIDGSVSDGSEELEEQSPEQIEEIAWPQMKREIGAMNRTLDEIQAQLAIDFHERDGGRSCWEEEQEALAKGLEPEDSRWMIMHGSREAALRELQWNNLRIRRQLADLVRCSELGRARISALDRLFQRQTKELVGCRQDHERVLSFHLTKQLEAGKCLQRYRYARDLYASWRELFKMGRHLKEAYKKILERTQSRLEYAEIKRQALDEMTVAHEMCLGSTRSLLARVRDLELGLAPLGFSRPSVMSRKIGSLGTSGAGHADSNRAEEHPGRPVWVKAKAWQRRSYRTVKFSRGELLELPVVVPPEAKTWYGKMLRMLHNPPKIY

SEQ ID NO: 1660 - DNA, 4066 bp, DROSOPHILA
ttttatacggtacaagatactgctcatagacccttgttgaagtatgtcgtcagtgcaattttaaatatttttaattataagcaaaaataaataagcggtatttaattaataacaactcttcttaaaagaatagtcaaggcattaaattttaaataactctgtagtagatcgtattgcaacaagctttgaccaaaactttaaatatgtatgtatgtaccttcgtttctgagatcaaaattgatttcgagacgaaagttttctagcacaagtatgctcatatacactttctcgtttgttgttttaacacacacaaggaagtacattctattttaagaaatttacgctctccattttacgcgtgcggagtgagatcaattttggccgtcaccaaaaaagtaactgcatagttgaaaaccaatgtaatggccgttacgcaccttaatattctagtgtctttaaaaaaagtgtatactacaatatattcgatgaaaggtgtgtaacatgcagaaggaaacgtttccgacaatattaagtatatatattctcgataaggaccaatagccgagtcggtctgtccctgtccgtctgtccgtatgaactacttgtatttccactggctaagtaaggagtatttgattgtcggggaattcgactcttgttccgaatgggaataagtaccagaatcagtcaactaaaagtagtgtttttattccagcttaaaatgaaatagtttaaaatatatttaaaaatttataattgatttaaaagttgatttaacacaactaatactcatgttatagcaagatttaaatttaagctgtatagtatatataattatttgtctacatataaaatattttctaaaattgagatgatttcgtttcaatggaatttccgcgggtatcttcccaacactgaccatccggtgcttatcgataccgataaatggcgttgttgttgtgctatttggcattgtatcttatttgtttgtaagcaaatcatggtggtttgcgggaacattttggccaggaacaacttcgagcactttgttctggcgtgtgctcaccaaaatgactgctacgtggagatggagttcaagcggtggcgagagttcatcgtgcacgtcaaggagcacctggaagcaaatccaagcatgcagcaagagctcactacttccgaagtcatttcgtcagccaaatgcgaggaggaggtctcgccagccaaggtgttcatagtggaggagcctccggaaaattgcctggctgaagacatgttcgttgacgtgccaccttcatcagagaacgacgagagcaccagcccggtggaggaggaggaggaagaagacgacgaggtggactcctcctcgatgacagttgactgcgaattgggcaccagaaactccacacactttgctcctttaaccaaagtaagcaactgactacaccagcaacaaaaaccaacaaattaaagcagacgttttgcatcccggcagttcaatcctacgttttaccgacgcagtcctcggatcacacagttcattgaactgtataagcagcagacatgcctctgggatccagcggatgagtcgtacagggacaaggagaaacgcgcaaatgcctatgaggagttgctggagcaattaaaggcgaccgtcaatcttcacctaacggcctataagctgaagaagtgcatcaccagcctacacgcgcagtatgcgtcgatctcgcggcagaagaaaactcagaaactaaccaaggttccactgtactaccatggaaagtacagctttctggcagagcgcggtagtctggaggatgcggacagcgatgatgtcgacggcgatggcaaaataaaggtgagtccgagtgacaaacagctttctaagccactctaatgcgttccccacgacagctggtgttcacagaggagaatcaactgaccacacagttcattgatttgtactccaagtttccccaactgtacgatcccgcgcacaagcacttctgcaatctaaacgtacgaaagtcatcgctcatagagatcactgacctgctgacttcggagttttcgttgggcctggtcacccactacgatgtctacgacagtattcagagcatgcgccaatggtattcgcgacggatcaaaaccctcacagacgtccaatgtgtgggtctctcgctggccgagaagcagtacatcgagcgctgcaatagctttatgcccactaaatcattccgacagaagcttaaatgtgaagtctgcgagcactcctttagcacagatcacgccctgcaagcacatcagttccgggatcataagatgggcgatggaggctggtttcgctgcacgctttgcgagctgaacttcgaccgaaagtgtcacctgcagcagcacagccagcgtgtgcacatggacaagagctttgtctgcgagatctgcagcaggagctttgcctttggaaatcaactggctatccacaaacgcacccatgacgagaagcacgtcgccaagccatttgtctgcgagttctgcggcaagtgttttaagcaaaaaatccaaatgacaacgcacgtaactgcggttcacaccaagatccgagccttcaagtgcgacatgtgccccaaggacttcctgaccaagcgcgacctcaaggaccacgtaaaggcgcacctgaacatccgcgacaaggtctgcgaggtctgtcagaaggccttcaccaatgccaacgccttagtcaagcatcgccacatccacaaggagaagaccctgcaatgttcgctctgcacgacgcgcttctcggagcgagttagtcttggcgtccacatgcgacgcacccacaagatcctcaagagctctctgtcgtcaagcgacgcactctttacaaagacattccctcagccttgagacatttccaaaccatgacaagtatttacatttgttaataaccagaaaatatggctatagtgccaaaaaacatgaattttttaatgttcttaatgtattattactcctaaatattttttagtattgaaacaagagattttacaatatatttgtccaagcttgcaaaaatgaaaacaaaaatgtttaaaatgatttctattattctattctattattcgacatatttgaattgttcgatttttagataatccatctgaattttcttaataaagactacactgagcactatgcatttgtatgcctttgtgatatagtaacttgaaaacacaaaaaagcactgaattttgaaattgaaggtgtaataatacttatttttatatctaattttgggttctattggcgtagcaattgagcatatcaggagtacattttgcctgctagccagcagaggttcctttgtctgccgttagagaaatttgtcctactatgtcaaatgttagaatttatagcatttttttatatttatttcattaacttcgggtaatcaaaattttcgaagttatcagctcacctattcttgcgctgtgcagcactggccaacagctgttcgtgttttggttttccgcgacgtgctcggtgttacgtgctctgcaccaagattacagacctggagaggagaaatgagcggactccttccgaagttgtggcgccaatgtgaagcggggctagtgcgccgtatcagccaggcactgattggacccggcgccagtcagagccggtggacagggacccgtctcctggccaccagtgcggataaaaatccggccccggggctgcgggagctgccccactgcaatgtgggcaccattggtcacgttgaccatggtaaaacgaccctgaccgccgccattaccagaatccagtcacagaagggtctggcggagtacctgtcctacgaccagattgatcgggcgcccgaggagaaggcgcgtggcataactataaatgcttgccatattgggtattccactacagaacgcacctacgctcacacggattgcccgggtcatgcggactacataaaggtagctcagccaaaagaaccaaccaatgttccaccaatttaacgaaactttctatctgatctacagaacatgatctc

SEQ ID NO: 1661 - DNA, 1944 bp, DROSOPHILA
atggtggtttgcgggaacattttggccaggaacaacttcgagcactttgttctggcgtgtgctcaccaaaatgactgctacgtggagatggagttcaagcggtggcgagagttcatcgtgcacgtcaaggagcacctggaagcaaatccaagcatgcagcaagagctcactacttccgaagtcatttcgtcagccaaatgcgaggaggaggtctcgccagccaaggtgttcatagtggaggagcctccggaaaattgcctggctgaagacatgttcgttgacgtgccaccttcatcagagaacgacgagagcaccagcccggtggaggaggaggaggaagaagacgacgaggtggactcctcctcgatgacagttgactgcgaattgggcaccagaaactccacacactttgctcctttaaccaaattcaatcctacgttttaccgacgcagtcctcggatcacacagttcattgaactgtataagcagcagacatgcctctgggatccagcggatgagtcgtacagggacaaggagaaacgcgcaaatgcctatgaggagttgctggagcaattaaaggcgaccgtcaatcttcacctaacggcctataagctgaagaagtgcatcaccagcctacacgcgcagtatgcgtcgatctcgcggcagaagaaaactcagaaactaaccaaggttccactgtactaccatggaaagtacagctttctggcagagcgcggtagtctggaggatgcggacagcgatgatgtcgacggcgatggcaaaataaagctggtgttcacagaggagaatcaactgaccacacagttcattgatttgtactccaagtttccccaactgtacgatcccgcgcacaagcacttctgcaatctaaacgtacgaaagtcatcgctcatagagatcactgacctgctgacttcggagttttcgttgggcctggtcacccactacgatgtctacgacagtattcagagcatgcgccaatggtattcgcgacggatcaaaaccctcacagacgtccaatgtgtgggtctctcgctggccgagaagcagtacatcgagcgctgcaatagctttatgcccactaaatcattccgacagaagcttaaatgtgaagtctgcgagcactcctttagcacagatcacgccctgcaagcacatcagttccgggatcataagatgggcgatggaggctggtttcgctgcacgctttgcgagctgaacttcgaccgaaagtgtcacctgcagcagcacagccagcgtgtgcacatggacaagagctttgtctgcgagatctgcagcaggagctttgcctttggaaatcaactggctatccacaaacgcacccatgacgagaagcacgtcgccaagccatttgtctgcgagttctgcggcaagtgttttaagcaaaaaatccaaatgacaacgcacgtaactgcggttcacaccaagatccgagccttcaagtgcgacatgtgccccaaggacttcctgaccaagcgcgacctcaaggaccacgtaaaggcgcacctgaacatccgcgacaaggtctgcgaggtctgtcagaaggccttcaccaatgccaacgccttagtcaagcatcgccacatccacaaggagaagaccctgcaatgttcgctctgcacgacgcgcttctcggagcgagttagtcttggcgtccacatgcgacgcacccacaagatcctcaagagctctctgtcgtcaagcgacgcactctttacaaagacattccctcagccttgagacatttccaaaccatgacaagtatttacatttgttaataaccagaaaatatggctatagtgccaaaaaacatgaattttttaatgttcttaatgtattattactcctaaatattttttagtattgaaacaagagattttacaatatatttgtccaagcttg

SEQ ID NO: 1662 - protein, 593 aa, DROSOPHILA
MVVCGNILARNNFEHFVLACAHQNDCYVEMEFKRWREFIVHVKEHLEANPSMQQELTTSEVISSAKCEEEVSPAKVFIVEEPPENCLAEDMFVDVPPSSENDESTSPVEEEEEEDDEVDSSSMTVDCELGTRNSTHFAPLTKFNPTFYRRSPRITQFIELYKQQTCLWDPADESYRDKEKRANAYEELLEQLKATVNLHLTAYKLKKCITSLHAQYASISRQKKTQKLTKVPLYYHGKYSFLAERGSLEDADSDDVDGDGKIKLVFTEENQLTTQFIDLYSKFPQLYDPAHKHFCNLNVRKSSLIEITDLLTSEFSLGLVTHYDVYDSIQSMRQWYSRRIKTLTDVQCVGLSLAEKQYIERCNSFMPTKSFRQKLKCEVCEHSFSTDHALQAHQFRDHKMGDGGWFRCTLCELNFDRKCHLQQHSQRVHMDKSFVCEICSRSFAFGNQLAIHKRTHDEKHVAKPFVCEFCGKCFKQKIQMTTHVTAVHTKIRAFKCDMCPKDFLTKRDLKDHVKAHLNIRDKVCEVCQKAFTNANALVKHRHIHKEKTLQCSLCTTRFSERVSLGVHMRRTHKILKSSLSSSDALFTKTFPQP

SEQ ID NO: 1663 - DNA, 3965 bp, DROSOPHILA
gtattttagttttctgtgcactccagtacacacctctgtttgatttttccagagaatgcagggaagagtgctagatttatgcattgccatggtggcttcgttggcttcccagatactgctccttttgtttcccttcaatgcaatttaaatccacgcacccggcaacgaatggaatggaattgaaacggaactgaatggacggacggattggcctatattgagatttattgtctcatcgctctaattacaataaggcagtgcctaccactgtgcgtcgcaatgtcgccattcttattccattctcaatttcgaagcccactcctgagccccgtggcgaatgccaaggaattccatttaaattactttttaatgtcctgctcacacacacacacacatagacacaagcaaaacctacgcacacacagacgtgctagcaaatcctgtaggaagactgaaaaatggtttgaaaatgcatttaattgaggttgtcctttttttttcgaaactcctgcaaagaaatacttgaatggccgaagggccattgtttgactcttgcttgttgcctaccaataagtttatatgtttccatacttattcaatcaatagtgattaccttgatgcagaggcatgtttggctaaaaatatatatttcatgcccgaaagccattcaaaatcagctaaaaaaccaattgccatagtttaggtttaactttgagagagaaatttggcataccgttttcattaaataactttaactggaatttagctgttggcacaagagatttttcgcctgacttaatcaacgtaatcacttaatcataattaatgataatgacaaatacattcgatatatgtatttaggccagtaatcttggcatcgctttcgatcgagttaccattgggtacatttatgtcagtgctcttggcttggtttttgatccagtcgacatagggatagcaatcatgccagtcacacatacacacactgactagccaatatcaaagaccgaaattaagcagacatattttctattcggaagtacaaaaaaaaaacataaaaaacatgtcatctagattcaagtcgagaattccggaacgcgttagacactcgctaacggtactggatggtccaaactcgcggatatcccgcatccgtgatgccgcgctaccaaatcgctgctcgctgaaccgctcccatttgccgatgccaataagcaatacgctgagcgctctggtgaagccagtatcgccgaaagttgtatttaagaaaacgctaacggatgaggaagcggtaatccgctcgctggtgcgacgttcaaaaccgctggcagttcgtggcaatcgtacatcctttcgccgcattcaattggctcacgctgcgccaattgacgattcttccgtgctgttgaaagccaccaatagcttttgcagcaccaattttcagctgcaaaagcccataaaggaggcaagtccgggtgccacagagaaggatcgtgccgctaacaaagtgaggtccgcaaaaagtctgctggatctggtggccggaagaaggcaaccgggtatggaacaaatacgtttcctttgcagcgatcatcgcctgatcaatgtgcccagtcccttgatgtatcgccattcggaggtgatgagccgtttggaaggggaggtgcagccaattccgttgcggtccattcgatcggcgacactgctacgtgtgattatgtggatgcacaagaagactctatgcgcaaacggaactgaaaaaatcgccgcgccgacaccaacagttgagacgtgcatttgcgaaataggcaaaggaaacggatatacgaaaagcgaggccagctgtcaaatcagtgagaacactcaaggtaatgctcaacaaacggtaaatttaacatgtcagatcctcggcgaaaaaatcgaaaatgattgcacaaaaatacttaagaatgtagaatttgattatgaccatacaccgattagaaatgataatatcgagaatagttgtgaaaacaatgatgaaagtgttaatgacgaggcaggtgttataagcaatcaaacaagcgactcaatggaaagtttcgaaaataacttgcaaaatcaagaaaattttatggtcgaatgttctacagatatcaaatgtaatgattacaaacaaaacgaaaatcaaaaagacgagaactgcacaattatagatgaaaataatggaaagttagtgttatataatccaaacattcaattaattcaaaataacgaaaacacaaacaaaagtagtagagattgcaagaatgatacaattaatgaattcacaaaagtaaatggtaactatcaagattacattcaaattaccgaaattggcaataataatatcacaggtgtaaatactggcgaagatgaacgtgaaatcggttgcttaaaaagcacggataaaatcgtaattcatgccaatgtgatgcaaaatttttgtaaacgaaatatatggaaatgcaatgggattagaaggtgtacaggcgaggatgccaacgatgatcaatgcgttgctaacttaaatgaaatgaagcgttcctcatttcttctttgctcatgggaagagcgattgttgggcagcgaactgtaccagctggtggaaattatcctggcgtctcattatttgggcatcgagtcgctgacactgaacgccattcatcatttctgtgaactaatggctcaaaggactcgctcggaatgctgcctaatgctagggatcaagacacgattggctagtgagcgccaaactttggataaccactgtccgttgatcagggactcactgtcgcgaaataatcaagcagataggaccgaaaatatgaagcagcaatttgaatccagaatcttcaggaaaccacaaccgaacggaaaggcagctgtaggaggtggaatgggagatggactttatgccaaaaagcctcgcagtcgcaaccattagtacggtttccaatcaagaacaatgaactcaaaacttttagattgtatacgcaatatacttttgtacttttattgtttttcttttatcaattctcatttagtgtggtttatatggttgtatgccttttttttttgcttagtcacccatgcgcttgtcccatttattttccaccttcattttgatgatttatttaattgcgaaataacaacgagaccttcagtttcatattgcttagaagacacacgtcagagtcgattaatccactggcaggtggcaaacgcaaactttttgcttgaccaaagccgcaataacgaaaacattctgattaaatattgcactgaaaaatatacacatagctcactacttaataatatttttaatacttttaaaatagcagattggcagtataaaatatgttttgttcgatttttctatgctctattattattatttttttttgtaaacgaaattaaaagaaattcatctctaatgcattaatgcacattttaggagaaactagcataaatacagaaaaaatattgtttcaatgggcgatttgcgatttgttctcagtgcacctgtggcataattaactcgccaagaaatgggtggccactggatcgagtgggtggtgagtgatgtggactatctctacaggcgatgtgcggcaattaagcgataaaatatgcaacaagccaattatgcgcacattaaatggccacgaccagcgcttttccaccgttttccctcacatcaatgggtcgaagttcaggtagtgccgcatttgttttaccaacaacacgttctccacaaatttcaccacaatttctacagtttttttttttttggtcggttcctccatctccttatggccacaaagtttatggtacaacttgtttggcttgctgaaaaggtcatgccgcattaattttagatggcattgccgcgagttttcaagtttttagcgacttttcacataagccgttaagcagaagatgcc

SEQ ID NO: 1664 - DNA, 1242 bp, DROSOPHILA
caaagaccgaaattaagcagacatattttctattcggaagtacaaaaaaaaaacataaaaaacatgtcatctagattcaagtcgagaattccggaacgcgttagacactcgctaacggtactggatggtccaaactcgcggatatcccgcatccgtgatgccgcgctaccaaatcgctgctcgctgaaccgctcccatttgccgatgccaataagcaatacgctgagcgctctggtgaagccagtatcgccgaaagttgtatttaagaaaacgctaacggatgaggaagcggtaatccgctcgctggtgcgacgttcaaaaccgctggcagttcgtggcaatcgtacatcctttcgccgcattcaattggctcacgctgcgccaattgacgattcttccgtgctgttgaaagccaccaatagcttttgcagcaccaattttcagctgcaaaagcccataaaggaggcaagtccgggtgccacagagaaggatcgtgccgctaacaaagtgaggtccgcaaaaagtctgctggatctggtggccggaagaaggcaaccgggtatggaacaaatacgtttcctttgcagcgatcatcgcctgatcaatgtgcccagtcccttgatgtatcgccattcggaggtgatgagccgtttggaaggggaggtgcagccaattccgttgcggtccattcgatcggcgacactgctacgtgtgattatgtggatgcacaagaagactctatgcgcaaacggaactgaaaaaatcgccgcgccgacaccaacagttgagacgtgcatttgcgaaataggcaaaggaaacggatatacgaaaagcgaggccagctgtcaaatcagtgagaacactcaagagcgattgttgggcagcgaactgtaccagctggtggaaattatcctggcgtctcattatttgggcatcgagtcgctgacactgaacgccattcatcatttctgtgaactaatggctcaaaggactcgctcggaatgctgcctaatgctagggatcaagacacgattggctagtgagcgccaaactttggataaccactgtccgttgatcagggactcactgtcgcgaaataatcaagcagataggaccgaaaatatgaagcagcaatttgaatccagaatcttcaggaaaccacaaccgaacggaaaggcagctgtaggaggtggaatgggagatggactttatgccaaaaagcctcgcagtcgcaaccattag

SEQ ID NO: 1665 - protein, 392 aa, DROSOPHILA
MSSRFKSRIPERVRHSLTVLDGPNSRISRIRDAALPNRCSLNRSHLPMPISNTLSALVKPVSPKVVFKKTLTDEEAVIRSLVRRSKPLAVRGNRTSFRRIQLAHAAPIDDSSVLLKATNSFCSTNFQLQKPIKEASPGATEKDRAANKVRSAKSLLDLVAGRRQPGMEQIRFLCSDHRLINVPSPLMYRHSEVMSRLEGEVQPIPLRSIRSATLLRVIMWMHKKTLCANGTEKIAAPTPTVETCICEIGKGNGYTKSEASCQISENTQERLLGSELYQLVEIILASHYLGIESLTLNAIHHFCELMAQRTRSECCLMLGIKTRLASERQTLDNHCPLIRDSLSRNNQADRTENMKQQFESRIFRKPQPNGKAAVGGGMGDGLYAKKPRSRNH

SEQ ID NO: 1666 - DNA, 10700 bp, DROSOPHILA
attctttgaatgctgaagtgccaaacctacctacacataaattattttaaaattgcattgtttttaattattttaatatttacagattttctatacacgtaactttaactggatatctacatgtcaactttcgatttatacaattattttacaagcattttaccgcgtaactattctacatggtggttgtataaaaatgacgtacaaaaatgttggttcttgtcttggcttgaaatattattgtctttactaattatacccatcacttgagcaggggtatcatagaaccaccgacagcatgtaacaggtataaaaagcatctgcgaacatagaagttaaataaattcttgataaagatcgtttgatgtgtatgaaagttgaaacctcgggaatcataatagctaaatagttggactctgtccgtccgtttcttatgtttgaccgtaaaaaggtcgaggcaactttaccagcactttattttcacagcgctctagtgtacgcactcgaaagctctttcaggacatgcgcagcaggaccccgctgaccttgaatacaacaataaagtgaggcgaatcacagagagcagcaacccaaagaacgttgtgccaagccgaaaatttatgcgcgggcaacaaaagacgttcgaatcgccgtgaacgtgagcagacatctcgcaaaaagcaagaactgccagaaaaaaacccaagaagcatgcagggactggcataatttgaaagaccaagcccatgatgaccaacctctaagaatcctcgacgatggccgttggggttgtgagtttcctatcgcctgcgaaatgtgtaatttgctgttcgcaaaaggttctcaaaaaacgtggtccgccgaaggccttggctcctgctcttaagaacctcttatcggagtgctttttgtgggcgggggggaatgagattcggatggctctctcgttttctggcgatgctgtaaccccgaactgcccgtcagtagaacgagaactgtggccacggaaacaaagcgggtcttataaacatcaatttcgcacagcaaataacgtatattaaaagatattaaagtttttaaattaaagttgtatcaagcaattcatctaagagtgtttaaaatgcttgaaacttccttgatttaacaccttgattaagtcaagttacacttaaatctaagccaacaaaaaatcaattaaaatttgtgtgtgagtatgtcagaatctatattattttgtctttcgctttgccctctgccctctaacacgtcacaaatggcaattcctgacgtcacaaacttcccacgcaaacagcttccgaaagctttcccagacactttggcgccgcttttccattaaccatttaatcagatattacctatggccaagaatctgatgcaatgccaacctggcatttggtcagaaatgtcacaatacgtcagattgtacttggaatgccagccacctcgataagtacttggctcagagtcgatctgtaaattaatgagcgtcgttcggtggcgaaggacacttaatacccgcggcccacctattctggaaaggtgtgttgtgctccgacttattggcacttggcacgccggtggtgtagatatcaaatggcccacactcttctcttaccagttcaatgcctttcaggatggggtaagcccttggccttgggggaaatcctgaaatttattggcatttgccaaatgcatcaccaaatttaatttaatgaaagctcttaaattgttttcgcagtctgaaaaccgcaattcgtcagccccaacagatgtcagagattaagcattaagtacgcagtttagttaggcagagaaacagaaaaaaatagcatttaaagagcgtgataagcatttgaggatactctctataggctgtgaatttgtttacttaagaccatcagctgatcggatttagaatttggatgccaaacaagactcgatcacatcaagcagactgtaggcgcagtaaatcagttgagtaacgattcggggagctcctaaagtgccacaaatgcggcagaaaagtcggaatttaatttaataagactaacgcacttagaaatacattctaaccggctgctatgacgtcgctggacgcacggccaattgtcgttaattcgggattatatacacaaattgctaataaagccgagattaagcaactcaatgatggacacttagcagtttgggaaccaaaaaaccggccgcggaacagatccaaataaatatcgacagtcggccgaatcatcaaagcctggacctcagtctcacagcctttgtttcgttggtcaataaactcgaatggcccgaggcgaatttaggttgaagtaacgctcaaaggcggagaatattcccagtaatacaagttattcaaacgaattctactgagaaattgcagaggcttcgccattgtgcttcagttggcgacaaatcgccgagctttgaatgacttaattcagtcgtttgtgtggatgcagctaagcccccggtatcttgcggatatattcaattatagatcggcaagtgggcaggaatagatttgaatatgcgcgcgaaaatcagagcgtcttatatctaatttgcatttatgagtgacaacggcaacctacgtgtgaacggaaaaagatacacggcaaaagatactttcgtgctcttagttagtacccagttaggtcccacccgaaggttgttaccacttgggtaaacagacagaaaaccttcaaccaaattgctctggagcttgtccgcgtgtatctgttagataaaaggcagcatgtacctttttccgcccgccaaaaacaaggcaggcacaagaatcagaacctttttctcggccgtcgaaagacaaccacgatcacaaacaaaacgctgcgtaagaaaacttgtttcggcggggcaattacagattccaaaattcagagattgccggttagaaacaagcgagcctctcgaacgaacatcgaacacgttcgaagtagcgcaaagtcgagcttgacgggtttttagaaacctacagtacaaaatatatagagtatgagttatatattttacactcataccatcaaaatcaaaacgaagaataaactccaccgaattttaaggagatgaaaggaagccccgcattttctttctgtgcatatggacgtgtaggggattccacacaaccgaccagtcccgaacacgactaacctctggctgagatttccggagcgaagatgcctcggagcggaatggaatcgccggtggttgccagtctgccttagccgctgtttgcgtacggttctgcttctccggcggaacttgttagtgaaagcctattagttggcgggaaagcgttcggatctcttaaggtagcagagctaatcacctcttaagtacttagtgctcggcgttaggcaaatatcatacaatttaagcagatgcagatagaaaatgcttgctcagaacgagcaacacttgtgtttgtgttgaacaaatccgcgaaaacgaatcataagaattaagaatgccagccaaattaaaaaggtgttaataaaatggaaaagcaacggcggtaaaacacaaatttaaattgaaacgcatgaggcgattttggcaactcataaaaaaggctattaaaaactgcccgctacaatttatgtgtgcaaatctgtggtatattaaatatatattatactgttcaattcctgtttaaagtatatatttagaatttgttttatgtgaaagacttgctagtacctgttgataatcgtgcgatccaagccggtttcctcctgttttcatttttgtgaatcaaacgaagttcctaattttgactctggttttgataagagttagttgattgagattcgatgttgatagcataactgaaccctgagtcccgagctaaaaacttaattaggaagtctgactagaagaatctgggttttagttgattagctttcaaaatatatttattttcaccgaagaatgtataattccaatcaaaattattctcattattcaattgtaattgcagatggccctgcgtatgatatcagtgttatattatgccagcaaattgtataatcttttcgcaattagcttcaattggttgatagcctaagctaactatggatgtattaggcacttgcctcgaaactgatactatgattaatgtggatacacaatggactttttgtttactacaccaaaattaatggatttcgttagttctttgtggcactgtgtttatgttggaactcaggtgcgcacacgactaccaatttcatttttggataaatcaatagtgtgctttgtatctcgatttatgcagaaattgggtcaagtaagtggttagctgaggatcgaaagagctaattgccctgaagcgaactaatgcctttcacacgaaaaaaaaagagagagaccccctgaaggcagtgactaagtggtgatgcaaacccagttgcattgtgaattccacacatgtaatttcgctttttttccagatcggaattcacttgaattccgcactaaataattggaataccccaagtgccgattttccaccacaatccataatctattcgaccattgcatcaggcgagatctggagtaattggatctttttggccgttttcactccgttcggcttggctggccaactgttaagcaaagaacatcagagggccaattggctaattagcaagcgagggttatacacagatccgagttatagtagatctgctgtccattggtttgttcacctgtttgttttgcttgtgccattctaccagttattccacaactgaatcacacatcgtattattttgtttgttattcccgcctctgatgctatgctaatttatgcagagcgtgggtccagcaccggcctttgctttcgcttaaggaagtaaccccttcccctcctcccacatggctcgctaaggtaaacaattggcgtgacccaatccatgtagggggcgcggctttcgggggatccacttccttggctttgtgtcgagttcataggcacacacgtgccatccaccggcggcctatcaatcaatctttgcgccctgtcaggcttttacaccgaaaggaatgacataatatacattttttgggtttaacgaactcctggcgaaatacttttaatgcgaagtccattgcttcctcataatgataatgaagaaaatatctcagcgttcataatatatttgtaaagattattcaataaactcgattctggctacttttttctccgtgcaaataatacattaaaaggttgtgcccaaaacactcactggcgcatgaggccagggtaaaagtagagcaagcttttctcttgccaatgacctctaattacctttcactaagaaaaaaaagagggaagggtattgccattgaaaacgaaggcattgccttcactcgaaattcccaagctgagattacgaaatggcaagcaaacatctgtgaaccactaagttgagacatctgataaaacgcagacaagcaattcactagttcacattttagcacataatctagaatttaatatttgagatttccccttagctcaattagcacgtcatttctcaaagtcacttctcccagaacagcccattccctccagacgcaacaaaaatgattatcaccataaaaaacgcaggttcattaactaagaggtacatcgattgaggaagaatcattttcttacagccgtgctgtgctataaatatttctataaatagtctcaaactagctaacacgttcaatttatggatctataaaccgcagcgtaaacaattctatgtaattaattcggagaaggtcgagggtgtgagatcttacttgcaaaccattttgcgagagctcaaattaagagaaagtgtatatgacaacatgtattagaataataattttccaaaatcaatcatttcagaatacatttaaagtcggaaccccagtgctgacagcatggaaacggagtctctgaaccgcaagaactcctcgcggaagagttcaatcgtgaatgggaatggagatgcctctgccaagttgaccaacggcgatggagatggaggcggagacggaggcggagaggtgactctgaaggccaagatgagcctgctcaatggatgcaccgtcatagtgggctccatcatcggatcgggcatctttgtatcgcccacgggagtgctgatgtacacgggcagtgtcaacctggccctcatcgtttgggtcatttccggccttttctcgatggtgagtgtaagctagtgaacccaactaacctgatatgcaaatgggagtagggcactcgacagcccagacacctgttgcccttgctgcaggtgtaaataaacagctcaaagcacctggcaaataccaccagctggtggggaaacaagtcgaaagcgcgtgtgggtggggctgggaaaggactttctcattcaattacgaatgctggcagagtgccacagcgacgcttaatgaaattattgaaattcctgcacccaattcaacctcctagacacacacccacacagccagaaaggcacgcacacagacatgacaagtagtgtcaaacgcacaaagcgcggctcctgctcaataaaattacgtatacgtcgcagtggcggtgacagatgacaacgattgcgcactcctgcggcactttaagcagaaaataaatcgaaaaaattaaccccatttcgcttgtatatatcgttcagagcagaaaagtgaattctgtttaattagaagaatggtattgaacatctatttatacatatttcaggtgggtgcctactgctatgcggagttgggaacgatgatcaccaagtcgggtgctgattacgcatacatcatggagactttcggacccttcatggccttcatccgactctggatcgagtgcatgatcgtgcgaccctgctcccaggccatcgtagccctcaccttcagtacctacgtcctgaagcccttcttcccggagtgcactcctccggaggactcggcccgcctgctagccgtctgttgcatccgtgagtttcgatttccagttcagtattttgttaatgggcggaaaagcctcaactgaacttccagcgcaatctcggcactcgcgtacttgacctatagattagaaacaatttaaatgcacccctcaagtggtgagcaaatgaaaatgctaaaagagtttgccacatgcatcatacacacagcttatcagtctgccagaatagtgttttgttttgattttagcttgaaatcaaatcccgattagagtgagcaagtaaaatagtttgcatgaaacacagctggggaaaaattaatgatttatttatgataaaattccgttccgtatgattaataataatatgtaataataacgttattcctatcggacgtagtaacaataacttccttatcaaactcaattttataaattatcgcttatgttcgatagaccttaataactaatcctttgcagggtgtattgaccttttaattgtccatgaaccgactacttacacaatcaaacgcaattaaaaattaatcatttccgacttaactttattccccaatgcccaatcgcacttgttgatagtcggcgcttcctcccgttactcacttaatagtaatagcaatagtaataatactgatttagtttgagacaatagaggggaccataaataacgagatgtcattggctcagttggctcatgaaagtcctcgtattattacatcacccacatgggtcgttcgcatctttggactaatatgtatcttcggcgtgactccaaagtcgtgatggaggctcgaatgtgggttaggcggcctttatacaatacatatatatttgtattttacttttcaatttccccgcttgcgttgcagttgtgctaaccctaatcaactgctgggacgtaaaatgggcgaccgctgtgcaggatatctttacatatgcgaaagtaagtccgtcggattggatttccccgggtggaattgtaactattgctcccttcgcagctgctggccctgtttatcatcattgccactggcgtttaccaactttacctcggcaacacgcaatactttacgtttgagaatacggacacgaaagtgacctccatcgcgctgtccttctactccggtctgtttgcctacaacggatggtaagcggattacgcatcacatcgaaggcagttactaattggatttgtttgcgctgccgttgacaggaattacttgaacttcatcattgaggagctgaaggatcccgtcaagaatctgccccgcgccatcgccatcagttgcaccctggtgaccattgtctatgtcatggcgaatgtatccttctacaccatcctgtcgccggatgaggtcatgggctcctcggccgtggcggtgacctatgcggagcgggccttcggcatgctggcctggaccattccaggtgggtttcatttgctgcattttccatagcagatatataaatgccatttttacgttcctccagtttttgtggccttgtctacgtttggagcagtgaacggcattctgctgacctcctcccgactcttctacgccggagccaacaacggccagatgcccgagatcctcaccatgatccagatccagagattcacacccactcccgcggttttggccatggcgcttctatcgatgttgtacctcaccgtttcggacatctttgctctgattaactacgtcggctttgccacttgggtgagttagctggtgaacatacatatctaagcctccaattcatctttctctccttagttgagtatcggtgtggctgtattgtgcctgccttggctgagatgggcccaacccaatctgccacgtcccatccgagtgcccatggtgttccccattgtctaccttattgccaccatattcgtgaccgtggtgcccatgtacgccagtccggtggagactggatacggcatccttatgatcctgtccagtatacccgtctacctggtgttcatcgcctggaagaacaagcccatttggttccagaagactatgggtgagttacagattcgcactgactacgccgagagctgcttcctccttgttgattttcacttattcacgctgtgatccccacccatttctgatattctaggcggactgacacaagttctgcagaaactgatgatggttgtgcgtccaaaagcggcgtcaaaggtttttaagtttgctatttatcctagttttactttggttctatcattcgactcacctgcctgccttttcttgcgcactttagcatctctagaagaactactaactccactaacgaaccacaagttttgcaacactaaacttactttgcacccctaactttagccaactagtagatgagcccgtcttaagctattaatctaatctgacttatatgttttatattttccagtaagcctcacacgattcctacagaaaatgctcatggtactcggaaagcagacgaaaccagctcaggtgtaaaggtaaagaacgttcttcggggaaaatagcggagataatatttcaagttagccaagagcagagaaaagcatttaaaagcacacactttgattgcaagatgcattatatagacaacgtaaacgcttttgtgtagccaaccaatgatatacatacgaaatacacaacaacttctgccagctcctgggcgactatacgatatataccatatatatatttttatatacacatgtaagtcttaagttgaagcaaggcccaggattacgaggaagttcccaacagaggtctggatccaaatttaatataaagactgtggaaaactacaaggaatcaaggaatcaaggtgtccagagctgtccgtaaattgggttcgaatttggatttggcatttttttagcagagctgtgcaagcagaacgagtcttttaggattttcaagtattctcgaaaggtggttatgcaaactgtgaagccccgataaaagctattgtttattattaactgcatttgaaaactaattttttgagaaatttagtaaccatgctctaggcttggcttgatctagaaagctagaagaacgcttgaacatactcatcggaaggatctacaaagcccatcttagtacccacaaatgaacatgaacattttagagcacgattgattactttttattgatttaaacgaatctagcttaagtgacaccgcaattaaatttcacttgtctaagttaatacatacatttaggttgctcagtttaggtttcacatgtgcatcgtagagggtgctgcctgtacaaagcccaagccaatatacaaaaccatcgcataatgcacatatccaacaagagaaacgattaaagttgttgaacgagaacaggaacattgccaacatacatattaatatactgaaaataacactatatgcaaattgttgtctaattacgaatccaatcgtatcgaatcgaattgatctagcattgatttaaactttcattagttgttgttgctttgagtgttcgtcacttagtgttattcatatgaaactattattgcctatttagcattcaactaattaactgttacacattaaatatggagccgcagctggggaatcagtttaactactatgaaacatattgttgacaataatattgtatttatatataaatgtata

SEQ ID NO: 1667 - DNA, 1997 bp, DROSOPHILA
gccacggaaacaaagcgggtcttataaacatcaatttcgcacagcaaataacgtatattaaaagatattaaagtttttaaattaaagttgtatcaagcaattcatctaagagtgtttaaaatgcttgaaacttccttgatttaacaccttgattaagtcaagttacacttaaatctaagccaacaaaaaatcaattaaaatttgtgtaatacatttaaagtcggaaccccagtgctgacagcatggaaacggagtctctgaaccgcaagaactcctcgcggaagagttcaatcgtgaatgggaatggagatgcctctgccaagttgaccaacggcgatggagatggaggcggagacggaggcggagaggtgactctgaaggccaagatgagcctgctcaatggatgcaccgtcatagtgggctccatcatcggatcgggcatctttgtatcgcccacgggagtgctgatgtacacgggcagtgtcaacctggccctcatcgtttgggtcatttccggccttttctcgatggtgggtgcctactgctatgcggagttgggaacgatgatcaccaagtcgggtgctgattacgcatacatcatggagactttcggacccttcatggccttcatccgactctggatcgagtgcatgatcgtgcgaccctgctcccaggccatcgtagccctcaccttcagtacctacgtcctgaagcccttcttcccggagtgcactcctccggaggactcggcccgcctgctagccgtctgttgcatccttgtgctaaccctaatcaactgctgggacgtaaaatgggcgaccgctgtgcaggatatctttacatatgcgaaactgctggccctgtttatcatcattgccactggcgtttaccaactttacctcggcaacacgcaatactttacgtttgagaatacggacacgaaagtgacctccatcgcgctgtccttctactccggtctgtttgcctacaacggatggaattacttgaacttcatcattgaggagctgaaggatcccgtcaagaatctgccccgcgccatcgccatcagttgcaccctggtgaccattgtctatgtcatggcgaatgtatccttctacaccatcctgtcgccggatgaggtcatgggctcctcggccgtggcggtgacctatgcggagcgggccttcggcatgctggcctggaccattccagtttttgtggccttgtctacgtttggagcagtgaacggcattctgctgacctcctcccgactcttctacgccggagccaacaacggccagatgcccgagatcctcaccatgatccagatccagagattcacacccactcccgcggttttggccatggcgcttctatcgatgttgtacctcaccgtttcggacatctttgctctgattaactacgtcggctttgccacttggttgagtatcggtgtggctgtattgtgcctgccttggctgagatgggcccaacccaatctgccacgtcccatccgagtgcccatggtgttccccattgtctaccttattgccaccatattcgtgaccgtggtgcccatgtacgccagtccggtggagactggatacggcatccttatgatcctgtccagtatacccgtctacctggtgttcatcgcctggaagaacaagcccatttggttccagaagactatgggcggactgacacaagttctgcagaaactgatgatggttgtgcgtccaaaagcggcgtcaaagtaagcctcacacgattcctacagaaaatgctcatggtactcggaaagcagacgaaaccagctcaggtgtaaaggtaaagaacgttcttcggggaaaatagcggagataatatttcaagttagccaagagcagagaaaagcatttaaaagcacacactttgattgcaagatgcattatatagacaacgtaaacgcttttgtgtagccaaccaatgatatacatacgaaatacacaacaact

SEQ ID NO: 1668 - protein, 505 aa, DROSOPHILA
METESLNRKNSSRKSSIVNGNGDASAKLTNGDGDGGGDGGGEVTLKAKMSLLNGCTVIVGSIIGSGIFVSPTGVLMYTGSVNLALIVWVISGLFSMVGAYCYAELGTMITKSGADYAYIMETFGPFMAFIRLWIECMIVRPCSQAIVALTFSTYVLKPFFPECTPPEDSARLLAVCCILVLTLINCWDVKWATAVQDIFTYAKLLALFIIIATGVYQLYLGNTQYFTFENTDTKVTSIALSFYSGLFAYNGWNYLNFIIEELKDPVKNLPRAIAISCTLVTIVYVMANVSFYTILSPDEVMGSSAVAVTYAERAFGMLAWTIPVFVALSTFGAVNGILLTSSRLFYAGANNGQMPEILTMIQIQRFTPTPAVLAMALLSMLYLTVSDIFALINYVGFATWLSIGVAVLCLPWLRWAQPNLPRPIRVPMVFPIVYLIATIFVTVVPMYASPVETGYGILMILSSIPVYLVFIAWKNKPIWFQKTMGGLTQVLQKLMMVVRPKAASK

SEQ ID NO: 1669 - DNA, 3724 bp, DROSOPHILA
cgtgtgcacatggacaagagctttgtctgcgagatctgcagcaggagctttgcctttggaaatcaactggctatccacaaacgcacccatgacgagaagcacgtcgccaagccatttgtctgcgagttctgcggcaagtgttttaagcaaaaaatccaaatgacaacgcacgtaactgcggttcacaccaagatccgagccttcaagtgcgacatgtgccccaaggacttcctgaccaagcgcgacctcaaggaccacgtaaaggcgcacctgaacatccgcgacaaggtctgcgaggtctgtcagaaggccttcaccaatgccaacgccttagtcaagcatcgccacatccacaaggagaagaccctgcaatgttcgctctgcacgacgcgcttctcggagcgagttagtcttggcgtccacatgcgacgcacccacaagatcctcaagagctctctgtcgtcaagcgacgcactctttacaaagacattccctcagccttgagacatttccaaaccatgacaagtatttacatttgttaataaccagaaaatatggctatagtgccaaaaaacatgaattttttaatgttcttaatgtattattactcctaaatattttttagtattgaaacaagagattttacaatatatttgtccaagcttgcaaaaatgaaaacaaaaatgtttaaaatgatttctattattctattctattattcgacatatttgaattgttcgatttttagataatccatctgaattttcttaataaagactacactgagcactatgcatttgtatgcctttgtgatatagtaacttgaaaacacaaaaaagcactgaattttgaaattgaaggtgtaataatacttatttttatatctaattttgggttctattggcgtagcaattgagcatatcaggagtacattttgcctgctagccagcagaggttcctttgtctgccgttagagaaatttgtcctactatgtcaaatgttagaatttatagcatttttttatatttatttcattaacttcgggtaatcaaaattttcgaagttatcagctcacctattcttgcgctgtgcagcactggccaacagctgttcgtgttttggttttccgcgacgtgctcggtgttacgtgctctgcaccaagattacagacctggagaggagaaatgagcggactccttccgaagttgtggcgccaatgtgaagcggggctagtgcgccgtatcagccaggcactgattggacccggcgccagtcagagccggtggacagggacccgtctcctggccaccagtgcggataaaaatccggccccggggctgcgggagctgccccactgcaatgtgggcaccattggtcacgttgaccatggtaaaacgaccctgaccgccgccattaccagaatccagtcacagaagggtctggcggagtacctgtcctacgaccagattgatcgggcgcccgaggagaaggcgcgtggcataactataaatgcttgccatattgggtattccactacagaacgcacctacgctcacacggattgcccgggtcatgcggactacataaaggtagctcagccaaaagaaccaaccaatgttccaccaatttaacgaaactttctatctgatctacagaacatgatctcgggcgcctcccaaatggatggcgccattctagtggtggctgccaccgatggtcaaatgccccagactcgcgagcaccttcttctggcaaaacaagtgggcatccagcgcatcatagtgtttataaacaaggccgatttggtggaccaggaggtgctggaactggtcgagatcgagatgcgtgagatgctaagtgatttcggctttgatggcgtgaatagcccggtaatttgtggctcagcgctgctggcccttcgcgaagataaatcggagttcggggttccgtcaattgaaaagctacttgagcaatgcgactcttacataccaacgccgcagcgcgatatctcgtccccatttatcctgccaatagacaatgcttttacggtacccggaaggggaaccgtggtcgtgggaaccatcaaaaggggcaccattccccggaacgcggatgcagacctactgggcttcaatcagaacctgaagacaagcatcagcgacatccagatattccggaagagcgtgcctcaggcacaggctggcgagaacgtcggcgcactgctgcgaggtattaagatatccgccgtggagcggggaatgctactgtgcgcaaccggctccgaggatatatccaaccactttgaaggctccatgtatctgctatcgcgggccgagggtggtcgtgtcaagcccatgctctccaagtatatacagcagctcttcagccagacgtggaatgttccagctagaattgacataggtaagttaaaaacttcaatgctgtccacaaagcattgagcaaatcccattgcagttccaagtgaggctatgcttatgccgggtgagcatggccaggtgcgcgtcacgctgctgcggaaaatggtcatgactccgggccaagccttcacaattcgcgagaacggagcgacggtggctaccggtatggtgacgcagcgcctgccgtcccttgacctgcccaagaacaagttatcaaaagtcttcgtggattgttaacgactcgagattgtatttgtaaaaattcataaattgctgttcattacacacgagtactttctttctaatatataatatttgtatgtgtttaggtaatctgcttagaatgtttcaaacaaatgccaacgtagtttaggcttgcatagtctaacgacatatctaagaaacccaactaacgagttacaagctacgcagaaaatgagaatacataaatagatggaatgcaacagcaatgcatcatcggtgagctctatgagtcttactctatcatctgtaggctttacacgttctttaaggcaacaaatcagcctggttaagtacaatcattgtatataaatatttagttatgatttaaggtacaaggtttaggcaagaaatgatttcttatggtcagagtctaactccaagcatttattgcgtttcacatattaaggttggttcttaaccttccattacttttgctacaaatagttcgtacaacaaaaaaaaacacttggcatctcgggacgggtacgccattggatactcggaatggatactattggagtggataaacaacgggtatttaagctaaacaggaactacacaaacatttcggcaaaacggctctactcaatgtttcattatctaatcgattttctaaatataagaacaaattaaatttctagaatcgttatactcgtataatacacaaaaactaagcagtgtaatgtcatccaaaatggcaaagttctcgaccggcaagacgcaggcacgcgacgtttaaatctttgtaaggaactcgtccagattaagatgcgacggtagttcaatatcctccagcttgatgtcactatacctgaagacaaccttaaatggctgaatgaacttctggtctatggtgaattcgtcactattgctcttttgctgtaagacaaaatcggtaaatcgaaagtgtatatttcgagattttacacgtaccatttgtcgggcgttcagtttctcggttagtttctccagaaaaacgttcgttatttcgctctcataatcgtccagtttgtaggacttca

SEQ ID NO: 1670 - DNA, 1604 bp, DROSOPHILA
ttagaatttatagcatttttttatatttatttcattaacttcgggtaatcaaaattttcgaagttatcagctcacctattcttgcgctgtgcagcactggccaacagctgttcgtgttttggttttccgcgacgtgctcggtgttacgtgctctgcaccaagattacagacctggagaggagaaatgagcggactccttccgaagttgtggcgccaatgtgaagcggggctagtgcgccgtatcagccaggcactgattggacccggcgccagtcagagccggtggacagggacccgtctcctggccaccagtgcggataaaaatccggccccggggctgcgggagctgccccactgcaatgtgggcaccattggtcacgttgaccatggtaaaacgaccctgaccgccgccattaccagaatccagtcacagaagggtctggcggagtacctgtcctacgaccagattgatcgggcgcccgaggagaaggcgcgtggcataactataaatgcttgccatattgggtattccactacagaacgcacctacgctcacacggattgcccgggtcatgcggactacataaagaacatgatctcgggcgcctcccaaatggatggcgccattctagtggtggctgccaccgatggtcaaatgccccagactcgcgagcaccttcttctggcaaaacaagtgggcatccagcgcatcatagtgtttataaacaaggccgatttggtggaccaggaggtgctggaactggtcgagatcgagatgcgtgagatgctaagtgatttcggctttgatggcgtgaatagcccggtaatttgtggctcagcgctgctggcccttcgcgaagataaatcggagttcggggttccgtcaattgaaaagctacttgagcaatgcgactcttacataccaacgccgcagcgcgatatctcgtccccatttatcctgccaatagacaatgcttttacggtacccggaaggggaaccgtggtcgtgggaaccatcaaaaggggcaccattccccggaacgcggatgcagacctactgggcttcaatcagaacctgaagacaagcatcagcgacatccagatattccggaagagcgtgcctcaggcacaggctggcgagaacgtcggcgcactgctgcgaggtattaagatatccgccgtggagcggggaatgctactgtgcgcaaccggctccgaggatatatccaaccactttgaaggctccatgtatctgctatcgcgggccgagggtggtcgtgtcaagcccatgctctccaagtatatacagcagctcttcagccagacgtggaatgttccagctagaattgacatagttccaagtgaggctatgcttatgccgggtgagcatggccaggtgcgcgtcacgctgctgcggaaaatggtcatgactccgggccaagccttcacaattcgcgagaacggagcgacggtggctaccggtatggtgacgcagcgcctgccgtcccttgacctgcccaagaacaagttatcaaaagtcttcgtggattgttaacgactcgagattgtatttgtaaaaattcataaattgctgttcattacac

SEQ ID NO: 1671 - protein, 456 aa, DROSOPHILA
MSGLLPKLWRQCEAGLVRRISQALIGPGASQSRWTGTRLLATSADKNPAPGLRELPHCNVGTIGHVDHGKTTLTAAITRIQSQKGLAEYLSYDQIDRAPEEKARGITINACHIGYSTTERTYAHTDCPGHADYIKNMISGASQMDGAILVVAATDGQMPQTREHLLLAKQVGIQRIIVFINKADLVDQEVLELVEIEMREMLSDFGFDGVNSPVICGSALLALREDKSEFGVPSIEKLLEQCDSYIPTPQRDISSPFILPIDNAFTVPGRGTVVVGTIKRGTIPRNADADLLGFNQNLKTSISDIQIFRKSVPQAQAGENVGALLRGIKISAVERGMLLCATGSEDISNHFEGSMYLLSRAEGGRVKPMLSKYIQQLFSQTWNVPARIDIVPSEAMLMPGEHGQVRVTLLRKMVMTPGQAFTIRENGATVATGMVTQRLPSLDLPKNKLSKVFVDC

SEQ ID NO: 1672 - DNA, 3497 bp, DROSOPHILA
cggctcgttcgcatacagcaatttgggaaatgtgtatttaaaagtcacacacaaatacatttattttcacaaatacaaaaatattttctcgtaaatttatacgtatgtatacagcatctttgttcggcaaacaagcgcatcgatgagagccccttttattggaacggagtactttatttactatttttatagttataagtcgcagtgtcttatatgcacttacatacataccttgtttttaaaacttaaatttacgaatgagtaaagtgcgaaccatctttaagttaacatcgcccaaatttgattatattcaaagtaatatctcgagaaaatactgtaacatgaatatacatatatccattgatgttcgatatttctttatagatagtaatattctcttttagagatgttatattaagtacacccaaaatcaaaccactttcagaggaaactaatgacgataacacgaacttgaagatacaatagaagaaagaacacgctccctacctgttacttcttacaattggatataacctttcacagtacgactaaaaaatataaatatattacaaacaattgtatacacgtttgaatttgaaccctaatattcattcgttgaaaactagaatggcggagggaagaactgctgacccataaagaatatacttcgaatattcgagcagaatcgcaagccaagttgatctagcaatgtacgtccattttaatttcgtgatctttaaaattttaaaagctagaaagctaattttagatacgtatgttcttaaaagtccgatcttatgccaatttggaactcgtacacgtttaaaaactgttattcttttagtcaatttagttaattgcttggacacaacaaagcgcaaaaatctgttagacccaaaccttcaaaaaaggtactagagtatcatttgtaacggacgcaaataccaaggttgttcaaaaatttacaacattttgttgtgtaattgtttatttaccatagttttcaaaaacactgtccttcttctatcaacacaaaagctgactttgatgtattaatataactattatccggattgcaaacactattgcgaataatcttatttacattcgcctttaaaattcgaaaatttacttctccataatctagattgctgtatagaaaaattggtagtcggttacttataagccatacattttgatctttttctttgtctacttttaaatcatttggaaattgaataagatttgagttttccatattatgaaattttcccaaatgtgctcgagtgtatggtttcgatgtatcccagcatccaatatcatcttgatgaacttgtgtaaaaaacataatgccattccttgtaactcctgatgtagatgattgagaattatatccgcggtctccaattggtatgaagtacttggcgtactcttgagtattcgtttgccacacagattcgtttaacaagatattcataggcaccatgaactcctaaatgagaaagtattataatcacaattattattattattatatcagttactcgtagagtataagggattgctagtttggttaataaaaataaaacagaaataagccttttcggaccctacaagctgcagataattagcttacttaagatttagatttatttaagtaccttaagtaagactgatcaagtagtaagctgtaggaggggtttttaaaagtaagtcggcgagccattatttagacaataaagacaatgttaagaaaggcattttttaaaatcaatatcaaatcaattcccagccattttcttgtctttatttatatactccttatactcaccttgaaacttgccattggatgaaaataaagaacgcgttccattattttcttattgtaatatatactcattccaaaaacaccatccagccattgaaaatttaatccgtatacattaaaatccgaagcaaagggatccggataaaagttatagttggtcacgcgccagctgcggttttttgataggctgtaaacaagtagaccaaatctccatacatccgatacgatagcatgcgcatcatcgcaatcttctccaatatccacaacaatattggagtgcaacgaatcttgcttcacatgagaagcttccaaattgtatcgaacaatcagttcgtcacttttaagatcatacacaacaatttttggtgggcagatctgatttaagtttattgtagcattgacaattccagaatcaattagccaaattcgatcacacctatctacagctgttcgataaactgacatcagttttgagcagtcaggattgtttggatttccatgagcctcccagtttggatacggctttattgccgggcttgactcttttggaggaaagggcagtgtacctaagctagcaggcacaccattcttccaacgaggagttgtcacaaacaggcggttattatggacatcaatgcctaaaggtaaattattttttggtacaaagtctctgtaaatattaatatattataataattagacagtaaattcagcgcagtagaataacacataaagccagattatgataatcctttatgtaacagtctgtaacagccagaaggaagcgtttctgaccatgttctatatggtcatatacaatattctttataaggatcaatagccaagtcgaactggccatgtacgtcgatctttatttgcatttgcattttccctagctgtgtaacgggattctgatagtcggggatctcgactatagcattagagataatgctaggatttattcatcaatattaaagatatggatgagacgcactgaatgattcgaatgaaaagaaagtatttataagaactagtctcctatagttttcgagataagatattaatttgttaattttttttcgcattcgcagttccacgagctgattaacggatatctgatagtcggggatctcgactatttgtgacataagagcgtcaaatagtttatttttcgaattttcttttatacctctcacaatacaagcattttaaatttattaaaggcgtattttttgatttttttactagtactacaatttgttattaatattaatacatttttcaaattatctcttgatttgtaagaaactgttataaccaaattgttttgttacccatttaaaatagattgttggcgttgcacaaaagttgagtataggaaatccaaatatttccattcataaacgatctccagttgactttcactctgtaagttttgcgaaaacgactgcgaagtatattcatagccatcaagtgtttggaaaactggttgaacacttaagtttccatttaaagtcttcgataaaaaaactaactgtgtaattatattaaagatagtcatagactgcatcctagctgaatattaaataaataattctcaaaaatgtactctatggaatcaatcgaccagatctaccaacgtttaaagactgatttaatgtatgtatgt

SEQ ID NO: 1673 - DNA, 1158 bp, DROSOPHILA
gactttgtaccaaaaaataatttacctttaggcattgatgtccataataaccgcctgtttgtgacaactcctcgttggaagaatggtgtgcctgctagcttaggtacactgccctttcctccaaaagagtcaagcccggcaataaagccgtatccaaactgggaggctcatggaaatccaaacaatcctgactgctcaaaactgatgtcagtttatcgaacagctgtagataggtgtgatcgaatttggctaattgattctggaattgtcaatgctacaataaacttaaatcagatctgcccaccaaaaattgttgtgtatgatcttaaaagtgacgaactgattgttcgatacaatttggaagcttctcatgtgaagcaagattcgttgcactccaatattgttgtggatattggagaagattgcgatgatgcgcatgctatcgtatcggatgtatggagatttggtctacttgtttacagcctatcaaaaaaccgcagctggcgcgtgaccaactataacttttatccggatccctttgcttcggattttaatgtatacggattaaattttcaatggctggatggtgtttttggaatgagtatatattacaataagaaaataatggaacgcgttctttattttcatccaatggcaagtttcaaggagttcatggtgcctatgaatatcttgttaaacgaatctgtgtggcaaacgaatactcaagagtacgccaagtacttcataccaattggagaccgcggatataattctcaatcatctacatcaggagttacaaggaatggcattatgttttttacacaagttcatcaagatgatattggatgctgggatacatcgaaaccatacactcgagcacatttgggaaaatttcataatatggaaaactcaaatcttattcaatttccaaatgatttaaaagtagacaaagaaaaagatcaaaatgtatggcttataagtaaccgactaccaatttttctatacagcaatctagattatggagaagtaaattttcgaattttaaaggcgaatgtaaataagattattcgcaatagtgtttgcaatccggataatagttatattaatacatcaaagtcagcttttgtgttgatagaagaaggacagtgtttttgaaaa

SEQ ID NO: 1674 - protein, 316 aa, DROSOPHILA
MSVYRTAVDRCDRIWLIDSGIVNATINLNQICPPKIVVYDLKSDELIVRYNLEASHVKQDSLHSNIVVDIGEDCDDAHAIVSDVWRFGLLVYSLSKNRSWRVTNYNFYPDPFASDFNVYGLNFQWLDGVFGMSIYYNKKIMERVLYFHPMASFKEFMVPMNILLNESVWQTNTQEYAKYFIPIGDRGYNSQSSTSGVTRNGIMFFTQVHQDDIGCWDTSKPYTRAHLGKFHNMENSNLIQFPNDLKVDKEKDQNVWLISNRLPIFLYSNLDYGEVNFRILKANVNKIIRNSVCNPDNSYINTSKSAFVLIEEGQCF

SEQ ID NO: 1675 - DNA, 5217 bp, DROSOPHILA
tatcaaataaaaaaattttgcgtactaactggcgacccacaatggtaaatatagtacaggtgcttacctgtacctgtggtcttacttttgaccttcttccttacacaatttataataaaggcagtctacatgtttagcttgagcttaatacaaaagagataatttattgggcctaggtggcgtatgagtaataaacgtatactgaatattttctaataacttgtttgcaaaatcagaaaactgttttttcttatatatttatataatatataatacatttctgtgccacagaaattccattgcaccccacagtttgtagggtgtcaatatcagccaaattgctgacgacgacaaaaggcggctctctcataagcggaagcaaaaagagagagcgtcgccgccaggcccttgtagttccgcgtttatggcacgataagaacgagatatttcttaaaaatgttgtaaattagttagttaatagcgtaattaatatcaaaacaaatttaacacagtgataataggcgaccaatttaatttgtcaaagaaatgcaaaaccattaaccattaacattaattaaaccattaacatcttaagaaaataatttttttccttgaagagaaaagcctgaaatatattgactatatttgagatgacaaattaaaatgtttatcaaatgcgtgatcacgatattgcttacgcgacgcataagggtttccgcataaacacgcgtttgactcattctcattcatagccactctctcgccccctctctcacgcgcaccctatcaatatgccatttgtggacccctcagcgtcgcacatatacacgccatatctccaaccatgccgccccaaaaccgattttcagtttttgaccttcaaggttccttcacggcgagcgagagagagagagagtgagagtgtgagcgcggctcgcagtcgcggtcggcgccggcagcgcagcagcagcgacagcgaaaagtgagcaccagtcggcgagtgaatttaatttcgtaaaaaacgttccgagcgtttggacgcgtgcagcggacgaaaataaaacacggcgagagcgagaatcgtgtgtgtggacactcaaagactcaaaattgaaaccaactcgaaaaggttgcactgcaaatgcccaagtagaaaagccaacgcgagtgtgcacatcgaatacgaaaattgtaaacgttttttttttgccgtgtgagtgcaagcgcataagatcgaagaaaaacagccagagcaagaaagaaccgaaaaaaggcagagagaatcaaaaaagaaaaaaggaaaaaaaaaacaagcaggaaaacaccaacataataatggatcgggagctgaacggggcgatgaagagcgtgtccataaatagcgcccaactgaatggtcacaataacggtggcgggctagatgaaacggaccgcgtgggcgtggcacagggggcggcactgagtgcaacagagaaaattacaacaacgacggcggcagctacaaaatcagcgacagcgaccacaaatgcaaccacagcaacagccacaaccacaaatcttacaactcacagcccgcagcaaattgcactcttatccgctgcagagaaaagtaagatggtgcacgagttatgtcagcagctgcttctaacggacgaacaggtgcaggagctgtgctaccgcatcctgcacgagctgcgccgcggcctggccaaggatacacatcccaaggcgaatgtcaagtgcttcgtaacgtatgtgcaggatctgcccaatggcaatgagcgtggcaagttcttggccttggatctgggtggcaccaacttccgggtgctgctcatccatctgcaggagaacaacgattttcaaatggagtcccgcatctatgccataccgcagcacattatgattggatcgggtacacagctattcgatcacatcgccgaatgtctgtccaactttatggccgagcacaatgtgtacaaggagcgtttgccactcggtttcaccttctcgttcccgctgcgccaattgggtctgaccaagggcctgctggagacctggaccaagggcttcaactgcgctggcgtcgtcaacgaggatgttgtccagttgctaaaggatgccatcgcacggcgcggcgatgtccagatcgatgtgtgtgccatactcaatgacaccactggcacgctgatgagctgcgcctggaagaatcacaactgcaagatcggtctgattgtcggcaccggtgcaaatgcctgctatatggagcgtgtggaggaggcggagctcttcgccgccgaggatccgcgcaagaagcacgtcctgatcaacacggaatggggcgcattcggcgacaatggcgcactggactttgtgcgcaccgaattcgatcgggacatcgatgtgcacagcatcaatccgggcaagcagacgttcgagaagatgatatcgggcatgtatatgggcgagctggtgcgtctggtgctggtgaagatgacccaggcgggtatactcttcaatggacaggattccgaagtgctaaacacccgcggactgttcttcaccaagtatgtgagcgaaattgaagctgacgagccaggcaacttcaccaattgccgcctggtgctggaggagctcggtctgaccaatgccaccgacggggactgcgccaatgtgcggtacatctgcgagtgcgtctcgaaacgggctgcccacctggtgtccgccggcattgccacgctgatcaacaaaatggacgagccaacggtgacggtgggcgtcgatggcagtgtgtaccgcttccatcccaagttccataacctgatggtcgagaagatctcgcagctgatcaagccgggcatcaccttcgatctgatgctgtccgaggacggttccggtcgtggagctgccctggtggcggccgtcgcctgtcgcgaagacatactcaatggcaagaagtaggatggatagggagctggagctggatcaggaaccaggaggaggagccgctggagcagctggagcagtcctaagagatacagcaacacacccacacaaccacaaaaacagcagagcaaatgagaaatacctagtaaacggccacggtggcgtatgcgtaataattacagtagagccacgctaactcacaaaagccctatagccaaacgatatgaaaaaatgaagctgccacgacgaaaagtaatcgaaaagcccacgaaaaacttatatgtgcatacgtagggcatttgtgagttggcgcgacttggctttagtattttaattaggcaaaaaccaggtttttcactacaaacacaagcgtaacagaaacccccccactaagagacagaagatctgtggcattctatctctttctctcctagtaaaagaaaacaaagaagaagaaaaaacactatgcttaatgattatggatcgattttcgatttttgttgaaaatttgttatgctattatatatatatatattttacaagaaaacataatatacacacactaaaaacataatgtatatgtttgcgtatatatagtacaatttgtgaagcgaatttcttttcgatttcgattgaaacaacaaattttttttggtaattccctgcccaaaagacccctgaaacccccctaaaaaaacggagatacttaagagcaagtgagaaaagaaactgttatactactgtgctacaagcattctagcatatcctgcaggacaacggaaagagaaactgtaaaaccgcacattgttaaagcaaaaacgaaaacgaaaaaagcaacaaaaaacaagccgctagagaagagacagaaacagagggatagaaaggaagagagcgagagagagcgagcgagagaaagagagagaggattactaggtaatgctacggtgtcctttctgtaattgtaaatgtttatatagaacctattacgaagcgttatatgataatactgcatacatatatataaatataaatatgatatatttagccactatattactgatttttttttttgtaatgtattgcttgtctttgtttagtgaatttgtttgttgttaacacttaagcaggtaaactctaaacaaaaataaactgtttttttttttccttttgatatagaaacgcactttgtgagctattatttatgtaattgtacatttgacctagtttagtgtttagttcttatcttagtttctaaatgtcgtcgaagaagccagcaatacaaccaatataatacccccaccccaaaaaaaaaacccaacccacgcagcccttaattatatttaattattgtttacgaacaacaaacgaagagaatgcgagaagctaaaaggcaaataagcaaaatggaaagcaaataaaatttgttcttaattcatacacaagtagttgttacttatttctcccaaattaattggttttccaaagtgattaggttttttccagattgatttcagtatgatttgatctgttttccatatgattcggtatcatttgatcatttttgcagctgctggccggcatgctcagtcaacacaaaaacttaaacaattcgcaattgaggcaaaacgaagatacatttttttggtctaatactaagcggagaatgagcctaacctaagagatatgttataataaatggcgggagcagcgaaccagtgtttctatttttcaagaaagaaaaaaacgaaaaacaagaagaatgtaatataaacttagcccatgttaaaatgaaaattgaaaaccaattaaaaactctcgttatcaaaaggcgattcaaacataaattgctaagaacaaacaaacacaaatcgaaggcttgaaagtgcagatgagatgaatttagtaaatgatataaacaaatggaatgtttgtcaacagtgaagcaaaataaagacgattgaaccaaacaacagagaagcaaatcaaaacgtgatacgtgttcttttgggcctaacataacggtgtacaatatatttatttaaaactttattctcgttttattgctatagttgctgcagactaaaattatatatcatcagaggcaataacaatcagtcagcacttagctagctcaattttgttatttatattacttgaatgccctacacaaaaggcgggcacttcgatttcgccagatgttttgttttattcggtgcataaaatatttcccatttatttgctcagctgtgtgtgtttttgttataatatata

SEQ ID NO: 1676 - DNA, 2641 bp, DROSOPHILA
gtgaatttaatttcgtaaaaaacgttccgagcgtttggacgcgtgcagcggacgaaaataaaacacggcgagagcgagaatcgtgtgtgtggacactcaaagactcaaaattgaaaccaactcgaaaaggttgcactgcaaatgcccaagtagaaaagccaacgcgagtgtgcacatcgaatacgaaaattgtaaacgttttttttttgccgtgtgagtgcaagcgcataagatcgaagaaaaacagccagagcaagaaagaaccgaaaaaaggcagagagaatcaaaaaagaaaaaaggaaaaaaaaaacaagcaggaaaacaccaacataataatggatcgggagctgaacggggcgatgaagagcgtgtccataaatagcgcccaactgaatggtcacaataacggtggcgggctagatgaaacggaccgcgtgggcgtggcacagggggcggcactgagtgcaacagagaaaattacaacaacgacggcggcagctacaaaatcagcgacagcgaccacaaatgcaaccacagcaacagccacaaccacaaatcttacaactcacagcccgcagcaaattgcactcttatccgctgcagagaaaagtaagatggtgcacgagttatgtcagcagctgcttctaacggacgaacaggtgcaggagctgtgctaccgcatcctgcacgagctgcgccgcggcctggccaaggatacacatcccaaggcgaatgtcaagtgcttcgtaacgtatgtgcaggatctgcccaatggcaatgagcgtggcaagttcttggccttggatctgggtggcaccaacttccgggtgctgctcatccatctgcaggagaacaacgattttcaaatggagtcccgcatctatgccataccgcagcacattatgattggatcgggtacacagctattcgatcacatcgccgaatgtctgtccaactttatggccgagcacaatgtgtacaaggagcgtttgccactcggtttcaccttctcgttcccgctgcgccaattgggtctgaccaagggcctgctggagacctggaccaagggcttcaactgcgctggcgtcgtcaacgaggatgttgtccagttgctaaaggatgccatcgcacggcgcggcgatgtccagatcgatgtgtgtgccatactcaatgacaccactggcacgctgatgagctgcgcctggaagaatcacaactgcaagatcggtctgattgtcggcaccggtgcaaatgcctgctatatggagcgtgtggaggaggcggagctcttcgccgccgaggatccgcgcaagaagcacgtcctgatcaacacggaatggggcgcattcggcgacaatggcgcactggactttgtgcgcaccgaattcgatcgggacatcgatgtgcacagcatcaatccgggcaagcagacgttcgagaagatgatatcgggcatgtatatgggcgagctggtgcgtctggtgctggtgaagatgacccaggcgggtatactcttcaatggacaggattccgaagtgctaaacacccgcggactgttcttcaccaagtatgtgagcgaaattgaagctgacgagccaggcaacttcaccaattgccgcctggtgctggaggagctcggtctgaccaatgccaccgacggggactgcgccaatgtgcggtacatctgcgagtgcgtctcgaaacgggctgcccacctggtgtccgccggcattgccacgctgatcaacaaaatggacgagccaacggtgacggtgggcgtcgatggcagtgtgtaccgcttccatcccaagttccataacctgatggtcgagaagatctcgcagctgatcaagccgggcatcaccttcgatctgatgctgtccgaggacggttccggtcgtggagctgccctggtggcggccgtcgcctgtcgcgaagacatactcaatggcaagaagtaggatggatagggagctggagctggatcaggaaccaggaggaggagccgctggagcagctggagcagtcctaagagatacagcaacacacccacacaaccacaaaaacagcagagcaaatgagaaatacctagtaaacggccacggtggcgtatgcgtaataattacagtagagccacgctaactcacaaaagccctatagccaaacgatatgaaaaaatgaagctgccacgacgaaaagtaatcgaaaagcccacgaaaaacttatatgtgcatacgtagggcatttgtgagttggcgcgacttggctttagtattttaattaggcaaaaaccaggtttttcactacaaacacaagctcctttctgtaattgtaaatgtttatatagaacctattacgaagcgttatatgataatactgcatacatatatataaatataaatatgatatatttagccactatattactgatttttttttttgtaatgtattgcttgtctttgtttagtgaatttgtttgttgttaacacttaagcaggtaaactctaaacaaaaataaactgtttttttttttccttttgatatagaaacgcactttgtgagctattatttatgtaattgtacatttgacctagtttagtgtttagttcttatcttagtttctaaatgtcgtcgaagaagc

SEQ ID NO: 1677 - protein, 541 aa, DROSOPHILA
MDRELNGAMKSVSINSAQLNGHNNGGGLDETDRVGVAQGAALSATEKITTTTAAATKSATATTNATTATATTTNLTTHSPQQIALLSAAEKSKMVHELCQQLLLTDEQVQELCYRILHELRRGLAKDTHPKANVKCFVTYVQDLPNGNERGKFLALDLGGTNFRVLLIHLQENNDFQMESRIYAIPQHIMIGSGTQLFDHIAECLSNFMAEHNVYKERLPLGFTFSFPLRQLGLTKGLLETWTKGFNCAGVVNEDVVQLLKDAIARRGDVQIDVCAILNDTTGTLMSCAWKNHNCKIGLIVGTGANACYMERVEEAELFAAEDPRKKHVLINTEWGAFGDNGALDFVRTEFDRDIDVHSINPGKQTFEKMISGMYMGELVRLVLVKMTQAGILFNGQDSEVLNTRGLFFTKYVSEIEADEPGNFTNCRLVLEELGLTNATDGDCANVRYICECVSKRAAHLVSAGIATLINKMDEPTVTVGVDGSVYRFHPKFHNLMVEKISQLIKPGITFDLMLSEDGSGRGAALVAAVACREDILNGKK

SEQ ID NO: 1678 - DNA, 8343 bp, DROSOPHILA
gagactgcaggtaagaaatcggtgagacgttgcccatcagttcgtcaatcttccagtcggtgccataggaagccattccgatgatcggggcatcaaaataggcagccaggccactgagcacgtccattcgccagagatccattatcacaagatcgaaatggggcttctgtgggcctagaatatcgcgccttacgccctcgttattcagcactgtcttcgtaagattaaggacatattcgttgatgaaatcactactttgccaggtgctcctgggagtagatgcaatcctaaggacctctggaaaatatcgtaagtatttctatttgacaaatcagatctttatttatctcatctcaccattaaagttttcgaaaacctcgggaactggaatatcgtgtatattcctaaacggctccctttgtggatacggacttacactggttatttcgtggcccagggaggccaaactcttaaggtagggtaaggcgaaaaagtaatgcgaagaacttggcaaagggaacactgccaggatgcgagcaccttccgagtaaccaggaagaagacatacgagcagaaagattggcggcattgttgcacttggcaagttctgccttctagacgaaatggaagactgaatgctgcagatcgccaatgaaaactctatttccatttcagataaccttaatccgctgcgctttgagtacaattgtcaaattttcaattagataagcaaaaccaacaaggaatgtcaacagtgaagagtgctgttaaatcgcttatcgcggaatcccagtgggaggagttttcttctcttttcaattagttatcatgggaataggcctctttgtgggcaaggcctacgtttgaaaacaaacacttatctatattttattgaaaaccgaccattgtcattcttcggttcaaaagacaacgaagtcgaacgttggcgccaagtatcgatagtgccaacattggactttcaggcttgttatcgacacttgtgcaccactagccttcagtacaaaatacgcaaaaaattttctttttccggaaaattaagtggaaagcgcaacaggttgttctctttacgcaacaaaaacggcaggagttcgcgtagtaactcatttcacatcgaattcaagtcgaatacagcagcaaagtaatgcagcacgcagctgatttggaaacagctgccagcgcagtttgtgaaattgcacaccggctaaaataacccggtgggaaatccgaaggaacttccgatccagtattccaaagcacccagatgtagccaagacttatccactaaccggagatttaatgcagaaatggcggatgaaaaggccaaggaatccttccgcgagcggcaagcgcaggagttggaggttataaaggtgagcagagcaggtgtttcatccaagaagctgatactaaaggcttatctccttatcttggaacagtccatctttggctgtgatgtggaggacctaagaccccaggcgaatccttccctgtggaagccaacggacatacggatacaacttaccccacttcgagactcctcgaacggactggaaacctatgtgtgcaccaagctgcacgtcacctgtccatcaaagtatccaaaattgtaagagcccagttccacttattcttaaaaaactgaattttaaactatagaactaaccactagaatgtggaatgcattactcaaaataagtaaaccaaactttccgcaggccccctaagatatctctggaggagtccaaaggcatgtcggatcagctgctggaggccctacgcaaccaattgcaggctcaatcccaagagctacgtggcgaagtgatgatttatgaattggcccagaccgttcaggcctttctcctcgaacacaacaaaccaccaaagggatcattctacgaccagatgctccaggataaacagaagcgcgaccaggagctacaggacatacagcggcagcgggagtccctgcaacgccagacgctcatcgacgaggtggagcggcgcaaagagatgttcaaaacggaggctaagaggcgcggcgaaccaaggcgcagcatgagcgagtctaacccacggcatcctagctcgtcggagagctccgagaactcctcgccctactatcgtggtcacatctacccctccaaatgcctggatcaccgcaacacggagacgctctacttccacaagatgggcaggcagattcagcgtggatgctgcgttggtgagggttcgctttcctaaagagaattcctgttttgaatgcgtctgaactaagtaatttattgtgcgtaattcctaggtcactcccaacgaggttgcatcgcctacactggcatagatatgcactgcggccagttgctctacataacagaatggaacatcaagtacagccaactggagcagccatgcatcggcggaggcaagtgccactggagcagcgagtcaaagtgcatgggcagtcatcgtgtggacgaagtgatggcctccattgaaaagcaggtgtcctcactgtcccaactacagcacaaaaacctcgtctcgtacgagtgcgtactgtgcatcaagcgaaaggaaggtctacttgtgtatttggtccaagacttcctccttggcaccagcgtgttcagcatctcctcctcgcttggctggtgcatggacggcgcacgaatggttgcgcgcggcgtgctggacgccttagtatttcttcacaacaagggtgtatcccatagtcacctgctcgacaccactgtttttatggacaacacaggcaatgtgagggtatcagacttttcgctcgttcccaatcttctagaacttctgagcggagctggacaaagcagcagttgcggggacttacccgcgttaggtgccctggtggagagtttgatgcccactaacagttacgagatgcgcgactttgtagacaagtaattaattgtaatgaaaacttaatccttttttaatttaatgttttctttaggtgtaactcggaccgaactctttccgcatcagagttattggagcatccattcttacgcttttacgtcgacaatggccagcagcaggtgatgccattaccacagcagcaacatcctaacaccgtccagcgcactggatccgccatgccgtaccagataccgacactggccctaagccaatcccgcctgcgaacggaattcgaggtgctcatgtacttgggaaagggtgcctttggtgacgtgctaaaggtgcgcaacattttagacaaccgagagtacgccatcaagcgcataccattgcccgcgaggagtcgccagctgtacaaaaagatgacgcgcgaggtggagcttctttcgcggctgaatcatgagaatgtagttcgatactttaacagttggatagaaagtgtagatgacgcagatgccgctgagatggataagctgctgggcggtgagtggtcccagagtcagcaggaccttagcgtaaaacctgccaagtcaccacagctggggcccactttagaggaggacgaggatgaagaggacagctcatccagcatgtggaacggttacatgtaaaaattagcttctatgcttcctctaatttgaattaacgctaacacctcttcgtatccatcagacccaacatggaggactctgattcggatggcattgaatttgtggactccaacggcaaggtggctgtctacgacgacgaagagcaggaggattccaccagaggcaagaccaattcgccaaaacctttgatgcaggtcatgtacatccagatggagttctgtgagaaatgcacattgcggtatgtttttcgaaagcttcaccaattaaataactaattaaataactatttaataatactgtagcaccgccatcgatgacaatctcttcaatgacacggatcgtctgtggcgcttatttcgggagattgccgagggtctcgcgcatattcaccagcaaggcattatccatcgggacctaaagcccgttaacatcttcttggactcgcacgatcagattaagatcggtgactttggtctggccaccaccagttttctggctctccaagcccacgacgcagcgcctgcgcctgttaaccagataaccagtgcggaagacggcactggtactggtaaggtcggcaccactctatacgtggctcccgaattgacaggaaatgcttccaagtctgtgtacaaccagaaggttgatatgtacaccctgggaatcattcttttcgagatgtgccaaccgccgttcgacacaagcatggagcgggctcagaccattatggctctcaggaatgtttccattaatataccggatgctatgcttaaggatcccaagtatgagaagacggtgaaggtaaacacgtcgccatcctgataaaagctaagattttcactgttatattatttttaagatgcttcagtggcttctcaaccacgatcccgcccagagacctactgccgaggagctgctcatctcagacctggttccaccagcccagttggaggccaatgagctccaagaaatgctgcgtcacgccctcgctaatccgcagagcaaggcctacaagaacctagttgcccgatgtcttcagcaggagagcgacgaggtgctggaacacacctaccacttgggaagcagtcgagctatgaaatcctggaactcggcaattataatcgatgatatagtatccctgaacccagtgattgagtttgttaaggctaaggtcgtgaatttattccgcaagcatggagctatagaggtggactcaccgctcttatccccactttccgcaaggaacagcactgcgaatgcgaacgccaatgccgtacaccttatgacccactcgggatgtgtggtggtgctaccctgtgacctgcggactcagtttgcgcgtcacgttaccatgaacagcgtgaatctcatccggcgctactgtgtggaccgtgtctatcgggaggagcgagtgtttaattttcatcccaagcaaagctacgactgctctttcgatataattgcacccacaactggaagtcatttagttgatgccgagctgctgtcgttggcttttgaaatcaccagtgaactgccccgattacgcgaaaagaatttggcgatccgcatgaaccacactaatctcttgagggccatcctcatcttctgcaatgtaccaaaggctcagtatggagcactcttcgagggcaccatggacttcatcgagtcgcgcatctcacgcttccaatttcactcgagtattaccgggattatggaaaagtcgcgaacatctgctcaaactctgatggacatgttgttagctaactttctgctgactggttccagaagcactgtggacgattccgcgctgaaatctttgatgcgtggaaagggagaagcagcttcactggcaaggggagcattgcgggaacttgaaacagttgtgggactggcttacagtctaggcgtaaaggtaagtagtaatcttcttttaaaagcaatatatttgtctaaccggttcccattccctttcagtgtcctatacacatatgggctggcttgcccatcagcttcgatcgtgccagcaacggtggaattgtgtggcagatgaccgctgacctgaagcccaatcgctctggccatccttcggttctggcgattggggagagatacgactctatgctgcatgaattccagaagcaggcgcagaagtttaatcccgccatgccagcacgtggagttcttagtggagcgggcttgacgttctccctagacaagctggtagctgctgttggtgtggaatacgctaaggattgtcgggcgatagatgtgggcatttgcgtgtgtggaacccgtccaccgctaaaggatgtgacctatatcatgcgtctgctgtggtcggttggcatccgatgtggaattgtggaggccgccagcgaattgggagatgaagcacaggatcttgcccgccttggggcgttacatgtcatcctggtggcggaaaatggctcattgagagtgagatctttcgagagggaacgattccaggagcgtcacctaacaagaaccgaactggtggagttcatccagaagatgctgcgaagtgatggactcaatgggaccaccgtggacaacttcagccagttgtcagccttgggtagtggtgacaacagaagcagtggtggaaaggaaagagaacgcggcgagaatggtctgagcacctccgcatcgaatgccaccatcaagaacaactatagccagttgccgaatcttcaggtgacgtttctcacccacgacaagccaacggcgaactacaaaaggcggctagagaaccaggtggcgcagcagatgagctcaacgctatcgcagttcctcaagaaggagacctttgtggtcctggtggtggagttgccgcctgctgttgtaaatgccattgtgggggccattaatccacgggaaatacgcaagcgagagactgaaccggaaatcaactatgtgatcgagcggtaagttaacaaatcaattctatttggtctgctttcaactgcaacttcatcaattcatacagattttcgaaatacaagcgctacatctccgagataaacgaagaggttgtcgactatctgagcgatgccaagactcccattgtggccttgtacagcatatccgattcctactaccgcgtcatcatctagccaacatcaaatgcatagaatcggctgaactacttagtagaccagccagtagtgtaagctcgaaagtgtcacaaattattttcgccgaaattctacttaactggctgccctccgtgccattaacacttttgtttgtttgtgcgaatcaaaattgatgagattgtatgtttctgtatccatttcaaatggttgagaacttatttctattctgccaatttattgaatgcctttctagtggaagctctcattcataaacacatattttattataacttggtttaaagttaaatccatactaaagctgttcgctcctaagtcaaaagaatagttggaaactaaaatgattctttttgaatttgtataattatgtttaaacaagattaagtatccgaactttcttgcacttcgaaattaaagttaagtagaggctaatattttcagagaaaattcttaaaaattgttttataaatagcatctcggggttgaatcgagcaataacaatttatttatacagctgacggtcaaataggtgaatcttcatccaatattttatatacgtacaacttttaaggacaacattttttagcctacaataaaatttcaagttttgaaggcgtcttttcgcagacgaaacataaggaaagctcactgtacaagttaatttgcatcttggaactcacgttccgctctctccggcagatttgttgagcgaacgggggattcccagggcgggcccttggagaacctttcgcgaaagacgcataaagccggagacgggatcgcggccaaagtacttgacctggatctcctgacccacttccaggtttagggcagagggatgggctatcttgcgctgatccagctgcgagttgtgcagcaaagcgggtggcatactgggatagaggatgaccattactccggtgtctcgcaattcggtgattttggcagtgtagattccgccgaactccaggtccggcactcgttccttcaccatgtagccctcgatcagctccttggcctcatccatggctgcttgcgaaggagcaaaaacattgaaatgggtctcatcgactgctgttagggaggtgcccgtttccaagtaaatccgcttcatgtgaaggccgctgggaccaattaactgcgccctctgttgcggctctacagttagggtttcactcactggccagctctccttggggtattttctaaacgattgcgagagtattataaaattagcatttaaaaccatgtagttcccttaagtgacgtgtactcaccgaggttccctaatagcctcactcatgatgtccagaatattagatttggcatcggtggccttttgtagcgattccatcacaaccttaagaggaattcccgggatcttgaggtccgcctggatggcggtgaagccttttctcgtgccagccaccttcatgtccatgtcgcccatgtaatcttcgatgcccaggatgtcggtgagaatgcggtagtcctgcaggtgcttagtgtcgtcgttctcgaactttgtgaccaggccaatggccacacctgccgcaggtgcgctcactggaacgccggcgtccataagggccaaggagccaccgcaaacgctggccatgctactgctccca

SEQ ID NO: 1679 - DNA, 5726 bp, DROSOPHILA
gtgcaccactagccttcagtacaaaatacgcaaaaaattttctttttccggaaaattaagtggaaagcgcaacaggttgttctctttacgcaacaaaaacggcaggagttcgcgtagtaactcatttcacatcgaattcaagtcgaatacagcagcaaagtaatgcagcacgcagctgatttggaaacagctgccagcgcagtttgtgaaattgcacaccggctaaaataacccggtgggaaatccgaaggaacttccgatccagtattccaaagcacccagatgtagccaagacttatccactaaccggagatttaatgcagaaatggcggatgaaaaggccaaggaatccttccgcgagcggcaagcgcaggagttggaggttataaagtccatctttggctgtgatgtggaggacctaagaccccaggcgaatccttccctgtggaagccaacggacatacggatacaacttaccccacttcgagactcctcgaacggactggaaacctatgtgtgcaccaagctgcacgtcacctgtccatcaaagtatccaaaattgccccctaagatatctctggaggagtccaaaggcatgtcggatcagctgctggaggccctacgcaaccaattgcaggctcaatcccaagagctacgtggcgaagtgatgatttatgaattggcccagaccgttcaggcctttctcctcgaacacaacaaaccaccaaagggatcattctacgaccagatgctccaggataaacagaagcgcgaccaggagctacaggacatacagcggcagcgggagtccctgcaacgccagacgctcatcgacgaggtggagcggcgcaaagagatgttcaaaacggaggctaagaggcgcggcgaaccaaggcgcagcatgagcgagtctaacccacggcatcctagctcgtcggagagctccgagaactcctcgccctactatcgtggtcacatctacccctccaaatgcctggatcaccgcaacacggagacgctctacttccacaagatgggcaggcagattcagcgtggatgctgcgttggtcactcccaacgaggttgcatcgcctacactggcatagatatgcactgcggccagttgctctacataacagaatggaacatcaagtacagccaactggagcagccatgcatcggcggaggcaagtgccactggagcagcgagtcaaagtgcatgggcagtcatcgtgtggacgaagtgatggcctccattgaaaagcaggtgtcctcactgtcccaactacagcacaaaaacctcgtctcgtacgagtgcgtactgtgcatcaagcgaaaggaaggtctacttgtgtatttggtccaagacttcctccttggcaccagcgtgttcagcatctcctcctcgcttggctggtgcatggacggcgcacgaatggttgcgcgcggcgtgctggacgccttagtatttcttcacaacaagggtgtatcccatagtcacctgctcgacaccactgtttttatggacaacacaggcaatgtgagggtatcagacttttcgctcgttcccaatcttctagaacttctgagcggagctggacaaagcagcagttgcggggacttacccgcgttaggtgccctggtggagagtttgatgcccactaacagttacgagatgcgcgactttgtagacaagtgtaactcggaccgaactctttccgcatcagagttattggagcatccattcttacgcttttacgtcgacaatggccagcagcaggtgatgccattaccacagcagcaacatcctaacaccgtccagcgcactggatccgccatgccgtaccagataccgacactggccctaagccaatcccgcctgcgaacggaattcgaggtgctcatgtacttgggaaagggtgcctttggtgacgtgctaaaggtgcgcaacattttagacaaccgagagtacgccatcaagcgcataccattgcccgcgaggagtcgccagctgtacaaaaagatgacgcgcgaggtggagcttctttcgcggctgaatcatgagaatgtagttcgatactttaacagttggatagaaagtgtagatgacgcagatgccgctgagatggataagctgctgggcggtgagtggtcccagagtcagcaggaccttagcgtaaaacctgccaagtcaccacagctggggcccactttagaggaggacgaggatgaagaggacagctcatccagcatgtggaacggttacatacccaacatggaggactctgattcggatggcattgaatttgtggactccaacggcaaggtggctgtctacgacgacgaagagcaggaggattccaccagaggcaagaccaattcgccaaaacctttgatgcaggtcatgtacatccagatggagttctgtgagaaatgcacattgcgcaccgccatcgatgacaatctcttcaatgacacggatcgtctgtggcgcttatttcgggagattgccgagggtctcgcgcatattcaccagcaaggcattatccatcgggacctaaagcccgttaacatcttcttggactcgcacgatcagattaagatcggtgactttggtctggccaccaccagttttctggctctccaagcccacgacgcagcgcctgcgcctgttaaccagataaccagtgcggaagacggcactggtactggtaaggtcggcaccactctatacgtggctcccgaattgacaggaaatgcttccaagtctgtgtacaaccagaaggttgatatgtacaccctgggaatcattcttttcgagatgtgccaaccgccgttcgacacaagcatggagcgggctcagaccattatggctctcaggaatgtttccattaatataccggatgctatgcttaaggatcccaagtatgagaagacggtgaagatgcttcagtggcttctcaaccacgatcccgcccagagacctactgccgaggagctgctcatctcagacctggttccaccagcccagttggaggccaatgagctccaagaaatgctgcgtcacgccctcgctaatccgcagagcaaggcctacaagaacctagttgcccgatgtcttcagcaggagagcgacgaggtgctggaacacacctaccacttgggaagcagtcgagctatgaaatcctggaactcggcaattataatcgatgatatagtatccctgaacccagtgattgagtttgttaaggctaaggtcgtgaatttattccgcaagcatggagctatagaggtggactcaccgctcttatccccactttccgcaaggaacagcactgcgaatgcgaacgccaatgccgtacaccttatgacccactcgggatgtgtggtggtgctaccctgtgacctgcggactcagtttgcgcgtcacgttaccatgaacagcgtgaatctcatccggcgctactgtgtggaccgtgtctatcgggaggagcgagtgtttaattttcatcccaagcaaagctacgactgctctttcgatataattgcacccacaactggaagtcatttagttgatgccgagctgctgtcgttggcttttgaaatcaccagtgaactgccccgattacgcgaaaagaatttggcgatccgcatgaaccacactaatctcttgagggccatcctcatcttctgcaatgtaccaaaggctcagtatggagcactcttcgagggcaccatggacttcatcgagtcgcgcatctcacgcttccaatttcactcgagtattaccgggattatggaaaagtcgcgaacatctgctcaaactctgatggacatgttgttagctaactttctgctgactggttccagaagcactgtggacgattccgcgctgaaatctttgatgcgtggaaagggagaagcagcttcactggcaaggggagcattgcgggaacttgaaacagttgtgggactggcttacagtctaggcgtaaagtgtcctatacacatatgggctggcttgcccatcagcttcgatcgtgccagcaacggtggaattgtgtggcagatgaccgctgacctgaagcccaatcgctctggccatccttcggttctggcgattggggagagatacgactctatgctgcatgaattccagaagcaggcgcagaagtttaatcccgccatgccagcacgtggagttcttagtggagcgggcttgacgttctccctagacaagctggtagctgctgttggtgtggaatacgctaaggattgtcgggcgatagatgtgggcatttgcgtgtgtggaacccgtccaccgctaaaggatgtgacctatatcatgcgtctgctgtggtcggttggcatccgatgtggaattgtggaggccgccagcgaattgggagatgaagcacaggatcttgcccgccttggggcgttacatgtcatcctggtggcggaaaatggctcattgagagtgagatctttcgagagggaacgattccaggagcgtcacctaacaagaaccgaactggtggagttcatccagaagatgctgcgaagtgatggactcaatgggaccaccgtggacaacttcagccagttgtcagccttgggtagtggtgacaacagaagcagtggtggaaaggaaagagaacgcggcgagaatggtctgagcacctccgcatcgaatgccaccatcaagaacaactatagccagttgccgaatcttcaggtgacgtttctcacccacgacaagccaacggcgaactacaaaaggcggctagagaaccaggtggcgcagcagatgagctcaacgctatcgcagttcctcaagaaggagacctttgtggtcctggtggtggagttgccgcctgctgttgtaaatgccattgtgggggccattaatccacgggaaatacgcaagcgagagactgaaccggaaatcaactatgtgatcgagcgattttcgaaatacaagcgctacatctccgagataaacgaagaggttgtcgactatctgagcgatgccaagactcccattgtggccttgtacagcatatccgattcctactaccgcgtcatcatctagccaacatcaaatgcatagaatcggctgaactacttagtagaccagccagtagtgtaagctcgaaagtgtcacaaattattttcgccgaaattctacttaactggctgccctccgtgccattaacacttttgtttgtttgtgcgaatcaaaattgatgagattgtatgtttctgtatccatttcaaatggttgagaacttatttctattctgccaatttattgaatgcctttctagtggaagctctcattcataaacacatattttattataacttggtttaaagttaaatccatactaaagctgttcgctcctaagtcaaaagaatagttggaaactaaaatgattctttttgaatttgtataattatgtttaaacaagattaagtatccgaactttcttgcacttcgaaattaaagttaagtagaggctaatattttcagagaaaattcttaaaaattgttttataaatagcatctcggggttgaatcgagcaataacaatttatttatacagctgacggtcaaataggtgaatcttcatccaatattttatatacgtacaacttttaaggacaacattttttagcctacaataaaatttcaagttttgaaggcgtcttttcgcagacga

SEQ ID NO: 1680 - protein, 1589 aa, DROSOPHILA
MADEKAKESFRERQAQELEVIKSIFGCDVEDLRPQANPSLWKPTDIRIQLTPLRDSSNGLETYVCTKLHVTCPSKYPKLPPKISLEESKGMSDQLLEALRNQLQAQSQELRGEVMIYELAQTVQAFLLEHNKPPKGSFYDQMLQDKQKRDQELQDIQRQRESLQRQTLIDEVERRKEMFKTEAKRRGEPRRSMSESNPRHPSSSESSENSSPYYRGHIYPSKCLDHRNTETLYFHKMGRQIQRGCCVGHSQRGCIAYTGIDMHCGQLLYITEWNIKYSQLEQPCIGGGKCHWSSESKCMGSHRVDEVMASIEKQVSSLSQLQHKNLVSYECVLCIKRKEGLLVYLVQDFLLGTSVFSISSSLGWCMDGARMVARGVLDALVFLHNKGVSHSHLLDTTVFMDNTGNVRVSDFSLVPNLLELLSGAGQSSSCGDLPALGALVESLMPTNSYEMRDFVDKCNSDRTLSASELLEHPFLRFYVDNGQQQVMPLPQQQHPNTVQRTGSAMPYQIPTLALSQSRLRTEFEVLMYLGKGAFGDVLKVRNILDNREYAIKRIPLPARSRQLYKKMTREVELLSRLNHENVVRYFNSWIESVDDADAAEMDKLLGGEWSQSQQDLSVKPAKSPQLGPTLEEDEDEEDSSSSMWNGYIPNMEDSDSDGIEFVDSNGKVAVYDDEEQEDSTRGKTNSPKPLMQVMYIQMEFCEKCTLRTAIDDNLFNDTDRLWRLFREIAEGLAHIHQQGIIHRDLKPVNIFLDSHDQIKIGDFGLATTSFLALQAHDAAPAPVNQITSAEDGTGTGKVGTTLYVAPELTGNASKSVYNQKVDMYTLGIILFEMCQPPFDTSMERAQTIMALRNVSINIPDAMLKDPKYEKTVKMLQWLLNHDPAQRPTAEELLISDLVPPAQLEANELQEMLRHALANPQSKAYKNLVARCLQQESDEVLEHTYHLGSSRAMKSWNSAIIIDDIVSLNPVIEFVKAKVVNLFRKHGAIEVDSPLLSPLSARNSTANANANAVHLMTHSGCVVVLPCDLRTQFARHVTMNSVNLIRRYCVDRVYREERVFNFHPKQSYDCSFDIIAPTTGSHLVDAELLSLAFEITSELPRLREKNLAIRMNHTNLLRAILIFCNVPKAQYGALFEGTMDFIESRISRFQFHSSITGIMEKSRTSAQTLMDMLLANFLLTGSRSTVDDSALKSLMRGKGEAASLARGALRELETVVGLAYSLGVKCPIHIWAGLPISFDRASNGGIVWQMTADLKPNRSGHPSVLAIGERYDSMLHEFQKQAQKFNPAMPARGVLSGAGLTFSLDKLVAAVGVEYAKDCRAIDVGICVCGTRPPLKDVTYIMRLLWSVGIRCGIVEAASELGDEAQDLARLGALHVILVAENGSLRVRSFERERFQERHLTRTELVEFIQKMLRSDGLNGTTVDNFSQLSALGSGDNRSSGGKERERGENGLSTSASNATIKNNYSQLPNLQVTFLTHDKPTANYKRRLENQVAQQMSSTLSQFLKKETFVVLVVELPPAVVNAIVGAINPREIRKRETEPEINYVIERFSKYKRYISEINEEVVDYLSDAKTPIVALYSISDSYYRVII

SEQ ID NO: 1681 - DNA, 4926 bp, DROSOPHILA
tgtgtagagatgccttaggctttaaacataaattgtgaatggtatgttccaaaaaaaaaaaaaagtgtacaagtttttcagactcatttatatgtatacaggtatttcgccacaatttcgatacaaccactagcctagtttggcctccattggctcaaaatgaaaagcatagaaaaggactgctggcccaacttcattagtcgccgaaaacatgaaggctagttcatttccctctcaacggtggcccgcaatcataaaatgttttgattcatttgcaagctaaattgaggcaaagcatttcaacttttcctggatcgcacctggccggaggccgatgttgagggcgttggttgcaaaggctgggagggggcgtggcagcatccgcctgatggtggcgaactatctggcacaggtccacagctccggcggtcggtgcttcattttcagccattgaagcgtgccaccgattgaaaatttaatttcccgcctatggcgttgaaataaaagagcggggggcaaaaaaaaaagaaggctgtccaacctcagaaagaggcaaaaaaaaaaaaaaaaaaagggagaaaaggaagctgtgccaccggtttagaccaggccaatgtatttccgttcatattcgagtccggcaagtggattttgatttggatttggatatggacttggattctgtctgctcctgctgctccatcgttttatttgcaataatccaaattgccatgggtcgattcgttagactgtatatcctgtttcgactgcctgatttatttattgaagcaccgagcaggtcgatagatccatccatttgactccatataaaatccttggcaggactatcgttgaataacacatgcagttttgtaaattttaaattttgtaaactatcgtataaattttcacacatcgcaaacttttttgacatttcagctagcattttcgtgctaatctaattaagctgagccattttcgttataagatcatttagaaaatgaaacttcccactgatacaagtactccttcaatcgcaggtctctccaaacgaccgctgggcccgccgcatcgtaaaagcagtctaccaaagcatcaggaggtgaagcgtcgcttcctggaaatttgtgatacgaccttctcggaggaggtgagggccgccctacgcctgccggccttcgattcctacgagtggagcgatgccgatgtcatccatctcatgcagaccatgttcgtcgagctgggattcattgagaagttcagcattccggtggacacgctgcgcgagtggctctatgaggtctacaagcactacaacgaggtgcccttccacaactttcggcactgcttctgcgttgcccagatggtgagctaacaaaatatatatcccgactatcagatacccgttacacttagctagtgtgaatgcgaacgggaaattgcatattaaatataatataatatatatcgtatatatatattttatatataatattaaataacaattaatatcccgtctggatatctttcacattcaataatttataaaccataagatcttacttcttatgttctaattttagttttcatatgtgtataaagagcttgtatatatttgtatatatagtatacattcttcgaagtgaaatcggataggcgctctagttttgccctaatgacctttccacgctcaatacatgttgtgttctaatatataaaatatttctcaccaccaccacccacacacccacagccgattcgtgtcgcaaattattaataaaatacttgagagtagctggtattgaaataatagatgcagatattttttccacaccgaatagtaataataaatgcatgtacatgtgtataagatgtctggtcggacagacaaagcgtgcaatcgatataatgtgggaatttttttataaggcgcacataagtatttctatatctgaatctctgactgtatccggtgtatctgtgtgcgtgtgcggctctgtcgttgtgtgggtgctaacaatgagcggcgccccgttgtatgcaatgcaaaaataaaccgaagcgccaaagggcaatccacccaaaatgctcgcacacacacgtacacacactgacacaaacacacacacacacacacagacaatgtacgtgtgaatgtatctgagtgcgaaatgtggcttagagcaggacctatttttagctgccaagatacgcccaagatacgaaagatacgaagaatttgtttctcttttctaaaggaaaacccatgtggcaaggcgagagtggcaaaggcaagaccgagtgactggtcactcacccagtattgtcaaaaaaaaaaaaaaaaaaaaaaccgacccccgaaaaccacccatttccacaccaacaaaaaaaaaaatgaaacaacccaactgagcacttagaacagcgacccacttggctgctcaagtgccagcggaacatattttttgtaacctacatttttggcaaatgaaagttgccgggtgttgttgcatcttttgccagcgagctcctttcatttcactttcccagaaatagtaataggcatttcacttaagaatatgcattacataacttgaataatatatcagcatcgtcttctttccgattctaattacatctttaacttctagtataggatattccatattcttataatgcacttctataagcctttttttaaggtctcatttcactacttgtgtaacataaatagaagctgaaataaattcaaatgcattgtcactccaagctttatttcaatggcaaactttgccattaagcgccgcacttagtcgatcttcactgtagcagtaacttttgaaggaactaagacaaagacacatacatatatagcgcacacaaaataaaagaaacaaaaaacaaaaaaaaaaaaacacaacaacctgaaaagcgaaacgaaaactttaataaattatttttcccggcaacaaagactaacagctaaagggcgggcaaaagggggtgggcatgggcagcgacggtagactgcaagttgaagccaacaatatgggggaaaaacgaggacaaaaggacgacagaaagtcagatagtcgtggcatcaagtatacgcacggttgccccattgcaaaattgctgccacaagcgcaactatgacaatcgcattattatttttctgccgttgttgctgttaaatatgtttgccataaaccgcattatgtgccagacaaaaacaaaaaaaaagcaacacaggaatatgaaaacaaaaaaaaaacaaaaaaaaaccatggccacgcaaacacaaacaacaaacattgtgaggtgagcgcccattgtcatcgtgctcgtcatcggtggccaactcattgccgttcacctgcgccccacctgtgtgcactatttttatgtttttttatgattgtcctggccgcgtaacggcattgcaccggccgaaggacacgtgcaaggaaataacagcattgactttagcccacgaaaaactagccaattgatgaggacttaaacatgaacaaattatccttctacatttttattttcgatttcgaaatatattcatatttttagcatgttcataaaatcttttgtgaccaaatcggctttgtttattttgtaataaaaccagcagagtgaataatttctgcctgtggtcatcgaatcctattaaaatcataaacctttattggttttacaaaaaaaagaatggagtttttttcccccccatttggctttaaatcgaaaagctgcgactaataattgtaaatgtgtgtgggaatgctaaagcctttggcattttcagctttggcaaaattcctttttaaatgtggcatatgaatacgattgcagaatgtttgaatttcgaactccggtcagcgtttttaccctttctatccatttttatagctttccaacgatccatatgcgctgttgcgtattttacaattcaatggggacgcccatttgcataggcgggttttggccatcagcacagctgcggttgcaaaaatagcactgacctgaacaataataacgaataatattaatatcaatatgtattgtggcatttttacacttgcattatagttgcgaactttggttaatatgtgaacttctttgttaaaccatctgaatttattctaaatatctaaaaataatacagcaattaaatgtcagagttttgatttttatttgtagttttcactaagttatgattcgattggtttttaggtttaattgttgatttttttactattagttgatactatgagtacttgccgcagctgtacatatgtatgtgcttgttaggaacatgtgctggtgtgtgtgtgatttggcgtgtgtgtgtgtgtgcgtgcgtgcgaggacctaaaagccgtttgcaggacatgacagtcaagccgttaagcggctttcgccccaactgcaaacaggcgaaaaaaaaaactgagcattaaggcagcggcaagagcgtaaatttaaattattgaaccgaagccgccgaaaagcgactggcggcttgtcctctcttatttttccttgttttctttacgttgccaccattttcccgcagggatatggtgtttggggggggagggggggtgtggtctggtgtgaccgaacactttgactaatttccattggctgcacttttcatctgacgctgcagttgatttccttggtgtatttttgtcccgctgaaaagtttgccaacaagcagaaaatgcaccacccttgagagtgggtggctttcgagggagtggtgcgggcgtgtgttgagtgggttgttagttgtctgcgtctgtttgttgacaatgaatttagataaacttgcgaaattcgaaacgcaaacagcatttgcatttgcataaatttatagcaccccctgcgcccacgttttgtctcccagag

SEQ ID NO: 1682 - DNA, 483 bp, DROSOPHILA
atgaaacttcccactgatacaagtactccttcaatcgcaggtctctccaaacgaccgctgggcccgccgcatcgtaaaagcagtctaccaaagcatcaggaggtgaagcgtcgcttcctggaaatttgtgatacgaccttctcggaggaggtgagggccgccctacgcctgccggccttcgattcctacgagtggagcgatgccgatgtcatccatctcatgcagaccatgttcgtcgagctgggattcattgagaagttcagcattccggtggacacgctgcgcgagtggctctatgaggtctacaagcactacaacgaggtgcccttccacaactttcggcactgcttctgcgttgcccagatgctttccaacgatccatatgcgctgttgcgtattttacaattcaatggggacgcccatttgcataggcgggttttggccatcagcacagctgcggttgcaaaaatagcactgacctga

SEQ ID NO: 1683 - protein, 160 aa, DROSOPHILA
MKLPTDTSTPSIAGLSKRPLGPPHRKSSLPKHQEVKRRFLEICDTTFSEEVRAALRLPAFDSYEWSDADVIHLMQTMFVELGFIEKFSIPVDTLREWLYEVYKHYNEVPFHNFRHCFCVAQMLSNDPYALLRILQFNGDAHLHRRVLAISTAAVAKIALT

SEQ ID NO: 1684 - DNA, 2788 bp, DROSOPHILA
ttttatagaattatataacaattaagaattttattaatatattaagtttaacataatctaattttcattaagatcttgagatgtgttgttcaatcctggcgacgatttgctccactgtactaaacccatattccgttggttactacacagtatctcttttttgcgacgatcgattttggttggtttgagggggggggggggtggtgttgggtggaggtggagggagaggttgggggcaggcagttagtgggctgagcactgctggcaaatttcgtagttgccgtttgtcgatcggcatttcaacttgatttagtttagttcagttccgtttagttagttcagggctgggggtggggctcccccacccgcacactcgaaaaaaaagccactcacacacctctttgagtgattcccaacagtcttgttcttgttttatgagcgaagagctcaatgtgagtgagcactggattagagatcacacgtacagtgcacacaaccccatacatacacatctataagtgaactaactcaccgatcggcagttaaaggagctggttgaattgtattaatgccgcttgttcgcttgccgtgcgcttttgagctcttcgctctgatttctttttataatttaagtaccggactccgaggagagctcgttttgaagtaaccaattggtagtaatgtaacggtgaagctccttccggaaaaacgggaaacgggcggagagagaaggcgactttaagtttaaagctcggctggaaattgtcgaaaacgaaacggaaaagcgaaaaagaaaccgaaatagcggttagcgggcagcgacgtcgacgcctacgcctacgccggcagagactggaaaccgacgtgagcttggagcagagcgttccatttaaatcagaacggttacgggaatcgagaagcgacggagcgatcgtcaccgttaacaaaaagtgtcaaccttccatttttcacatcaaattcagcgagcaccggtaacggtaacggtcctgcgacgcgatcgccgcgagtgtatattttttttttagctcagtcttcagtgtttcgcgattctctttaaaagaaaaaaaaaataataagtcaaaactacaaaccacacagcgaaaggcgaaagccaacggttcctgcgagtgtttattttttttttcaacaatttttgatcgtgggtatcctgaaagtgaagcataaaagttaagaggatcggaatggaacggaaagaataattgcaaataaatgaaaaagaaggaataccagaaggaattcaatttaatatcagtgcacttgtaaacaacacacattatcgccaagccacccaacctacaaatctcttccatccgtgtgactgtcattaatttttggtgtggttcccgtggtcaccttgcacggcgttatctgagtgggccacgaagagaggagcaagagcgcgatccattgcacgcccggaatcgaaacgattacatatagtgcacagcgtacgtccaaagtattcgccgaggccggcaaagaggataccattgacggggatgccaatcaccgaatacgcgatcatgatcatccgtccggcgaaggtggttggcgatatattgccatatcccaccgtggagcaaacggtgaaggcgaagaagaaggcatggtagaaggtccacgtgtagggcgtatcatcatatgtcggcggcaatgtaaccggtttgtcacagtaatccgagatccgttgaagaatctcatcctgtgtggtcgtattcttgtcgcccagctcctccagcagatattctgtagcgaaataaatttgggggatagcatggaattagtgcactttcatgcccgattgagcgtgaaatcaaatcaattttaattgctctccgccattgtggttcacgtgtctaaccgaatccgatccggatgtgaatgtgccaccgagcgctgaccttccgcttcccgatgtccataaacaatggacacaaaagaaatccgttacgaatccggtgatcatcgatcgtcactgagtggagtggctacctaaataaaaaattcccccatcgtgctatttattacacttgaaacaattgccattcggatttgattatggtgattgaatcgaattgaataaaactgctgaaaactatgctatagagatcgctaattatatacgtattgtaataatgcaaccttcgaaaaacattccgaattggaaaaccttacataacattgtttttctcgcagtgttcagatcgccataggcaatcaccacgttcatgacctgacccggacgatgcggctccgggtaattgaaatgcgctggatgaacgacaccagtcggtttcattgaaagatatttatcaggcacataaattgagatcgtggccggaaaatgagtttagcgaatcttgctgtaggtcagtagtaagaagtagagctttttcgatcggttttgatttctgggaattaattaaacgacgagacattgaacgatatcacagattatgcaataattctgaagtgattgtattaactatgggaagtaatcaattgaaattgagtcaataaaccccccagtttgctttcaagacccaacaatatacaatcttcaagtattcgcgattatcaatcagctctgatataactgaaacaaaaacgattacacaatctatgaatagatagagattatcaaattttgtttgtaatctatcacttgtttttgatctttgaatgattcaactattgaatgacaaagtctattgaatggccattatgctaattgattgattcccag

SEQ ID NO: 1685 - DNA, 3891 bp, DROSOPHILA
aacggtcctgcgacgcgatcgccgcgagtgtatattttttttttagctcagtcttcagtgtttcgcgattctctttaaaagaaaaaaaaaataataagtcaaaactacaaaccacacagcgaaaggcgaaagccaacggttcctgcgagtgtttattttttttttcaacaatttttgatcgtgggtatcctgaaagtgaagcataaaagttaagaggatcggaatggaacggaaagaataattgcaaataaatgaaaaagaaggaataccagaaggaattcaatttaatatcagtgcacttgtaaacaacacacattatcgccaagccacccaacctacaaatctcttccatccgtgtgactgtcattaatttttggtgtggttcccgtggtcaccttgcacggcgttatctgagtgggccacgaagagaggagcaagagcgcgatccattgcacgcccggaatcgaaacgattacatatagtgcacaggtagtgcgacaatccgtcgagcatgtcgccgaatcgatggatcctgctgctcatcttctacatatcctacctgatgttcggggcggcaatctattaccatattgagcacggcgaggagaagatatcgcgcgccgaacagcgcaaggcgcaaattgcaatcaacgaatatctgctggaggagctgggcgacaagaatacgaccacacaggatgagattcttcaacggatctcggattactgtgacaaaccggttacattgccgccgacatatgatgatacgccctacacgtggaccttctaccatgccttcttcttcgccttcaccgtttgctccacggtgggatatggcaatatatcgccaaccaccttcgccggacggatgatcatgatcgcgtattcggtgattggcatccccgtcaatggtatcctctttgccggcctcggcgaatactttggacgtacgtttgaagcgatctacagacgctacaaaaagtacaagatgtccacggatatgcactatgttccgccgcagctgggattgatcaccacggtggtgattgccctgattccgggaatagctctcttcctgctgctgccctcgtgggtgttcacctacttcgagaactggccctattccatctcgctgtactacagctatgtgaccaccacaacaattggattcggtgactatgtgcccacatttggagccaaccagcccaaggagttcggcggctggttcgtggtctatcagatctttgtgatcgtgtggttcatcttctcgctgggatatcttgtgatgatcatgacatttatcactcggggcctccagagcaagaagctggcatacctggagcagcagttgtcctccaacctgaaggccacacagaatcgcatctggtctggcgtcaccaaggatgtgggctacctccggcgaatgctcaacgagctgtacatcctcaaagtgaagcctgtgtacaccgatgtagatatcgcctacacactgccacgttccaattcgtgtccggatctgagcatgtaccgcgtggagccggctcccattcccagccggaagagggcattctccgtgtgcgccgacatggttgccgcccaaagggaggcgggcatggtacacgccaattccgatacggagctaagcaaactggatcgcgagaagacattcgagacggcggaggcgtaccgccagaccaccgatttgctggccaaggtggtcaacgcactggccacggtgaagccaccgccggcggaacaggaagatgcggctctctatggtggctatcatggcttctccgactcccagatcctggccagcgaatggtcgttctcgacggtcaacgagttcacatcaccgcgacgtccaagagcacgtgcctgctccgatttcaatctggaggcacctcgctggcagagcgagaggccactgcgttcgagccacaacgaatggacatggagcggcgacaaccagcagatccaggaggcattcaaccagcgctacaagggacagcagcgtgccaacggagcagccaactcgaccatggtccatctggagccggatgctttggaggagcagctgaagaaacaatcaccgggtgccggtcgcgtcaagaagttctccatgccggatggtctgcgacgtctgtttcccttccagaagaagcgcccctcgcaggatctggagcgcaagttgtccgtggtctcggtacccgagggtgtcatctcgcagcaagccagatccccgctggactactacagcaacacggtcacggcggcctccagtcaatcctatttgcgcaacggacgcggtccgccaccgcccttcgaatcgaatggcagcttggccagcggcggcggcgggctaacgaacatgggcttccagatggaggatggagcaaccccgccatcggcattgggcggtggagcctatcaacgcaaggcggctgctggcaagcgccgacgcgagagcatctacacccagaatcaagccccatccgctcgccggggcagcatgtatccgccgaccgcgcacgccttggcccagatgcagatgcgacgcggcagcttggcaaccagtggctctggatcggcggccatggcggcagtggccgcgcgtcgtggcagcctcttcccagctacagcatcggcatcatcgctgacctctgctccgcgccgtagcagcatattctcggttacctccgaaaaggatatgaatgtgctggagcagacgaccattgcggatctgattcgtgcgctcgaggtagtgcacacccatgccgtgcttgatgaacagcaacaggcggcagcggctggaggagctgccggtggaggcggaatatcgaggggtagccgcaaacagcgcaagatgggcaatgctggactggagccaccgcagctgccgccgatcctgtcgctcttcgctggcgatcaaacgaggacactgcaggcggcggctgccaatcggctgtacgcgcgtcgctccactattgttggcatatcgcccactggtggagcagccaccgcaccggcagccagatccctgctggaaccgccacccagttacactgagagagccgcaaatcaaagccaaataacagccggtccatcgaatgcgccaactgttcagagcaaattccgtcgtcgctttagcgtgcgaccgactgctctgcaaattccaccgggacaggcgccgccaccaggtgccagtttgatggagcagtcctcacagacggcgctccagcgacgcctctcgctgcgaccctcgccactggcccgcgaactgtcgcccacgtcgccgcccggaggaagtggaagcgccttgccagcgggggccatcgacgagtctggcggaacgtccgctcaacggctgctgcccttgcccgccggaacgagacccagcaccagcagcacccactcgccgctctcgaggatcgtgcagatctcgcaagcacagcgcaagagcagcatgcccagtgcagcggccacgggatcgagtggtgcccccgccgagaagtagttaggtttccttgtccgaaagatgtattacctgtatcgtatacatatgtatttccacgtccagcggaattgctttgccaatttcacagcatgtatgccacaaagtcgataaggctgccaaaagtccttagttgttatgctaatgttatccttaaacctatttacatacgtatatccagttatcctagttgtatgtattgttaaaactatctctctatctctctctctctattgttatcctgtatttatacccatataccctaatctatatatctatatatatattcttctatgtttattgctaagaaggcgcttatatgaacaaaacgatccgcatgttttcaagcattcaattgggaccgacaaaggatctcg

SEQ ID NO: 1686 - protein, 1001 aa, DROSOPHILA
MSPNRWILLLIFYISYLMFGAAIYYHIEHGEEKISRAEQRKAQIAINEYLLEELGDKNTTTQDEILQRISDYCDKPVTLPPTYDDTPYTWTFYHAFFFAFTVCSTVGYGNISPTTFAGRMIMIAYSVIGIPVNGILFAGLGEYFGRTFEAIYRRYKKYKMSTDMHYVPPQLGLITTVVIALIPGIALFLLLPSWVFTYFENWPYSISLYYSYVTTTTIGFGDYVPTFGANQPKEFGGWFVVYQIFVIVWFIFSLGYLVMIMTFITRGLQSKKLAYLEQQLSSNLKATQNRIWSGVTKDVGYLRRMLNELYILKVKPVYTDVDIAYTLPRSNSCPDLSMYRVEPAPIPSRKRAFSVCADMVAAQREAGMVHANSDTELSKLDREKTFETAEAYRQTTDLLAKVVNALATVKPPPAEQEDAALYGGYHGFSDSQILASEWSFSTVNEFTSPRRPRARACSDFNLEAPRWQSERPLRSSHNEWTWSGDNQQIQEAFNQRYKGQQRANGAANSTMVHLEPDALEEQLKKQSPGAGRVKKFSMPDGLRRLFPFQKKRPSQDLERKLSVVSVPEGVISQQARSPLDYYSNTVTAASSQSYLRNGRGPPPPFESNGSLASGGGGLTNMGFQMEDGATPPSALGGGAYQRKAAAGKRRRESIYTQNQAPSARRGSMYPPTAHALAQMQMRRGSLATSGSGSAAMAAVAARRGSLFPATASASSLTSAPRRSSIFSVTSEKDMNVLEQTTIADLIRALEVVHTHAVLDEQQQAAAAGGAAGGGGISRGSRKQRKMGNAGLEPPQLPPILSLFAGDQTRTLQAAAANRLYARRSTIVGISPTGGAATAPAARSLLEPPPSYTERAANQSQITAGPSNAPTVQSKFRRRFSVRPTALQIPPGQAPPPGASLMEQSSQTALQRRLSLRPSPLARELSPTSPPGGSGSALPAGAIDESGGTSAQRLLPLPAGTRPSTSSTHSPLSRIVQISQAQRKSSMPSAAATGSSGAPAEK

SEQ ID NO: 1687 - DNA, 5065 bp, DROSOPHILA
tatgcccgatcccctctagagacgtcacccgacctggtgtcttatcaatcgagcttatcacacaacccattcccctgtcgataagacacccgcgaatattgtatgtagatgaatcatttttaaacatttcgggtgctgcgatgcagtcatcaatggctaatcacctgccatgggaacaaatcagggccaagaactgtcgaatggcctgcacacacacacacacacacacacacacttcggacgggggaaatcacgttatgggtgcgattttatattggcaccatttgcagacgacaccgacaccgccgcaatctgccacgatgcacttgtagggcatcaatatatactgtgcaatacctgcgcgtatagcatctcctcgctagacatggttccactggctcctcctcctactccaggttccgcttcgcgctccttctttctctcctctccttcttcctactccgcgtgggagtgagttgggtgcataaatcccgttaggtttaatttccttggtggtacgttttttttctggctctgacagcctatttaaattaccattttcgtggtctttttttgggtttatgtaaatgtactgtcctaaattacttaaaattagccaggaataatttataaaaacattgataatttttagatcgcaacgccaaagtgtgagaaaaacaaacaaacttccgtccctgtcaccgcctgactgactgacttatgttttgttgttggcaaaagggcagggttgccaaagggcgtgcagtttgggccaaattagaaatgtgtggttctaaccatggattaaatttgaacaaagtaaaatatcttgcaaaaagatttgtataatgccacagtaactgaattttttcttgcaaaacaccccagaaagcaccaattatttggcgcgcaatgctctgcagttagattttcagcactgctcaactcacccattggtattcttcaacactgcaacagttattttcccgccaatttttagctggtctgtcccaccgcatcgttttttgtttcacaacagctacagttttcgcccaggacgcacgggttaaataaatatcttctctaaggaaatgtcaagccccgctcgttcgcccagtgttggaggtgcgacgcccaaacaaggcgcccgcacacccactagaggtgagtatcgacgtgccacaaaaagtgtgttctgtttgcaaagcaagcgtctgtctgcttacaggcattgcgtcgcaagatgtggagacacccatgcgcatgggtcccgggagggctgtccggccctcggacaacatcagtttgccgcccacctcgccgggaaacatcagcttgccagccaccagtccggctcgaggattgggtgcgaacatgagcgagatcgatctgagttcgccgctgaactacggcacccccagctcgatggggtccattcgaacccctcgttccggaattagaggcactccgctgcgggcgcggcccgatataagaacggacaagcgcatccgccaggtggccatcggtgggggctctggggtaagtgtacgctggcaactcattttgggactttcaaattagtttagtcgcttttacagctcgaaccaattcctgagaagggctctgaaaccaccgatcctgtatcggaatcttcgcaagcacctcagctcgtcgtctggggaaccaatgttgttgtcagccagtgcaaatccaagttcaagtcgtttattatgcgctttattgaccccagtgccgagcaggacgaaatctccgagaatattgatgttaaccagccactgtatcttcagaagctggaggagattcacacattggaggagccctatctgaatctcaactgtgcccatctcaagacctttgatcaggacttgtaccgccagttgatctgctatccgcaggaggttattcctggctttgatatggccataaacgagatgttctttgagcgttatcctgccgctcttctggaacaccagattcaagtgcgccccttcaacgcggacaagacacgcaacatgcgatccctaaatcccgaggatatggaccagttgatcagcattagtggcatggtcattcgctcgtcgaacgtcattcccgagatgcgcgaagcctttttcagttgcaacatctgttccttcagcacaaccgtcgaggtggaccgcggtcgcattaaccagcccacgctctgcaccaactgcaacacgaaccactgcttccgtttaatccacaatcgatcggagtttacggataagcagcttgtcaaacttcaggagtctccagatgacatggcggcgggacagactccgcataatgtgcttttgtatgctcacaacgatctggtggacaaggtgcagcctggtgatcgcgtcacggtcacaggcatctatcgggcgacgccactgaagactggaggcctcagttcgtcggtaaaaagtgtgtataagacgcacgtggatgtggttcacttccggaaggtggacaacaagcgactgtacgaggatgaggaggggtaagtcttgcattttattactggttagaataaaatttgataattttaattacctaccagtaaggatcacatcttcccgccagaacgcgttgagctgctacaattgctggccaagaaaccggacatctacgaccgcttggccagggccattgccccatctatttacgagaacgacgacatcaagaaaggcatcttgctgcagctctttggtggcaccaagaagaagcatgcaactctcggccgccagaatttcagatcggaaattcacctgctgttatgcggtgatccgggtacttccaagtcccagatgctgcagtacgtcttcaacctcgtgccaagatcacagtacacctccggtcgcggttcttcggccgtcggtttgactgcctatgtgaccaaagatccggagactcgccagctggttctgcaaacgtaaatctaaaagcttgaatcagattcgaatttaggttgtaatcttatggcttgttttcagaggtgcactggttttggccgataatggagtttgctgcattgacgagtttgacaagatgaacgactcgacacgcagtgtgctgcacgaggtgatggagcagcagacactgagtattgccaaggcgggaatcatctgtcagctaaacgcgaggacctcgattcttgctgccgccaatcccgccgagtctcagtggaataagcgcaagaacatcattgataacgtccagcttccgcacaccctgttgtcccgcttcgacctaatctttctggtcctggatccccaggatgagatctttgacaagcgactggccagccatttggtatctttgtactatgtgacgcgtcatgaggaggaggataccatgtttgtaagtagcttggatcaattgttggtatttctccggaatatctctgtaacatattcaatcaattttcaggacatgagcgtcctgcgcgactacatcgcctatgcccgcgaacatctgtcgcctacgttgtcggatgaagcgcaacaacgactcattcaggcctacgtggacatgcgaaaggtgggcgccggtcgtggccagatctctgcttacccgcgccagctggagagtctcatccgactgtcggaggcgcacgccaaggtgcgtctcagcaaccaggtggaattgctggacgtggaggaggcttggcggcttcatcgcgaggctctcaagcagtcggccacggatcccctgtccggcaaaattgacgtgggcattctcaccaccggcttatcaacagccgctcgcaaaaagcgcgccgatctggtggcagccatcaaggaaaacctcaagaagaagggcaaagttctcacagttccctatcagaaactgtttagcgatattaaggaaggatcccaaattgtaagtgctaatataatatatttataatataaaatcaatgtaaacgataatttattgcagatgatcacacgcgagcaatttgaagatgccctgaaggaggtgcaagatgagggcgcaattgttgtcatgggaaagaacaccattcgtatttgttaattttattacatttatctcattcaaaaccaaccgcaaattcattcattcctatttttaagcgcaactacaaaaatgttttcaataaaaaaatttcaaattattcgtttctgttttatcaactaatatgtaaagaaaaattgcacataattaaattatttggaaagtttatatattgcggtagaaaaataattgattgatatttgaatataatttttttatttttcgagcagcttataatgtaaaatatatggacatgtcaacgtggaaaatgttgtcaagcttgctaaaatattgataaagtgatttatacataagaagagcacatatcacttaaatttgaaaaggcagaaaaactgaatcttaaaattcgtgtaattaagcattactttggaaagccaaacaaaaacaaatttcgaatatataggagtaccccaactaaaaaaggaatatcccagttagtgccgttttttagcgcatttgcgcaggcgaagtgcagatattttggcgctctggctgctgccacactgtgtgtacggaaaatgatggagttcgggaaatcgtcggatcactcccagcacagcgcttccgaggcgtcggcggactccggcagcctggcaaacagcgatctggccgtcacgcccaccaagcgggagcgccgcaagtcgccggccaccagttcggacaacaacagcaccagcgtccaaccgccaatgtcgccgtcgtcctcggtggcggacaccacctttgagcccaccatcgacatgatggtcaacgactttgacgacgaggccacgctgaacgaggaggaggctctggcggacatggaggcgcacagtgccgaggacgagatcgccacgctgcgcgaggagagcgagatgcccatcgaggagctgctggccaaatatggcgggacagcggcttcgccggcaatgagcagctcgaaccgttccggcagcagttcacgacgtgcacgtagggccacaaagcgccagtaccagga

SEQ ID NO: 1688 - DNA, 2692 bp, DROSOPHILA
ctggtctgtcccaccgcatcgttttttgtttcacaacagctacagttttcgcccaggacgcacgggttaaataaatatcttctctaaggaaatgtcaagccccgctcgttcgcccagtgttggaggtgcgacgcccaaacaaggcgcccgcacacccactagaggcattgcgtcgcaagatgtggagacacccatgcgcatgggtcccgggagggctgtccggccctcggacaacatcagtttgccgcccacctcgccgggaaacatcagcttgccagccaccagtccggctcgaggattgggtgcgaacatgagcgagatcgatctgagttcgccgctgaactacggcacccccagctcgatggggtccattcgaacccctcgttccggaattagaggcactccgctgcgggcgcggcccgatataagaacggacaagcgcatccgccaggtggccatcggtgggggctctgggctcgaaccaattcctgagaagggctctgaaaccaccgatcctgtatcggaatcttcgcaagcacctcagctcgtcgtctggggaaccaatgttgttgtcagccagtgcaaatccaagttcaagtcgtttattatgcgctttattgaccccagtgccgagcaggacgaaatctccgagaatattgatgttaaccagccactgtatcttcagaagctggaggagattcacacattggaggagccctatctgaatctcaactgtgcccatctcaagacctttgatcaggacttgtaccgccagttgatctgctatccgcaggaggttattcctggctttgatatggccataaacgagatgttctttgagcgttatcctgccgctcttctggaacaccagattcaagtgcgccccttcaacgcggacaagacacgcaacatgcgatccctaaatcccgaggatatggaccagttgatcagcattagtggcatggtcattcgctcgtcgaacgtcattcccgagatgcgcgaagcctttttcagttgcaacatctgttccttcagcacaaccgtcgaggtggaccgcggtcgcattaaccagcccacgctctgcaccaactgcaacacgaaccactgcttccgtttaatccacaatcgatcggagtttacggataagcagcttgtcaaacttcaggagtctccagatgacatggcggcgggacagactccgcataatgtgcttttgtatgctcacaacgatctggtggacaaggtgcagcctggtgatcgcgtcacggtcacaggcatctatcgggcgacgccactgaagactggaggcctcagttcgtcggtaaaaagtgtgtataagacgcacgtggatgtggttcacttccggaaggtggacaacaagcgactgtacgaggatgaggagggtaaggatcacatcttcccgccagaacgcgttgagctgctacaattgctggccaagaaaccggacatctacgaccgcttggccagggccattgccccatctatttacgagaacgacgacatcaagaaaggcatcttgctgcagctctttggtggcaccaagaagaagcatgcaactctcggccgccagaatttcagatcggaaattcacctgctgttatgcggtgatccgggtacttccaagtcccagatgctgcagtacgtcttcaacctcgtgccaagatcacagtacacctccggtcgcggttcttcggccgtcggtttgactgcctatgtgaccaaagatccggagactcgccagctggttctgcaaacaggtgcactggttttggccgataatggagtttgctgcattgacgagtttgacaagatgaacgactcgacacgcagtgtgctgcacgaggtgatggagcagcagacactgagtattgccaaggcgggaatcatctgtcagctaaacgcgaggacctcgattcttgctgccgccaatcccgccgagtctcagtggaataagcgcaagaacatcattgataacgtccagcttccgcacaccctgttgtcccgcttcgacctaatctttctggtcctggatccccaggatgagatctttgacaagcgactggccagccatttggtatctttgtactatgtgacgcgtcatgaggaggaggataccatgtttgacatgagcgtcctgcgcgactacatcgcctatgcccgcgaacatctgtcgcctacgttgtcggatgaagcgcaacaacgactcattcaggcctacgtggacatgcgaaaggtgggcgccggtcgtggccagatctctgcttacccgcgccagctggagagtctcatccgactgtcggaggcgcacgccaaggtgcgtctcagcaaccaggtggaattgctggacgtggaggaggcttggcggcttcatcgcgaggctctcaagcagtcggccacggatcccctgtccggcaaaattgacgtgggcattctcaccaccggcttatcaacagccgctcgcaaaaagcgcgccgatctggtggcagccatcaaggaaaacctcaagaagaagggcaaagttctcacagttccctatcagaaactgtttagcgatattaaggaaggatcccaaattatgatcacacgcgagcaatttgaagatgccctgaaggaggtgcaagatgagggcgcaattgttgtcatgggaaagaacaccattcgtatttgttaa

SEQ ID NO: 1689 - protein, 866 aa, DROSOPHILA
MSSPARSPSVGGATPKQGARTPTRGIASQDVETPMRMGPGRAVRPSDNISLPPTSPGNISLPATSPARGLGANMSEIDLSSPLNYGTPSSMGSIRTPRSGIRGTPLRARPDIRTDKRIRQVAIGGGSGLEPIPEKGSETTDPVSESSQAPQLVVWGTNVVVSQCKSKFKSFIMRFIDPSAEQDEISENIDVNQPLYLQKLEEIHTLEEPYLNLNCAHLKTFDQDLYRQLICYPQEVIPGFDMAINEMFFERYPAALLEHQIQVRPFNADKTRNMRSLNPEDMDQLISISGMVIRSSNVIPEMREAFFSCNICSFSTTVEVDRGRINQPTLCTNCNTNHCFRLIHNRSEFTDKQLVKLQESPDDMAAGQTPHNVLLYAHNDLVDKVQPGDRVTVTGIYRATPLKTGGLSSSVKSVYKTHVDVVHFRKVDNKRLYEDEEGKDHIFPPERVELLQLLAKKPDIYDRLARAIAPSIYENDDIKKGILLQLFGGTKKKHATLGRQNFRSEIHLLLCGDPGTSKSQMLQYVFNLVPRSQYTSGRGSSAVGLTAYVTKDPETRQLVLQTGALVLADNGVCCIDEFDKMNDSTRSVLHEVMEQQTLSIAKAGIICQLNARTSILAAANPAESQWNKRKNIIDNVQLPHTLLSRFDLIFLVLDPQDEIFDKRLASHLVSLYYVTRHEEEDTMFDMSVLRDYIAYAREHLSPTLSDEAQQRLIQAYVDMRKVGAGRGQISAYPRQLESLIRLSEAHAKVRLSNQVELLDVEEAWRLHREALKQSATDPLSGKIDVGILTTGLSTAARKKRADLVAAIKENLKKKGKVLTVPYQKLFSDIKEGSQIMITREQFEDALKEVQDEGAIVVMGKNTIRIC

SEQ ID NO: 1690 - DNA, 5041 bp, DROSOPHILA
agctgaattcattttttagtggctttgcattgttattttcctcctcggttctgttgctcgcctcttccgccttttggaatgtcgagcgccttttctgttgttattcaattaagttttttctttctttctatcatgtggtcgttctggcttttttttttgtgttgaatatatatacatatatatgtacatatgtatatattttttttttgtgtgggaacttttgctctgcattgttgtcatcgatctgatttcattctctttgttggtcacgaaatcgggaatcaatcacgttttcataattattgaccatgacagtttggcagccactggactgggctgaccatgcccagacctcagatttaccatttttcacgcccacgcccacgtccacgccccattccgatgaatggggagcacttaaggggcttccgcaacaattgcaacagttaccgccacctcagcaccgcttttgtccccagttacctttgtcaaccctttacgctcattaactcatcgccaaggccctcgacgggatttgcttgggtttgccaagtgggcacgctggtccgtccgcccaccagaacgcccatcgaaacacccacctgagttggtccgttttggggtaaatgcaaccgcaacgatacccagcaagtgggcagggtatacatgtacatataatcggcaatactctatattgaaatcgaaacgtgtgttgttaattggtttttttatttaattagctcaaagacttttgcatataaattaactgataaaatgttggagtgccaagattaacagggctataaaaactaagaggatgggccttacaatttcaagtggaaaagaaaagaaatcaaatatatggcacacattcaagttacatatattgtagattaagtacatatatattaaaatacagggtattggccaagctgaaagcccctgcttgtttgacttcctggtggaagtgtgccactaattaaattagcgattgtggtaaatgcggattaagtgcgccactcaagagtcaacgcccagagttgcagtccccagttgcacattccaactttcccactttatcactttaccactttgcccacatcccctgctcctcaaagtcccaatctgtccacgcaattgaagccattccgtaaataatcattcaatttgattccatccacaggagcaactgcgccgacgacgcgaggaggaggagcgcatagcgcagcaaaatgaattcctgcggaacagtcttcgtggctccaggaagctgaaggcgcttcaggatacggctacgcccggtaaagcggttgcccagcagcagcagcaggcaacgctggccacccaggtggttggcgtggagaatgaggcatatctgcccgacgaagaccagccgcaggcggaacagatcgatggtaagtacacatcttttgcccccctcaaatgacgccatctaatctgcctaatcccctccaggctatggcgaactgatagcggcccttacccgcctgcaaaaccagctgagcaagagcggactgagcacgctggcgggtcgcgtttcggccgcccacagtgtcctggccagcgccagtgtggcccatgtcctggccgctcgcaccgcagtactgcagcgacgacgttcccgcgtctctggtccactgcatcacagttccctcggattgcagaaggacattgtggagctgctaacgcaatcgaatacggcggcggccatcgagctgggcaacctgctgaccagccatgaaatggagggtctgctactggcccacgatcgcattgccaatcacacggatggcacgccctcgccaacgcccacgcccactccggcaattggagcggcgacgggatcgacactcagcagtccggtggctggacccaagagaaatctaggtatggtggtgccaccgcccgtggtaccaccgccactggcgcaacgcggagcaatgccactgcctcgcggggagtcgccaccgccggttcccatgccaccactggctacaatgcccatgtccatgcccgttaatctgccgatgagtgcgtgctttggcacgctaaacgatcagaacgacaacattcgtatcatccagatcgagaagtcaacggagccgctgggcgccacagtgcgcaacgagggtgaggcggtggtcatcggtaggattgtgcgtggtggagcggcggagaagtcgggactgttgcacgaaggtgatgagatactggaggtcaacggtcaggagttgcgtggcaagacggtgaacgaagtgtgcgccctgttgggcgccatgcaaggcaccctgaccttcctgatcgtcccagcgggtagtccaccgtccgtcggcgtgatgggcggaacaacgggcagtcaactggccgggttgggtggagcacatcgtgacaccgccgtgttgcacgtacgggcgcatttcgactacgatccagaggacgatctgtatataccctgccgggagctgggcatcagcttccagaagggcgatgtactgcacgtgattagccgcgaggatcccaactggtggcaggcgtatcgcgagggcgaggaggaccagacgctggccggtcttattcctagtcagtcgttccagcatcagcgcgagaccatgaagctggccattgcggaggaggcgggtctggcgcgatcccgcggtaaggacggatcgggcagcaaaggagccacgctcctgtgtgcgcgcaagggtcgcaaaaagaagaagaaggccagctccgaggcggggtaagcatatttattctcctcgaaagggatttatcatttaaacatttaattttcaattgtagatatcctttatacgccaccacggcgccggatgaaacggatccggaggagatactcacctacgaggaggtggccttgtactatccccgcgctacccacaagcggcccatcgtcctcatcggcccgcccaacattggaagacatgagttgcgccaacgtctgatggccgactcggagcgtttctccgccgcagtgccacgtaagtgaagtcgcccgatcctgtccatccttaaatccaagaagctagttgctattaccttaagagcgttgtaaacggagcaggtctgctgcatcgtctacagctgtcatgcaatgcattcaatgggccaccgtctttaatgtctgtctctcttccgccgggcagtcttctatttgctggaggagcggcttaagccggccaagatcaaggctcaggtcaagggtaaagggctgcgcttcagagccaccaaatcccagagccattgctagacataggtcatccaacacccacacacacacacaccgtacaccaaatccatccccttagaatattctccttaaatacgttttagtaatccttgcgctttgccattttccgtagacacatcacgagcccgcagggagggcgaagtgcccggagtggactaccacttcatcacgcgacaggcctttgaggcggatattttggcgcgccgctttgtggagcacggtgaatatgagaaggcctactacggtgagttgaatttccaaatggagaagatggactgttgactaatgtgattcccaactctcgcacaggcacatcactggaggccatacgcacggtggtggccagcggcaagatctgtgtgctcaacctgcatccgcagagccttaagctgctgcgcgcctctgacctcaagccgtacgtggtgctggtggcgccgcccagcttggacaagctgcgccaaaagaagctgcgcaacggcgaacccttcaaggtgcgtttccaacattccaatttatcaaataaaacccaatctaaatcgaatctatttaaacaggaggaagagctcaaagacatcattgccacggccagggatatggaggcccgttggggtcacctattcgacatgatcataatcaacaacgacacggagcgcgcctaccaccaactgctggccgagatcaactcgctggaacgcgagccccaatgggtgcccgcccagtgggtgcacaacaatcgcgacgagtcataatgggttctaaagcacccgcaaccaccacactaccatcttccctaggatccatcaacacccaagaaatgaatagcaaacccaaactctttgtaaatacaattttcaattgagccatgaagcggagagcaggatcgattccagtccagtagttcggtttgcctgccgatgcgattaatcccaacccctccaatattatatataaatatatatatatttatactattcgttgcatatgtgcattttagtcttagagagagatcgagttttaattgtgtgtactcctgttttaaaagcattccaacctctttatgtatgttcacaaaatttgttgttcgattaatcgatttcgggaatgccacagaggaaatggtgatgctgaaatcagtgatttcaaaaaccatattgcttcttgtggcacttccgttttcctctttttttttaccactaccactaacttatatactgtaaaagaatgttttttttttttttgtatttaaattaagcttggacacttccttaatttcaaagggcaaattgaaattgtaaaataacgaatcagcaaaggaaggccagaatcgatatgatagtacccctagtacccaataaaatgtgtaataatacccataagcgactccgaatgttaacagagccagaacaatccgtaggcagctgtgcgaggggagatcgatccgtcggatatagattcatattcatcttcagattcaaattcaaaagcagaatcagaaacatacagagaaaccgaatcagaagcgcagatacagatgcagatgcaagtgttgcaattacgtaatctatttactttataaaatatatactatacggatatacatacacataaattataaatcgaagcgtacttaatacaattaatttttaacaaaacgaatgcaagagcaaagtgaaaactaagaaataaaaccgttcataagagagaaacaacaaaatcagtaagtcattgccaaaaaaaaaaaaaacaaga

SEQ ID NO: 1691 - DNA, 2385 bp, DROSOPHILA
atgcggattaagtgcgccactcaagagtcaacgcccagagagcaactgcgccgacgacgcgaggaggaggagcgcatagcgcagcaaaatgaattcctgcggaacagtcttcgtggctccaggaagctgaaggcgcttcaggatacggctacgcccggtaaagcggttgcccagcagcagcagcaggcaacgctggccacccaggtggttggcgtggagaatgaggcatatctgcccgacgaagaccagccgcaggcggaacagatcgatggctatggcgaactgatagcggcccttacccgcctgcaaaaccagctgagcaagagcggactgagcacgctggcgggtcgcgtttcggccgcccacagtgtcctggccagcgccagtgtggcccatgtcctggccgctcgcaccgcagtactgcagcgacgacgttcccgcgtctctggtccactgcatcacagttccctcggattgcagaaggacattgtggagctgctaacgcaatcgaatacggcggcggccatcgagctgggcaacctgctgaccagccatgaaatggagggtctgctactggcccacgatcgcattgccaatcacacggatggcacgccctcgccaacgcccacgcccactccggcaattggagcggcgacgggatcgacactcagcagtccggtggctggacccaagagaaatctaggtatggtggtgccaccgcccgtggtaccaccgccactggcgcaacgcggagcaatgccactgcctcgcggggagtcgccaccgccggttcccatgccaccactggctacaatgcccatgtccatgcccgttaatctgccgatgagtgcgtgctttggcacgctaaacgatcagaacgacaacattcgtatcatccagatcgagaagtcaacggagccgctgggcgccacagtgcgcaacgagggtgaggcggtggtcatcggtaggattgtgcgtggtggagcggcggagaagtcgggactgttgcacgaaggtgatgagatactggaggtcaacggtcaggagttgcgtggcaagacggtgaacgaagtgtgcgccctgttgggcgccatgcaaggcaccctgaccttcctgatcgtcccagcgggtagtccaccgtccgtcggcgtgatgggcggaacaacgggcagtcaactggccgggttgggtggagcacatcgtgacaccgccgtgttgcacgtacgggcgcatttcgactacgatccagaggacgatctgtatataccctgccgggagctgggcatcagcttccagaagggcgatgtactgcacgtgattagccgcgaggatcccaactggtggcaggcgtatcgcgagggcgaggaggaccagacgctggccggtcttattcctagtcagtcgttccagcatcagcgcgagaccatgaagctggccattgcggaggaggcgggtctggcgcgatcccgcggtaaggacggatcgggcagcaaaggagccacgctcctgtgtgcgcgcaagggtcgcaaaaagaagaagaaggccagctccgaggcgggatatcctttatacgccaccacggcgccggatgaaacggatccggaggagatactcacctacgaggaggtggccttgtactatccccgcgctacccacaagcggcccatcgtcctcatcggcccgcccaacattggaagacatgagttgcgccaacgtctgatggccgactcggagcgtttctccgccgcagtgccactcttctatttgctggaggagcggcttaagccggccaagatcaaggctcaggtcaaggacacatcacgagcccgcagggagggcgaagtgcccggagtggactaccacttcatcacgcgacaggcctttgaggcggatattttggcgcgccgctttgtggagcacggtgaatatgagaaggcctactacggcacatcactggaggccatacgcacggtggtggccagcggcaagatctgtgtgctcaacctgcatccgcagagccttaagctgctgcgcgcctctgacctcaagccgtacgtggtgctggtggcgccgcccagcttggacaagctgcgccaaaagaagctgcgcaacggcgaacccttcaaggtgcgtttccaacattccaatttatcaaataaaacccaatctaaatcgaatctatttaaacaggaggaagagctcaaagacatcattgccacggccagggatatggaggcccgttggggtcacctattcgacatgatcataatcaacaacgacacggagcgcgcctaccaccaactgctggccgagatcaactcgctggaacgcgagccccaatgggtgcccgcccagtgggtgcacaacaatcgcgacgagtcataa

SEQ ID NO: 1692 - protein, 794 aa, DROSOPHILA
MRIKCATQESTPREQLRRRREEEERIAQQNEFLRNSLRGSRKLKALQDTATPGKAVAQQQQQATLATQVVGVENEAYLPDEDQPQAEQIDGYGELIAALTRLQNQLSKSGLSTLAGRVSAAHSVLASASVAHVLAARTAVLQRRRSRVSGPLHHSSLGLQKDIVELLTQSNTAAAIELGNLLTSHEMEGLLLAHDRIANHTDGTPSPTPTPTPAIGAATGSTLSSPVAGPKRNLGMVVPPPVVPPPLAQRGAMPLPRGESPPPVPMPPLATMPMSMPVNLPMSACFGTLNDQNDNIRIIQIEKSTEPLGATVRNEGEAVVIGRIVRGGAAEKSGLLHEGDEILEVNGQELRGKTVNEVCALLGAMQGTLTFLIVPAGSPPSVGVMGGTTGSQLAGLGGAHRDTAVLHVRAHFDYDPEDDLYIPCRELGISFQKGDVLHVISREDPNWWQAYREGEEDQTLAGLIPSQSFQHQRETMKLAIAEEAGLARSRGKDGSGSKGATLLCARKGRKKKKKASSEAGYPLYATTAPDETDPEEILTYEEVALYYPRATHKRPIVLIGPPNIGRHELRQRLMADSERFSAAVPLFYLLEERLKPAKIKAQVKDTSRARREGEVPGVDYHFITRQAFEADILARRFVEHGEYEKAYYGTSLEAIRTVVASGKICVLNLHPQSLKLLRASDLKPYVVLVAPPSLDKLRQKKLRNGEPFKVRFQHSNLSNKTQSKSNLFKQEEELKDIIATARDMEARWGHLFDMIIINNDTERAYHQLLAEINSLEREPQWVPAQWVHNNRDES

SEQ ID NO: 1693 - DNA, 7445 bp, DROSOPHILA
acaagacttgataaataggtttaaccaattaaatcaattttatacaatattgatgttagttttgatgacagtgaactttatattcttttttgaaagcaacttgaaaatagtaagtttctctttataacagagtatgaagtaaccaattggatgctatattttaagatatgataatatataatatcagcttaaatactcaaataataataataataattaattcctatacctttcgttaatattcagttcgaaagccagttgaaaatcgcttgttattggggacgaataataacttttctataaataagccgtaatagccgctgtcgtaaagtaatcttctacttattgaacaaccgagtaaataaggtaaataggtctggctaaagcaattgtcccgcaaagctgacccattgggctgagcaaataaacaaaacagtgagtcaactccaagttgttgccgtttgccgagcaaataaacagataaccgggctcttaccgcattcacgatcagagcagatcatgcgctcgcagcacgtgtaaactacgtaaatattcacgggcgcaattaatgccacttcggtggattggattttcttccatttcgcacgtcggaagtgtccacttttggggcgcccaaatactccagttagtccagttcagatggtgcataatcggccagcaattaagtaatgtacacacatcaccttcgttttccggatggtgctattccgtgggggcatgttatggcgcgcacctttcacgtagggcgcctgcagggcaattcgctctgggccacggctattaagctctccaggtaaatatctggcactcggaattcatatttattttgccagccatataactaactatatgctatatgtgtgccagctacatgcgcacgagcagagcgataaccgccgacgagcgacgacgatgttgcgactactccaggcgttcgaagttgctcgttcaggtttcagtattcagttacgttttggcgttttacggtaacgcagcggacagttagcctccaattataggtgcgtccatatctcccgacattccagcttgtgagtgtgtgccaaaataatagagcgtaatgccatcatatttgcgagtaaaaccgagaaacctgcaaacgtgtaaatatcgtctgagcgccttatgatcgctcatacgccgcgttggccccctacaaaaaaaaaaaaaaaaaacaaagccgcttacgcccgacgttcgtgactttgacatttgtggccgctggccgctaaattggccatctataacgaattgtcgcgcatctgaaacacgttctacaatatgtacacacacattttatatatacgggccctcctaatcgagggaactcattccccgacgtgcccctgctttcacggcataaccatcgcctcctcataaccataaatcccataaaatgtgtatgaaaatatttacaactaattatgcggccaggcggcaaaacactctccgccgcagatccattgaggtgccttgaactcgggctccgacttatggttttattttttttttttttcgttcatggcagccgatttcactttcttttcgcgctctctagggccgctaatcacaatgggattggataatactccaagtggccagctcccaagtacccaagttcccagttgcccagtcgccattgcagccttatcgcctcggattatgctggcccgcttatcagccctattttggcaatgtctttgataagattgccgcgccgccttggcttcctttcgactgatttgtatgtgcccgctgcgccgtagctcttggccaagtcagtccgcagcataagagatgttcccaagagatgtaaacagattgcaattgtactagtttccagttcacacagtgctgaccgagtttgtctgcaaccacaattcgctccacagggccctatgttcgaaggtagatccgaaaaaggttcaggtgggggggctgggaatctgatttgatccgccgagtgatagacgcacccaactcacgcagctccaaatcgaatttctaaggcaaacgctctgttatggccccgggttttatctcagcgactcaattcacaccctgaatgcgagaagattcaaagaattcggttgaaatggcaaataggaaagtggccattccctcgcattgtcgggaatttgttaatatcttgctcagcgaacgattttgctcccagatgaacaaaagatattttatggtattcaaacactttcgaaaaggaaaacatttctttatagctgagtttcatggtaatcgcggcttcgttattcatcaacagcaaaaattataaaatgctgaaataactcataagtaatatcattcttatccaagagtttcgttcaagtgcttcaagaatgttgttagttatttgtcataaaaatgattaataggcttgataaggttataaaatttattccaaactgatgttataaaaaactgaaagtgtgccaataaaatacgtttaatataataaactttccgataaactttcagacaaagcaaaatgattttttcccctctttgctaggaataaataattcattttaatttgaagtgaagttttttgctaaatacatcttagatagccttgcaatgaatttatttgttttaagatgtatttgagtaatgatggttcttaatctttctgattttgaatatgcaatttaaaaagcattatcatctcatttctttttctaaagagcccaaagcaatttgcacacttattttgttggcaatacaaatactatactatgtgatattatatatgaatattaaccagcaaattagcccagccctgggtactccactagtttccaaaggtgtttcactctcgttcaccttatgcaaattggtaacgaaaatagccggcagtgcacttcatgccgccgtacacaacagctatttcaaggccaattggtcgattgccgggtagccgccaagtgggaaaataatactaacacaaatagcaaatacagagggctaaagcaaaatattgctcttgggaattatgtggcagcgatctttggccagagtttcatcccagttgtgcgcaattagcactcgcacgcagtcagaaacgaataaaaaagactcatttgccagtaagccaggcggcagagttgaaacactcgaaaatccgagactcggatacaaattcgttttcgtttcgcttttatcagtgccagacattgttttactgtttgtcatggggtccaataacaggttgggggaaaaaattgtaataaactctttggtgggccagtttgcccagacagttactgtgtcaattatacaattttgggccaagctatgtgagccgccctctgactcagtaggagtatctgcagataatcttgaaagattacggcctgattatagccctataaatatttcaagaaacgacgggtttatgggatattcctgcttactcagcacattacaatcgaaatgaatagtaagggttacttatccatataaagctaactacactttgctaattaaactgccaagtctaaccgagtagcataaattgaactagatattcattgtgactcgaccgcccctgagcccctgagtaatcaaaaggcgaaaatcaaaggcgaaacggagagctgacctttcccggggcaatcgaatgcgtctggaatttacgagtggcatgcaggtccataaagtgcagctcttaattcaattagcccgtcgaagagcgacggaaaatgcaaatggaaatgggttggcaatgaaagtggtctatgtattcctatcagttgcgatcgcactgtgtacgtgctttggtcaactgatgggttttggcatggacaccagtgtcacatgggcttgatcgatctgatccggcggacaattaggtttgcaggcgagcgccagtccattttacttggacaaaccccgggtatttgagtgtgccatcgatctaattgatatttaagcaagtttagctctatcagcaatcagccggtatttgttttgggggccttacaatagacccatagacactggctgaccctggaatgctcactgccagtgccactgccaatgactggtattgcgtaattacgcatacgccgtgtgaaacgattgcaaactgtttgcttgcgaaagtgagttggcagaacgaagcgcttcgctttattattaactagattggcaagcgattgggatggtagaaatgaaaagtatttacaacagtataaaggtttttttttcccagtttattgataagtttctgaggaaagcctgaagtgaattacaaagtgttcgccggatgcactatcacattttaaataattgtcctgatccatgaatcatctcttttctttcagtggaacctaatcaatcattcacaaaaaatgcttatagtgcacatatagttcaagtttttagcagtaaatcgttaagggtctgcgataagatattattccgctactaacctcaagtcagtttcagctaatcaaacaaaattgctgcaattagccggaggtccattcgcttttcgtttttactcgaagccctcttctctttcacctcgaatgattatgcctgtgaatttgcatgattgaatgcgaatgatttaatttctgctctcccaaatgttttattaattggctttgtcttcttctctttcaccgttagagcgaacgacggaaacggaaagtaaaagccccgatcacgaccagattcaaaggcagacagacatggccgagacaatcaacaacaagccgagcatacagatccgcagcggactgccctcgcctctgccggacaagagtccctcgccggccaccaagctgctgatcagccacggcaagcccaacttcaccatcgccaagtcgccgaagatcgacgagaacggaaacggaaacccactgtccgcccagcccagcgccaacaacaactacaacgcctacaagagcgccaacagcagcgtggccaacagccagaagttcatagtgggcaccaagttcaatggggtcttcaagccatcgaatgccgcggccacttgggcaaccaatggaagcaccaatggcaatggcaccgcggagtcggagaacgaggtggccaaggtcgtgctgcgacgacccaaggtggcggactcacccccacccgccgagggcgaggacgagaacgtgccggagttcatcaggcgccagcgactcatccaggagcgtctggccaaggagaacgtgctggactttgagagccggcgcagcggctacttcacgcacgttatgatctcgccggactcgcccaatcgcacctcgttcgtggagaccatggccagtccggccattgtgcccgccctcgagattcccgctcccgtggccgagaaggtggaggaggaggagaaggtggaggtacagcctcaggtggccgctgtaaccacctctgccctgatcactaaacccgaaccagaggaccctgtaagcaatggacacagtgaggagccaaagaactctgacgtaggacccgaagaagtggccaaggccattgagcaagttaaccaggcagtggcaggagaggatgaggcggaggtggaagccacccctgagccagttccagaacctactccagagccagtggcagccgaacgaaaggcggaggccgtggtagaggagcccactcaagctcccgcagccgtggaagccaaggtggaggtggtggagccagctgctcccgtgcaaaatggccagaaggaggaggagaaggctgttcctgccaccaatggccttaaggaagaggaggctgctcctgccaccaatggtcataaggaggaggcggatgccattaccatttcgcacaccaacggacagagtagcgatggacccagcatacccactccggatcccagtggcgccctgggagtgaactacgaacccaagaccgtggtcagcttctcgcaggaattgggcagcggggagaacaagtatccggataccgtgaaggtggtcagcgaggtgcccgccgaatcgaatggcgagctcaaggagctgaccaagctgaagttcgacatccagagcgatgatcagaacgaggtccaggtgacgcccgtactgcgggcggaatagaagatcggcggatcaagatgagaagtagtgcaatttgtttgttaaacaagaaaccatcaactatattgtgttgtattttgtgttagctgctaagttgattacgagaaatgttgccaaatttaattttatgcttcgcgcatcagtcagtatcgagaatggagtcggagtcggagttggagctggagctggagagcctaatcccccatagagccacccatggaggcccggtccccaaagcgtcatttcgggactagctagaccaaactacgtgtattgcaatagacaccatttgctttatttaaataaattattaattaatattgaaaccgcgcgtctttcggctggaatattcctctcgcggtcactggatggtcttcgataagggtgctccaccacaagtgtgtgtatttactgtcacgtagagtaccttaacttgttccacaaagataacactatatttgtttgccccaggcgaacgaattgtcccatgggggaatgttgtcttagaactcgaagtgtcttaaatggcgcattgagttgcgtatcgctatatggaaatctagatctctagatctccagggctttgcccgccgaagtcagcctttgattcatggggaattactatgttctttgctggaatctaagatatgtttacaattagtcagagtaatgctcccataagtcggcacagatagcacccccgaaaatgctaagaccacgagctcagtcagtgagtttctagacgtggtgaatgaaaaccgaaagtgtttgccgatgtctagcattgaaccccgtgcggtgaccttcgcatcgatatgctccagtcgcaatcagttgttctccgtgattaattgttttgattccgctggtttgcccgtgtgccatagtcggtgattgattgggagacacgaataataataaaataataaacgagtggagtcggatgaagtggagtggagaggtgtggattgggaacggagtggtgaatcatgcagaggacgcgacacctgttccggcgatcgagggtgggtcaggtggttcaggtagctcaggtggttcaccactaaggtaaccatgtcaacttcgacccgcctgttttttccgggggttgcagtgctgaccaacatctggcctgctcctgaccctcgtggctagcacatgcgtttaatcgatatgaaagtggtggcggtttttcacgttggccaaaacaaactggagttagtccgtttcgaaaaccagtaggctatggcagggcattcagttcgaaaactatctaaatgagtgcttaattctaagctattatggatttatgtcttaagggct

SEQ ID NO: 1694 - DNA, 1826 bp, DROSOPHILA
ttttacggtaacgcagcggacagttagcctccaattataggtgcgtccatatctcccgacattccagcttagcgaacgacggaaacggaaagtaaaagccccgatcacgaccagattcaaaggcagacagacatggccgagacaatcaacaacaagccgagcatacagatccgcagcggactgccctcgcctctgccggacaagagtccctcgccggccaccaagctgctgatcagccacggcaagcccaacttcaccatcgccaagtcgccgaagatcgacgagaacggaaacggaaacccactgtccgcccagcccagcgccaacaacaactacaacgcctacaagagcgccaacagcagcgtggccaacagccagaagttcatagtgggcaccaagttcaatggggtcttcaagccatcgaatgccgcggccacttgggcaaccaatggaagcaccaatggcaatggcaccgcggagtcggagaacgaggtggccaaggtcgtgctgcgacgacccaaggtggcggactcacccccacccgccgagggcgaggacgagaacgtgccggagttcatcaggcgccagcgactcatccaggagcgtctggccaaggagaacgtgctggactttgagagccggcgcagcggctacttcacgcacgttatgatctcgccggactcgcccaatcgcacctcgttcgtggagaccatggccagtccggccattgtgcccgccctcgagattcccgctcccgtggccgagaaggtggaggaggaggagaaggtggaggtacagcctcaggtggccgctgtaaccacctctgccctgatcactaaacccgaaccagaggaccctgtaagcaatggacacagtgaggagccaaagaactctgacgtaggacccgaagaagtggccaaggccattgagcaagttaaccaggcagtggcaggagaggatgaggcggaggtggaagccacccctgagccagttccagaacctactccagagccagtggcagccgaacgaaaggcggaggccgtggtagaggagcccactcaagctcccgcagccgtggaagccaaggtggaggtggtggagccagctgctcccgtgcaaaatggccagaaggaggaggagaaggctgttcctgccaccaatggccttaaggaagaggaggctgctcctgccaccaatggtcataaggaggaggcggatgccattaccatttcgcacaccaacggacagagtagcgatggacccagcatacccactccggatcccagtggcgccctgggagtgaactacgaacccaagaccgtggtcagcttctcgcaggaattgggcagcggggagaacaagtatccggataccgtgaaggtggtcagcgaggtgcccgccgaatcgaatggcgagctcaaggagctgaccaagctgaagttcgacatccagagcgatgatcagaacgaggtccaggtgacgcccgtactgcgggcggaatagaagatcggcggatcaagatgagaagtagtgcaatttgtttgttaaacaagaaaccatcaactatattgtgttgtattttgtgttagctgctaagttgattacgagaaatgttgccaaatttaattttatgcttcgcgcatcagtcagtatcgagaatggagtcggagtcggagttggagctggagctggagagcctaatcccccatagagccacccatggaggcccggtccccaaagcgtcatttcgggactagctagaccaaactacgtgtattgcaatagacaccatttgctttatttaaataaattattaattaatattg

SEQ ID NO: 1695 - protein, 456 aa, DROSOPHILA
MAETINNKPSIQIRSGLPSPLPDKSPSPATKLLISHGKPNFTIAKSPKIDENGNGNPLSAQPSANNNYNAYKSANSSVANSQKFIVGTKFNGVFKPSNAAATWATNGSTNGNGTAESENEVAKVVLRRPKVADSPPPAEGEDENVPEFIRRQRLIQERLAKENVLDFESRRSGYFTHVMISPDSPNRTSFVETMASPAIVPALEIPAPVAEKVEEEEKVEVQPQVAAVTTSALITKPEPEDPVSNGHSEEPKNSDVGPEEVAKAIEQVNQAVAGEDEAEVEATPEPVPEPTPEPVAAERKAEAVVEEPTQAPAAVEAKVEVVEPAAPVQNGQKEEEKAVPATNGLKEEEAAPATNGHKEEADAITISHTNGQSSDGPSIPTPDPSGALGVNYEPKTVVSFSQELGSGENKYPDTVKVVSEVPAESNGELKELTKLKFDIQSDDQNEVQVTPVLRAE

SEQ ID NO: 1696 - DNA, 3643 bp, DROSOPHILA
attgtgtttccctaataggagagcagaccatgccattgttgaatggcattttcgaaactcaagttacttgttactcgaattgcacaatttccaagataattctcatcggtctggcttgttattattgagtgagatagaataacaatatttgcttatttagttgaatattctaggaacaataattacaatacaatacaatacaataaatttatgcacatgccaaccaattctctggtaataatcatgcttactaatcgcaacgacaactgactacgtacgtttggcaaaggccacatcgattccccaaccgcttttccatccgcttttccacccgccttttccgcccacgcattttccgcccgctttaaccaaccactcgcctgatgatggctggcatattgtgtgcatttgccgacaagttttgccatcaaaaactcccaaaagtatccaatagtttatgcacacaaacttgcccaggaaaatgggggaaagtgggcggatagtgtatgtgtgtgtgtgtgtgtgtgtgtggctggggtccggttatgttattcaaaggcgcgactttcccttgattgcgttacttgttcattatgattccctgtcattggtatgatgatgaagttgatgccccagcctcgcgtttttcattttcatttcgcaatacccactactatccctcattgctcgcgatttcccacactttccatgcacatctcccacgcaagtcaaagtcgaggaaaagcatttcgccggctaatccacttaattagtgtttgtggaatattttccaatataaaatgcatgcaatgaatgcggaggaaaaaaaaaaaattacgcagaataaatgaaattgcaagaaacaaaaaaaaaaaacaacgatggagtggatggagggagcaggaaaatgcgggaaaagcagcgatgggaagtgagttttaaaatgcgaaaagccagttgcggggggtcagttaagcgcggaaaatgcttcgctaagccatcaaatagctttattatataaacgtataatctgcggaaagcaaactttgcgctcttcctcgccattttcattaggtaatcgaaactgtttaagtagtattctaaaagaattgattggaaaacacgtttgcgcagtttcatccaagcattaataaagtctttaatgtatagaaacagtatatcttttgttaattttgtggagtgcagtttacatttcataattacaatttattttgttcaatggttaatttaacatttcgtttgaattgttcaatgtaaattgttaagaggctttaaagttattccaagatggtcttaactttggtatttacgtacacataataaatttcaactgacaatttgagcaaacgaaaccgacggagatatattttaattactcgataaatcgattgctccaatggcaattgttcgttcgatggatttcaattgcactcgattggcgcattctctcgaattaagttaagttataagcgagctgaacactgggattatgtcgtgtacgggccaattacagcttaatcttcattccattccagtccgactgcatattgtaagcagaaaacaccatgggaaaccgtggcaaacccaggaaaacccaggaaaaaccaatgaaaaacaacaatactgctattgcatggacattcggtagaaaactacgctcttcttctgtaacaacttttttttttcctttgcgcgtttcttatttttttgcccagagaatcaacttcaagagggtatatagatttttcgaagctaacaagtttgtaattctatgattagaaaaccgcaggctaggaaagttaatacaccaaaatttgctctgcatttagccaaacaaaatctcaactagaactaaaaactgccttttttatgctaccctagcatcataataagaaaagggtatcattcgttcagcatttttgcttgcgccccgagaattgctcagtttttcgctctttaaatattaaatcaatggatttcgcagtcgtgccttggcatggatttcaggttgggtcaggacaatggatgggcgatggaggtcaagtggggtggcgttgggcgattgaagatgggaggtggaagatgggcgttgggcgatgggcggtggtctgttggatgcagtgcagctggtagctggtagctgttaattaccacggcaatggggcgagcgtttaatgcaatgccattcggtacgtgccgcgcataaagtggatgcttggcaattaattgacccaaagccaccgaaccgaatatccccggcaaataggaacttaaatcgagctgaaactcacttgaaggtgtcgcggctaaagttcttgaatatattgcattcgggatgttccagcaggcggaacgctatcgaacaatggtgattctccagcggtgagatgtcattatatctgcaaatgatatcgcatacagtatgtatatatagtatgtatatttgcaaattcgaaacggatttacccacctgagtgccagctcggtgcgggcattgatctggtagatattattgtagccaggatggtcgaggtcgtggcaaatgcaggacaccaacaggatcagacactctaggtcgcccaggcgactcagcaagttcgcctggcgcgttatggcatacatctgaaaaaataattaaattaaatggtaattatatatatagcattaatggagacctttagataatgttatgatttaatatatatatcatttttattcttttacccttgtatctctaatttttgcataaactttgattcatggagtaagaagtaaaagtaaagctttttaatttttttacaaccccaactttttgtggccactaaaaagttgccatacttaatagcctcattattcccctgccaggttaattatacagctttcggtttgccccccttggatttgtaagcagtatccagttttctatccctcagaaggatgcatcgcatcatctggccctcgagcatcatcgatctaaccatttatcttgatgcgggcaattagtcttggcaatttaacatttaaacttatccgttcgaggttagacagttaaggcggcttttaaagctgccctgcatttccccatttttccacctatttaatccgatccaccgtctataacctttatcgcttggtcctgtcgcacctcgaactctttcgccctgccttgtgccaacttaatttgtctgctgcgaaacccttgcaattactagtggatggatctaccccaacacgaggcaccactctcttgccacactcaactcccttttttttataccctgtatgcttgtaaagcggaaaggcgtattgaatttgcgaaagattttaaaaaaaagcaaatacctactactaaaatgggatctgcaagtgtgcaacaatatcgtttgttcaccgatgacaccgagatgcatatcgattttctttacaaccctgtacttatagatactttttgaacaggttatagatagttcttgtctttttagattttggccttcatgtggataatataaagtacttttcttctaattgatagggtaactcgcagtcgcatccatgcattctacaaatccctatccttttggagctgcaaactcgttggctgcaaatgaagatgactgggcga

SEQ ID NO: 1697 - DNA, 360 bp, DROSOPHILA
atgtatgccataacgcgccaggcgaacttgctgagtcgcctgggcgacctagagtgtctgatcctgttggtgtcctgcatttgccacgacctcgaccatcctggctacaataatatctaccagatcaatgcccgcaccgagctggcactcagatataatgacatctcaccgctggagaatcaccattgttcgatagcgttccgcctgctggaacatcccgaatgcaatatattcaagaactttagccgcgacaccttcaaaatactacttaaacagtttcgattacctaatgaaaatggcgaggaagagcgcaaagtttgctttccgcagattatacgtttatataataaagctatttga

SEQ ID NO: 1698 - protein, 119 aa, DROSOPHILA
MYAITRQANLLSRLGDLECLILLVSCICHDLDHPGYNNIYQINARTELALRYNDISPLENHHCSIAFRLLEHPECNIFKNFSRDTFKILLKQFRLPNENGEEERKVCFPQIIRLYNKAI

SEQ ID NO: 1699 - DNA, 20510 bp, DROSOPHILA
gttacaaaaaatgcaaaaattcatcgaaaaattaatttttcaaagtccttccaaaagtgatagcgatggttagtattggtaattaggagcacaaaactgttattcttttggctgtgtgaccatttttagtcaagttataccctaaaaaccctacttaaatattccattttggccaaaattcgttttcctgattttttgtaaagaaaatatttggtattttgatcataacattggaaataataacccaaataccgaatgtcatacctcgttgagtttgttttttaaattccaatcgatttggattcaagtttgggaattctaggatttttcaatttttcgcaaattttgatgatgttaccccttacaaaaaatgagaaaatttggcccaaaattaattttacaaaatccgccaaaaagtgatagggatggttagtattagtaattgggagtaaaaaacggtaattattttagttgtgtgaccattttcggccaagttatgctgaaaaaacgcattatacgcagtatattgaagttttgatttttcacatgaaaagaagtgatcctttctagcgaagttatagtgaaatagtagatcgttaaaaacattctattttttttcatatattttaatcattaagaatctaaccagattgtattgcgtgcttctgaaagtgagaattgaacattattgttgaacaaagtcgcgcgaacaaagaagagtttcggatgagacatctggtagtcattaggcgaacacttttctcattgaaatcaagttaagtaaatcgcattactcacgtcactttttccactctttccactttctttgcagacatgagacgtgccatattaaaagcgtataccgcccacaccacccaacagccataacgccatttcgttcgcactcacacgctcgtcgcgacgcgattttcgcaattttcacaattgaaaagtgtaaagttctagacaccattatcagcgttgtcataatctcatttttgcagtgcaacagcagaaagtaataaaagctcggctcgcatgcaattttcattagtgggaaaattgtttgatatttaagaggcaaccgaggaataaacggaatcaacagcagcagacacacacacacacattccaagccaaattaataatagaaaagaaaaacaaaaaaaaaaaaacagcaaccagaaaaccaataaaagtttaaaccaaaacgaaacacactcgagggggcgagcggagagccaaacgaccaaaatgtggcggcagtcaacgatactggccgcgttactagtggctcttttgtgtgcgggcagtgcagaaagcaaaggtaagcgatcaaaatcagtatatatatttaaaaaaaaaatctataattaattgataacccacttgggcttcaatcgtatctatattaagtgcaatttatggaactgctcgatcatagatcacttgaagatttcaaccaaaacctaatgcctcgtattccccaagcgtgttttcaaaaattagtcactgctataaatacgccaagcatttaatgggttggggaaatcttcaatttatgcgatcaattagtagactaaaaccaccaaccaatgctcatcgatcttgccattcctttccccttcacgaattctttcaggcaatcgcccaccaagaatcaccaaacaaccggcacccggagaattgctcttcaaagtggcgcaacagaataaggaaagtgacaatccattcataatcgagtgcgaagccgatggacaacccgagccagagtaagtcaactgaagatttggagcatcatccaaatcgaatagcaaaggcacgagaagaagagcagagatcttgggggaattagaacatttagtttggatctattttatatcagctcgttgtctatatatatatatatatatgtttatgtactctgctcatcatgatgccctctattttaattcacataaatcaaatttaagcagtcgcgtctacaaagtttcacaaatcagagaaagagtgcgtgtaagaaatcgcattttattgtttatttcatttcagccttgttgttctagacgggttgttttttacgaaatatttcgcgtcgtcacgagtatttttaactcatttgagaaactcgcatataaatggaaaataaaacatagtttatgctatacggtgctgtgctatgatttagctagaattttaatcgattttttcgtttacgaaaaatgggctaaaaaaataacattcaaatatacaatcttctgctcaaattgcactttaaagggtattaaatacttcgtatatcaaacacatggctttgttcttgtgactgcgctatttgtgtcgccgaaatgtccaaaaatacatctttctaaatgtgtttagaagttttttagaatattgggggctcccctctcattttacttgttattttattttcgtcatgatgcaggtcgcattgaggaagtgaagtgattttcgttactctgcgtaatacacatagacctgcttcataaatttcgatttgaacctgtttacgaaacacgtttcgtttcgattttgttattcatatacacagcttagatcacatttttattagtagaacatgtacttgggtgggtgaccattgcagtggaattgagtcattcccttttggaaaatgcggaatttgaagttaacatttttgtgcacaaagggcaaacagtggctggtgacgatgatgatgatgactacatgatgatggcatgacctcattgcccgataactgtgtgggtgggtggtggtggtggtgtggtcaaagacattgtgaaattccatagtgtctggaaaatagaactgtggtgtaaaatagtttggtcctcattctcattttgcacttcaaaatttcttaatatagtaatattaccataaacaggcaaaaaaaaaaaaatgttcaaagcagtgttttacgaagctacatgcatattgcattaaatacagaggctattggctataagaaaaaattacgacatagaaaaaattcagcttcaacatttcgctcttaaaatctaattgcaaataaagttattttgctaaattaaaaatttgcggatttggtagcttattagttgatatttactgtattgcaataaaaaattggcaacaagtgctagcagcgcagcagcagcgcagtcgacgttggcagaatagcaacagatggccgaatgccagacagacacacacacacacagataggaaaaaaaaacacacacacacacacaagtgcagaacgtgagaaatgtgcgagaatactaagaataaaaagcaagaagaagcataaggaatgggaaaattgtgtgttgtttatttttacacgtacgaaactaaaatgggttaatagtgggaaatgtgtgcgcttttcctttggccctctctctctcccccctcccactctctctctctctgtctctctctctacccatatatcacgatcactatcccgctctgtcacagcaagtggttcaggtacagtgttagaaaataataaaaaaaaatatcagattcaaaaagcggtaatatcacagaaaaccagtttgaccggatggccaagcacgttgagaatattaaccaaaacgaaatggaaacaaattgttgaagagaaaaagaaaaaaaaaagaaatttactcaactgtgccggctaggcattacgtaatttcaccggacaatttttaacagttttttcatagaattttaaggaaattggttagtgtcccatagatttccacttcggacgccatctacaggcgaaaattgttactatatttagttgccagttataacatctagttttaatgcttagttattaaatggatagttgggaaaactagctatttaactaaaatcgattaaaaaatgccacaaagatttcgatttaataattcgaaagtctattgcgaaagatatttattacaatgcaaacagcgtgggcataaaacggaaattgctgtccaattttcatattttatcttaggcatgtaataagctgaaattactagcattttttctttccatttttaattcataataattttgttatgctagctggtttgtgttggtttcaatgcacagagaaaaagttggcatttggatttgcttgttaacttaacaaagaaatccttggatattttaatagaaataactatgatattttagagaatatattttattttactagctatttgcgtaataccattgaattttatttaaagtgtataaaatccaaattcaggccgcataaattatattcatattagacgttttttttcccctgtttgcattacatcagacgtgcgcccgattttctattacttttttttcgtatctgagcttttttttttgtatgtgtgctgcattctatctatatatccacatctatatctatctatacgcctccgtgattcagcatgacacacttttattgttgtcattggccgtctgatgtctgatgtcgcattttctgcgttttatgtcgctactttgctgctgtgaaaatgtgactattgctattgcagtggcaaatgcataacgtggatatttttagaaattacaataatttaatgaaacaatgattgaggcaacaaacgaacaaaacccatatatgaccgaactacgatcgattaaagacagggttacagttttgattcatgtttatattcagttacagtttcataaatactttggtttttttctttcccgttaatgtttatattcgacagaattccatttctctatttctactcaataaaaatgagtcagaattttgccaggcatatttcaattgattgtattaaataatatgtataggttgcaaacacatctgcacactttggaagaatctgacgcatcgaaagatgattaatccatgtgaattgaaaaccaaaaaaaaaaaaaactgaagtcaagaaacgtgttttctaatcatttatcatttcattagtgttacaaagttttccctaagggaaataatatacgattatccgcgtattactttcccttttttctttgactttttcttgcctctttcaaatgaaactatttccatatggtttgtgcctcgccttttcttcttctcgtttctggcagtctggggttaagcagttcaattgaatcgggttaaagctcagttatttaaacctctcgattcccctttgtcaacagtttaaacttgtaaaaagtgtaaaaagcattctttaaactgcccttgaatttgtagggttttaggcttggcagtataggacaaagaaaaaaaacttacgccgtttggttttgaaaagttgtttgcttaaactttgaagaaaaactagtttcgtcagttttttttttttttcattatgtttatgcatgtgtgggagccatggcagtcatattaactttaaggcacacaaatactttgcttttcttttcttttgatgctttgaaaaatgccacgaaactgaagcagagcttttcgattgtcatggaaaatgcttgtttatataataaaaaaaactccatactaatctatttagttcattccctactcacaaagcttcagcttaaagcagccaattagaatattatcgcttatcctttcgtacccagaatatattccacatacgcagtgtatgccagctgctggaagataaatacgagtagagataaaaatatggagaaatgagtggagtttgaaggctcattgatttttcacaccacgctgcacaaagtccttcaaaagctgtcgctactagttcatgtccttgaatgttattttccttcattcctccacttggcccaccctctctcatttcccgacttcccctcgttaattttgttattttagcttcatgtttccctaatgattttgtctcgtcagcttggcgccagcttggccgcgaccacccccaaaaaaattcaaaatcaagggaaaaaaaaaagggaaaacaaaatgttgggaaaaactgcaactgaacaattcggttcttaagtagtccgattaaaatccggaaattgcaaccccaaagtgatggagtcatcaaatgacttggtgaaagattgagtacggtgaaacctagctaagaggaacgcaaactttgctgggcatacaatattatttaaatatacgcaccgatgttgtttaaagcatgatgcatttcttaaaagcatggtcacactgctcgtgttctgaaaagcaactctgtccttgaatggcttagcatagccaaagtcgactgtacttcctttttggtctttctcgtctcccttacagagcatgattcatgcgtatcaatcaaactttttggtcaaaagggcgaaaagtgggagaggggtgaaaggttatagtgagcggtgggagtcaactgatgacgacacgtccccattgttgttgtctcttgccatttttgtcatttattcggcttctttggctcattcttccgacttattttggctattgcgcatatgaagaattaacgaacaattgtggaaagggagtgaaaatcgaagggaatcttagcatatttaatgcagccaaattgaagaaaatcgatgaactgcgacagcggcagaaataagacataacgagtaataagagtagggcttcctatatcatttgtgttttatagctttggagggtggaaagtaaatggagatattacttatttacttaccgaaccgaaagtgactcattgttcgagggtaataaatgatgtacttagaagattgattattaaatcctacgaaagctcttaattgtattacaaaagtgaagacaagaaaccatgaagaacgtttgagttgcagcaacttcaacttcatgaaagtacttatgcacttaaataacccaaaagatctcgggatctgctccatttctccatttattatgcagttgaaattctccgcacgatgaaataaatcataaaggtctgcactcagatctctggctcaagattaaagtgagaaaaaaaccaacctgtgctcataatccgaaacccgaaaaactgaaaaaaaaaaaatttgagaactttgtgttgtagcttttcccaaagttttctcacgttgcgtagtgcatgcattcacgatcgtgattcctcgatttcccaaccatacttctcggctaactttcttctttcgccgacgacttcgtctaacggtggctcgagcactcatttaacccttttacggttttatatgttacagtggagcccaagatgggggcacaagaaacattacgcacataacaattaccaacggaatgaaatgagtggttttgtgcgtttctttcgcctgctactcgttcaagtttcgtgactttaatgacgttgcataacgttgagaatttaaatatagctaaacccaaaaatgatatcaacatatttttagaccccgacgacttccggtccaggtgtgtccaccacaggtgttctctgcggcccatcaactgtggccggttttgttttcattttgcacaggaattccttccgttcttcaagtcaccaaatgtttatgtttgtttgattcgactgtcaagaacagaagcatcatctacagcggtatctaaacaaatgtcacactgcaagaaatgaatgtaacattttgcatataatttctaatttagataatgtgtcttttgtgttcaatagaaattgaaatagaatagaagcaaagtactcgaaaattgtatacttttgatttacaatggtttgtaattttaatttgtagatgcatccgcaatcgctcagtgtatatttccttcgccatcgatttatgtgcaagcgggatggcaaacgttaatttgggggatgccccttgggcggaacacgttgttgctatcgaaattgaaggctaatatggtagttaactggccaacatgcatacacatatgctgcgcaaaaaggccaacaaattgagccagtattgggtacacacataaaatgctaagttatccataatattttggaatgattgaaatggaatgcaagttacttgttcttcatattctaattaaacaattagattatttttttttgttttttgcaaaagcaaagcccaaaaacctctgcgcactcaacttgccactggggcaacttctcccttgagccctaaactcctaagccttttcctaaattcccacacaatccgcatcatcgtcatcatcttttatagcttgtaaaaccgaaaaacggctttttaaatatgtacaacacacagacaatatttgcaactcgttagacgtctactcaaaccctcattcccttgcttgatgctgcggcatcctgttgcaacataaagcggaaaaaaaaagttcaacttcaggagaaaggaactccattcattcgattcaagtgcgtgggtgtgtgagtgtgtgagtgtattggaatgcgggtgcaacccttcagaggaattccccttttccatttcccccagcacagtggaatcaatatattagatgtttagaaatcatttgaattgtcttaagcattggctgcttataacaaacaaaatcattctaaaattggaaagaaacaacttaatttaggttctagttatatttttttttatctagtatttgtctaattattccacagtacctggagctcggagtctcatgttgtttttcatgtcagatgttaagtacaaacttcggtgtgccgccattcctctttacattgcccccttaggtggctgcgttttcattcaattcactcagtggagttatgcctggctggatgagtcatcgtcctggcccccttttcccattccccccagttctggccatcaagttacccccccccccctccatttcgtgcccctctcgctgaaaccggcacgtggcaactcctttgctgtttgttttagctaaaagcgtttgttgctcccgtctaatcctttcccatctggtttttgcctccctttgcgcttctctcattcgcttcgcaaatcaatagattattcactcagcgaatataatcatatgatatatataactttaaatatgttgctagttcaaactctatggaatttgatttttgttatgtgtgcatatctaaccattaactgctcacataccaaaattcatgacgattaaaggttgttatccattaaaaatttctttctctgcacatctgagctcttaatatgctataattgcaattgaaaacgcattgaaagaaacatcataactgacatttgacattgttgatatgatgagtcaaatcaaaagccactagacaaatgcgaggaagccatatccatatataaatatatatatatatttagtgcatatatgtaatcgggtagtccacttgaacttgagcaacctcgatgaaagaaaagagaactgaaaaattacaaccgatcgccacaagctaatttcgtcggactctcggtgacttgatgattgcccaaatgttccggtgattcagacgtttccccaaatgctccaacgttcatcttcaatgctactgctgcgtgtctgttgtaattttactttatttcacttgatgttgtcattttcggcagatggacgaacagattgggcaaccaacagaagggcacgacaatgtcaattgttctttttttttttttttttttcttacgcttttctttttttttttgctcgatcagaaagcacaagaaaagcacaataatcacgaaaacttggcgcttacacgattgcaaaatgtatgaaacttattttgtatgctctacttaagttggtagtagcactagcagcattacaagattacaatgatgctaaagaatttgagttttttttaacaaataatggttaagagtactgactgttctacttacgaatatatgcatatatgtgtgtaatttgttcgtggaattacccaatttgtcacacaaaagcggaatgatttggttaactttattaggctgaccagctgagggtgggacaggaccctcgagatttttcagttagtagtgttaccttaccatttttttttttttttttttttgtattttgcgttccctcgggtcgttgtcacacctaatttttgtagtcgctcgctcttttggggccattcatcaactgttgccatgccagaggtcgctggtcgggtgtcacctgctcctgcaaggacctttcccccctcccccccccttcctcttccttctgcattttgctgctgctcccttttttgggctctccatcgaactataaaaaaaaacattgttgtttgcatgtttgttggccattaatgagcgctgtttcccccatttcattcggcccaatgtccaatgtcctattttcgtgcttcgtattgttgttatagtatagtgtagttgataccttggagacgcttccgttttccccacttccgctatgcgatatcccgcctttttttattattacgaaatacaggcaatgcagcacattatgtcgcttttctttggaagtaattcatagcaagcacagaacagcagaaaagttgtttgttcaagttgttgaagctccactgtagtgctattcggtgtcattgctcgtttgacatgcgaaaaatgtcaacaaaactgacgaagatgaggcaaacacgcccagtttcttgcgaatttcaattccatttcctcttcagctggattttccgatgttgtattagccaaaagagctttctgctgttttacagcagcccaagctcaaaaatggactgcggtccaacccttggcggcattttctcaatttccaccccctcttaaaaaaaaaaaaataaaaataaaatacaagaatacaacaaatggagccacaggccatttaaagttttttgtccgaatgccaaaattcacgaaatgaattcgaaaagaattaatgtaccctaaagtctcacgggaaggtgaaaaacgtgactaatttgggcaatgaataatacaagaaacgagctaattaatttaaatgttctaggatgagtcattaaatggtataaattaaataaagtcagcagttgtatgtgtaagtgaaaacatgtaatataataattacaaattatatatacaaaaattaattgttatcttaatggataatggaataattgttaatgaaatcaatatttattaaatcaatatttttggatggctaataaaaaatgcctcaacttttccacctgttgacagtaataatttgcggctgagtgcaggatgcggcattctaagacctaatacacattttgctccttttgtttaacttcggtctgagaaacacacccaccacgccccctctccgcccgcctctcagtccactgtctcgccgtctacttcccaacttcccacttttccacctctcgaccgcctcccttcttcctttgatggtggaaatttgcctttggctaaaagcggttttggcctggctccttttcttttacttccagccctggcagagtagccacaattgcggtcacattaatagagcccgatgcagaaaagtgcttaaacagatgggatcttctttgaattatatatttattttgtttttatgagtttcatctatgtagacatagttatttattgcattgtgcatagcaacttcgaaaaatactaattgaatgcttgtatttgtatgtctgtttatggatatgtatctaggcttatgtatgtatgtctgtatatatgtattgtatataactgggttacatacgtatgtatatctgcccttactgtgaccacttccctgtttattttttgtcagtgagcgcgcaaaaaagtatgctacggcattttgttattttgcaaccccaaaaagtaatgcacaaatggagcccaaccgccaaaccccctcagctctcacacacacacccccaaccacacttatgcaaagcagcttgtgtgtgtgtgtgcttgtgtgtgtgttttgtttgtgtgttttagccgggctgatgagtcatcagcagccatatcctggcacttcttggcgcattctccatacagatttctatcgccatgaatggctggcaaatggaaatgcaaaggggaaaggaaaagccagctgaaggaaaatccactgagaggggcctgacttcgcttggcttgcactggcggcggaaaaagggggcgggcaagttaagtgaagccaagtcaaccctaaaactatcagcgcactttggggttaagtggtgtcgagctacgaaatgaagctcaaatacatataccccctagtctgctgtgtaaagattttttaaagaaagtttacaagataatggtttacttttaactttctttacgactgttttctttttgaaaacattcagttacttagcttactgttgtgcgcgcagttgagcataccctaacatgtatacgataccctctagaaaacaagtcataagaatataaatgtacaaatcgttcaacttgcaaatgggtgaattcctgccgtcgtgggcgttgggagggggcgtgtccagcagctgttgtctggccatttagctgttgtctttggcaaccgtttcaggtgaccgcctcgccgttggcagaacgctaaagcggtaaaggtatagccagccaaagttttgatggtgtcgagcgatggcgacagacgttgtgctttaccgattgactgccccttttctttctttttgccaccattggtatccttgcctgggttacctgccacttggcagaaacaatttattgacccgccgaccagtttgtttggggcgcatagtttggtttagtgtttgccgtttgtcggggttgaactacgcttaatgtgtcattgccaacggttttcagactgttttcaccatcagggggttaagtttctatactttgatccacgtggcctgatggcaatatcctggcatttcgctgtctcattgcttgacttttgaaaccacgcgacgagggttcacaaattcacttttcattgacacaaattaacactttgggctaaattcaattaacatttgaaaagtatgtgaaaagtaattgtagttgaaactataaaagtgttaactagaatatctaattggagtacgcggcaccaattaaattgtaacttcttaatctgcatactaccagcacgactcataaaatcagttgagtcacttgaatgactgcagttcaacaaactgaccgatccccccctcgccgatgcaaatgccccagagttctctacacagttcaacttacaacacttaaaaacaattcaaatgattgacctattgcatgacccgtcgtcaagaccgaacccaaaaagatcccagatgaaaagagctgaaaaaaaagaccagctcaagtatggcaaaaaaaaaaaaaaaaaatgaaataaataaaaagaaaatgcttaacaagctcaagcagcgcggcttgttcacataattgactcgagcttttcagtttcatatacatatttatatatatatataacaagtctacaactattcacaattgcggtgaaaataatagtgggattatagaatattttatatatttttatatggttagtaactgcttatagtttctatcaattgattcaagtttaaagtgccaagtgctatgtattttatccttaaataaaaaaatatatataaatgtctggcatagttacagttacaagaaaaatgattcaagaaaaatacaagatgatgcacaaacttatatgaattaaaccagcaaaaactgggctcagctcgttgacttccttttttttttttgcggcttaattgcaattacttgagacatgaaacaagcaaaaataaaaaagaggaaaaaaaaaccccctcatccccacgcacacttcaatcaacatttttcgcaattggaaattaagcaagttgtcataatttgtgcataaaaagtgtcttaattttcttcttagcgcgccgcctaagagaaatgttgattaagctaaattaaatgtggtaattaacttgttagagagtctcgatcttaatgagtcagtcgattggcaagtgaggaaatgcggaaaactgcgtccaaattgttgttgaaataaccaattagagatgcaattcaaagtgccgaggcaaaaaagaaatataacaaataatattaaatagttagtgtggcagatatgtattaatttaggcaaactattatgtgtattagtattctattggtattcattatcgactgacaccccccactatttctacttttaacccacagatatagttggatcaagaacggcaagaagttcgattggcaggcgtacgataaccgcatgctgcggcagccaggacgtggcaccctggtgatcaccatacccaaggacgaggatcgcggccactatcagtgctttgcgtccaatgaattcggaacggccacctcgaactcagtatatgtgcgtaaggccgagctgaatgccttcaaggatgaggcggccaagacactggaggccgtcgagggtgagccctttatgctgaaatgtgccgcacccgatggttttcccagtccgacagtcaactggatgatccaggagtccatcgatggcagcatcaagtcgatcaacaactctcgcatgaccctcgatcctgagggtaatctctggttctcgaatgttacccgtgaggatgccagctccgatttctactatgcctgctcggccacctcggtgtttcgcagtgaatacaagattggcaacaaggtgctcctcgatgtcaaacagatgggcgttagtgcctcgcagaacaagcatccgcccgtgcgtcaatatgtttcccgtcgccagtccttggcgttgcgtggcaagcgaatggaactgttttgcatctacggtggaacaccgctgccgcagaccgtgtggagcaaggatggccagcgtatacagtggagcgatcgaataacgcaaggacactatggcaaatcactggtcattcggcagacaaatttcgatgatgccggcacatacacctgcgacgtgtccaacggtgtgggcaatgcccaatccttctccatcattctgaatgttaactccgtgccgtactttaccaaagaacctgaaatcgccaccgccgccgaagacgaagaggttgtcttcgagtgtcgcgctgctggtgtaccagagcccaagatcagttggattcacaatggtaagcccatcgagcagagcaccccgaatccccgacgaacggttacggacaacacaattcgcattatcaatctggttaagggcgatactggtaactacggttgcaacgccaccaattcgctgggatatgtgtataaggatgtctatctaaatgtccaggctgagccgccaacgatttccgaagctccagcagctgtatccactgtcgatggaaggaatgtgaccattaagtgcagggttaacggttcccccaagcctctggttaaatggctaagggccagcaactggctgaccggaggtcgttacaatgtccaagctaacggtgacctggagatccaagatgtgacattctcggatgccggcaaatacacatgctatgcgcagaacaagtttggtgaaattcaagccgatggttcgctggtggtcaaggagcatacgagaattacccaagagccgcaaaactacgaggtggccgccggacaatcggccacgttccgctgtaacgaggcccacgacgatacgctggagattgagatcgattggtggaaggatggccagtccattgactttgaggcccagccgcgattcgtgaagaccaatgataattccctgacgattgccaagacaatggagttggattctggcgaatatacgtgcgtggcccggacgcgtttggatgaggcaacggccagggcgaatttgattgtccaggatgtgccgaatgcaccaaaactgaccggcatcacctgccaggccgacaaggccgagatccactgggaacagcagggtgacaatcgttcgcccattctgcactacaccattcagttcaatacatcgttcacgcccgcctcctgggatgccgcctacgagaaggtgcccaacacggactcctcgttcgtcgtccagatgtcaccgtgggccaactatacgttccgtgtgattgccttcaacaagatcggagcctcgccgccgtcggcgcacagcgatagctgcaccacccagccggatgtgcccttcaagaatcccgacaatgtcgttggccagggcactgagcccaacaatctggtcatctcgtggactcccatgcccgaaatcgagcacaatgcccccaatttccattattatgttagctggaaacgcgatattcctgccgctgcgtgggaaaacaataacatattcgactggcgacagaacaacattgtgattgccgatcaaccgactttcgtgaaatacctgatcaaggtggtggccatcaacgataggggtgagtccaatgtggccgccgaggaggtggttggctactctggcgaagatcgtcccctggatgcgcccaccaacttcacaatgaggcaaatcacatcatcgaccagtggctacatggcctggacgccggtaagtgaggaatcggtgcgcggacacttcaagggctacaaaatccaaacgtggacggagaacgagggcgaggagggtctgcgggagatccatgtgaagggtgatacccacaacgctctggtcacacaattcaagcccgattcaaagaactatgcccgcattttggcttacaatggacgcttcaatggcccacccagtgccgtcatcgacttcgatactccggagggtgtaccatcgccggttcagggactggatgcctatcctctgggctcctcggccttcatgctccactggaagaagccgctgtatcccaatggcaagctcactggctacaagatctactacgaggaggttaaggagagctatgtgggcgagcgacgcgaatacgatccacacatcaccgatcccagggtcacacgcatgaagatggccggcctgaagcccaactccaagtaccgcatctccatcactgccaccacgaaaatgggcgagggatctgagtaagtatattttgtactccataagtatttctgtctgtatttaactaactaattgttcgtcctgctttctatagacactatatcgaaaagaccacgctcaaggatgccgtcaatgtggcccctgccacgccatctttctcctgggagcaactgccatccgacaatggactagccaagttccgcatcaactggctgccaagtaccgagggtcatccaggcactcacttctttacgatgcacaggtatgatcaaaatacacatatatgtatattcgactgacagcaagtgataattgaatatatttccatgtacaggatcaagggcgaaacccaatggatacgcgagaatgaggaaaagaactccgattaccaggaggtcggtggcttagatccggagaccgcctacgagttccgcgtggtgtccgtggatggccactttaacacggagagtgccacgcaggagatcgacacgaacaccgttgagggaccaataatggtggccaacgagacggtggccaatgccggatggttcattggcatgatgctggccctggccttcatcatcatcctcttcatcatcatctgcattatccgacgcaatcggggcggaaagtacgatgtccacgatcgggagctggccaacggccggcgggattatcccgaagagggcggattccacgagtactcgcaaccgtaagtcccaaaatcatataatcaattcgtaatagcaaatcgaataacaaattctaaatactacaggttggataacaagagcgctggtcgccaatccgtgagttcagcgaacaaaccgggcgtggaaagcgatactgattcgatggccgaatacggtgatggcgatacaggttagagtcctttttatatgtcaactctctctgatatcatttacgtatgtatcatacgagtgtgtcctccagtgctactcacattgagtttcctactatcctcgaatgcggtaatgctacgttggaaacttttttacactatttttttttttggccagagtagatagcactgaagatctaaatgcgtttttattagatttttgtgatcttaacttaaaaataaaaatgtatttttttagtcgcatgttttgtctgtatacattttcgatagtgatatgttaaaacgctgcattaccgttatggaagtacttgatagagttatccaactggagtcacatctagcacaccaccccacctacaactgctcattacatttttgttgtctctctttggttgtttttttcactctcttgatttcctttgccacatttgtttttggttttatttcgcattgatgacgattgtgtttggggatatgataatgatgatcagctgtggccacagccgctgctcgtgcagctgccgcagcacgcagcaagttaacgtcgctgccaacgtctacccaacaacaacaacagcaacaacaacaacagcagcaacaacaggaacaacctcagtcgacgtcggcgtcaactgttccattgatctccttggcctcaccctcaccctcaccatcttccacctccaactcccccactgctgccccgccctcctacgaactgtgcgtggcggatgctgagcaccgcaaggcctaagagagagtgtggtgaaaagggggagcgatcctttcgctctcccagtcaatgttgttgttgttatccaattagccaggtagctctctctctctctctctctcttaattcgtaccgctggctgttctgtttcccctgcggctcaattccttgcgctttaaagagagcttagtgccaaatacagtagtggaagcacacataaaaatgaaaatagtacgaaaatactagtgtaaagtagatactatgaagattatgcattaaattaatgttgctgttccaaaaatgttgaccctgctatacatttgactgcttctgcaagtgtcgtgcttcctctctcttatgccgcttccaagatgctgcatgaagttcaaggctctgccgaactccttgcaggcaaccgaagagagccacttgccgttataaggccgctcctgcgcttttgctttcccccattgatttattgatctctgcacgaagttgctttcccttccagtttgttgattgttcgttctcttctaatactaaccatgctcatcaatgagaatattcgttcatttgctgctgtccaccagtggactatcgaaaatatcgatggaaatcgatcatcaaatcatttcgagccacttacatattttgtgttccttgttatgtgttctttgtttatacgttccatattgtttattactttaaattgcactctattttatttatattatatttgtatcattttttttctttttcctaaacacgtaaaataaacacaatcacaatcaatattaaatcgacaacgacaaccaatatccaggcatgaatgaagatggatcctttattggccaatatggacgcaaaggactttgatttaattagtaagcagcgcaccgcaacagcaactcaaaaataatatcgaaaccgagcccttaaccccaaaaatcaaaaaatcaacaagaccaaacaccatcacagcagaaaaatgaaaaaattaatgaaaataatagtagcctacattttattcgactataagtgcaaacaccacgactaatttaaagtatatataaaaatagaggttttatatataactattaaaatcttaaaatgtgtaaaaaaaaaaacaaacaaacaaaatgaatgcaaatcaatactgccaaacaacttgaacaacaagcaacacaacagcaaaaacaacaacaacgagaatgcagcaaaaaggctattatcaaaataaaagtcttcatatcggaagaagtagttatcgaaaaagaaatgcatgcgaatcaaaccgaattatgaaaaaaaaaatcatataattttctggacgttatggggatgatgcgtgtaatttttttttattttaaagaaatttaagaaactatgtatgaggaaaataatgaagctcgcttatgaaatctctatattgcgcacatgtctacctgtcccactctgtccccggtactctgtatatctttgtcccgctctctcccttctctacttgtaatgcatatatatttataaatataaagcgtaaataagttataatttagtaatttttttataaagcaacagcacttgaatgtcaaatctccgttttagattggtcgtaaatcgaaatgaaactctcttttagcttacatgtttactactttatttaagcctattgtgtgtattttgtttttatttcattattttattttttttagttcgtgtaatgactttgaatttttttgctttgaaattgaaacaatgttttagtatagcctcgtgtttgttttccgggaagagcaacaaaaatgaagtgtattttttcagtgtatttaatattaaagaatgaatgacgaaaacatcataattatatgaaaatataattttttttacatatgttgatgtacgttcgcatataaatttagaaagaaaacaaataaaataaagaa

SEQ ID NO: 1700 - DNA, 4041 bp, DROSOPHILA
gcagtgcaacagcagaaagtaataaaagctcggctcgcatgcaattttcattagtgggaaaattgtttgatatttaagaggcaaccgaggaataaacggaatcaacagcagcagacacacacacacacattccaagccaaattaataatagaaaagaaaaacaaaaaaaaaaaaacagcaaccagaaaaccaataaaagtttaaaccaaaacgaaacacactcgagggggcgagcggagagccaaacgaccaaaatgtggcggcagtcaacgatactggccgcgttactagtggctcttttgtgtgcgggcagtgcagaaagcaaaggcaatcgcccaccaagaatcaccaaacaaccggcacccggagaattgctcttcaaagtggcgcaacagaataaggaaagtgacaatccattcataatcgagtgcgaagccgatggacaacccgagccagaatatagttggatcaagaacggcaagaagttcgattggcaggcgtacgataaccgcatgctgcggcagccaggacgtggcaccctggtgatcaccatacccaaggacgaggatcgcggccactatcagtgctttgcgtccaatgaattcggaacggccacctcgaactcagtatatgtgcgtaaggccgagctgaatgccttcaaggatgaggcggccaagacactggaggccgtcgagggtgagccctttatgctgaaatgtgccgcacccgatggttttcccagtccgacagtcaactggatgatccaggagtccatcgatggcagcatcaagtcgatcaacaactctcgcatgaccctcgatcctgagggtaatctctggttctcgaatgttacccgtgaggatgccagctccgatttctactatgcctgctcggccacctcggtgtttcgcagtgaatacaagattggcaacaaggtgctcctcgatgtcaaacagatgggcgttagtgcctcgcagaacaagcatccgcccgtgcgtcaatatgtttcccgtcgccagtccttggcgttgcgtggcaagcgaatggaactgttttgcatctacggtggaacaccgctgccgcagaccgtgtggagcaaggatggccagcgtatacagtggagcgatcgaataacgcaaggacactatggcaaatcactggtcattcggcagacaaatttcgatgatgccggcacatacacctgcgacgtgtccaacggtgtgggcaatgcccaatccttctccatcattctgaatgttaactccgtgccgtactttaccaaagaacctgaaatcgccaccgccgccgaagacgaagaggttgtcttcgagtgtcgcgctgctggtgtaccagagcccaagatcagttggattcacaatggtaagcccatcgagcagagcaccccgaatccccgacgaacggttacggacaacacaattcgcattatcaatctggttaagggcgatactggtaactacggttgcaacgccaccaattcgctgggatatgtgtataaggatgtctatctaaatgtccaggctgagccgccaacgatttccgaagctccagcagctgtatccactgtcgatggaaggaatgtgaccattaagtgcagggttaacggttcccccaagcctctggttaaatggctaagggccagcaactggctgaccggaggtcgttacaatgtccaagctaacggtgacctggagatccaagatgtgacattctcggatgccggcaaatacacatgctatgcgcagaacaagtttggtgaaattcaagccgatggttcgctggtggtcaaggagcatacgagaattacccaagagccgcaaaactacgaggtggccgccggacaatcggccacgttccgctgtaacgaggcccacgacgatacgctggagattgagatcgattggtggaaggatggccagtccattgactttgaggcccagccgcgattcgtgaagaccaatgataattccctgacgattgccaagacaatggagttggattctggcgaatatacgtgcgtggcccggacgcgtttggatgaggcaacggccagggcgaatttgattgtccaggatgtgccgaatgcaccaaaactgaccggcatcacctgccaggccgacaaggccgagatccactgggaacagcagggtgacaatcgttcgcccattctgcactacaccattcagttcaatacatcgttcacgcccgcctcctgggatgccgcctacgagaaggtgcccaacacggactcctcgttcgtcgtccagatgtcaccgtgggccaactatacgttccgtgtgattgccttcaacaagatcggagcctcgccgccgtcggcgcacagcgatagctgcaccacccagccggatgtgcccttcaagaatcccgacaatgtcgttggccagggcactgagcccaacaatctggtcatctcgtggactcccatgcccgaaatcgagcacaatgcccccaatttccattattatgttagctggaaacgcgatattcctgccgctgcgtgggaaaacaataacatattcgactggcgacagaacaacattgtgattgccgatcaaccgactttcgtgaaatacctgatcaaggtggtggccatcaacgataggggtgagtccaatgtggccgccgaggaggtggttggctactctggcgaagatcgtcccctggatgcgcccaccaacttcacaatgaggcaaatcacatcatcgaccagtggctacatggcctggacgccggtaagtgaggaatcggtgcgcggacacttcaagggctacaaaatccaaacgtggacggagaacgagggcgaggagggtctgcgggagatccatgtgaagggtgatacccacaacgctctggtcacacaattcaagcccgattcaaagaactatgcccgcattttggcttacaatggacgcttcaatggcccacccagtgccgtcatcgacttcgatactccggagggtgtaccatcgccggttcagggactggatgcctatcctctgggctcctcggccttcatgctccactggaagaagccgctgtatcccaatggcaagctcactggctacaagatctactacgaggaggttaaggagagctatgtgggcgagcgacgcgaatacgatccacacatcaccgatcccagggtcacacgcatgaagatggccggcctgaagcccaactccaagtaccgcatctccatcactgccaccacgaaaatgggcgagggatctgaacactatatcgaaaagaccacgctcaaggatgccgtcaatgtggcccctgccacgccatctttctcctgggagcaactgccatccgacaatggactagccaagttccgcatcaactggctgccaagtaccgagggtcatccaggcactcacttctttacgatgcacaggatcaagggcgaaacccaatggatacgcgagaatgaggaaaagaactccgattaccaggaggtcggtggcttagatccggagaccgcctacgagttccgcgtggtgtccgtggatggccactttaacacggagagtgccacgcaggagatcgacacgaacaccgttgagggaccaataatggtggccaacgagacggtggccaatgccggatggttcattggcatgatgctggccctggccttcatcatcatcctcttcatcatcatctgcattatccgacgcaatcggggcggaaagtacgatgtccacgatcgggagctggccaacggccggcgggattatcccgaagagggcggattccacgagtactcgcaaccgttggataacaagagcgctggtcgccaatccgtgagttcagcgaacaaaccgggcgtggaaagcgatactgattcgatggccgaatacggtgatggcgatacaggcatgaatgaagatggatcctttattggccaatatggacgcaaaggactttgatttaattagtaagcagcgcaccgcaacagcaactcaaaaataatatcgaaaccgagcccttaacccc

SEQ ID NO: 1701 - protein, 1239 aa, DROSOPHILA
MWRQSTILAALLVALLCAGSAESKGNRPPRITKQPAPGELLFKVAQQNKESDNPFIIECEADGQPEPEYSWIKNGKKFDWQAYDNRMLRQPGRGTLVITIPKDEDRGHYQCFASNEFGTATSNSVYVRKAELNAFKDEAAKTLEAVEGEPFMLKCAAPDGFPSPTVNWMIQESIDGSIKSINNSRMTLDPEGNLWFSNVTREDASSDFYYACSATSVFRSEYKIGNKVLLDVKQMGVSASQNKHPPVRQYVSRRQSLALRGKRMELFCIYGGTPLPQTVWSKDGQRIQWSDRITQGHYGKSLVIRQTNFDDAGTYTCDVSNGVGNAQSFSIILNVNSVPYFTKEPEIATAAEDEEVVFECRAAGVPEPKISWIHNGKPIEQSTPNPRRTVTDNTIRIINLVKGDTGNYGCNATNSLGYVYKDVYLNVQAEPPTISEAPAAVSTVDGRNVTIKCRVNGSPKPLVKWLRASNWLTGGRYNVQANGDLEIQDVTFSDAGKYTCYAQNKFGEIQADGSLVVKEHTRITQEPQNYEVAAGQSATFRCNEAHDDTLEIEIDWWKDGQSIDFEAQPRFVKTNDNSLTIAKTMELDSGEYTCVARTRLDEATARANLIVQDVPNAPKLTGITCQADKAEIHWEQQGDNRSPILHYTIQFNTSFTPASWDAAYEKVPNTDSSFVVQMSPWANYTFRVIAFNKIGASPPSAHSDSCTTQPDVPFKNPDNVVGQGTEPNNLVISWTPMPEIEHNAPNFHYYVSWKRDIPAAAWENNNIFDWRQNNIVIADQPTFVKYLIKVVAINDRGESNVAAEEVVGYSGEDRPLDAPTNFTMRQITSSTSGYMAWTPVSEESVRGHFKGYKIQTWTENEGEEGLREIHVKGDTHNALVTQFKPDSKNYARILAYNGRFNGPPSAVIDFDTPEGVPSPVQGLDAYPLGSSAFMLHWKKPLYPNGKLTGYKIYYEEVKESYVGERREYDPHITDPRVTRMKMAGLKPNSKYRISITATTKMGEGSEHYIEKTTLKDAVNVAPATPSFSWEQLPSDNGLAKFRINWLPSTEGHPGTHFFTMHRIKGETQWIRENEEKNSDYQEVGGLDPETAYEFRVVSVDGHFNTESATQEIDTNTVEGPIMVANETVANAGWFIGMMLALAFIIILFIIICIIRRNRGGKYDVHDRELANGRRDYPEEGGFHEYSQPLDNKSAGRQSVSSANKPGVESDTDSMAEYGDGDTGMNEDGSFIGQYGRKGL

SEQ ID NO: 1702 - DNA, 7401 bp, DROSOPHILA
agctgaggaagtagtagacctccgtggagaaggagacaaagtgcacgggtcccaagttgaagctgtaccacaagctgtccgtttcgccgggcatattgaagcgggcgcgatagttggagaagttgctgtgatgggccaaagtaagttaggtttgaatagttaacacaccggcatcatcaaatacttactacttctcctcgtgattgcccggacaaaccatgtagggcacataggcagccaccgactcgatctggcgcatgaatgcatcacccacggcagcgttggaggtgtccatgtcgtaggcaaagtcacccacatggatgatggcatcgtacatgcctcgctcagtgtcctgctgtagtcggcccatcgactgggcattctcgttgcccatgtcaccgaaaatggccaacgagggcgaccacttctcacccgccggtggcgtcttgaaattgaacaccgccgaccaaccgagcggactgccgcagctgtactcgtaccgcgtgtccggctccagatccttcagttccacattgtgtatgtactgagtgcgagccttctttccaccatcgacgaatcgctgccaggtgccgttcaccattatcggctcgtcttttagatagttccgcgagaatttaaccaccgaggcgttgggggaacttcgagtcgaccatgtcaccacaatatcacgaagattgtctacaacaaagttcattagctgggattattctcacttttaaagacccaatttatatttaaaaccatctcgttttaaaaacagtttcccctcgaatttcgtacttaagactatagaatcagtaggccacaatcattgccactcatacatagttgttttatttgagcgtataactgtaattacatttcattaaaatatatatgtttagaaggaggatagtttcttggtccgattgctgcgaatataaatcattcgaatttgtgcccgaatttaaaatactttagtatatgacgacataaaatatcacaaagtttttgagttgagatcagactggtacggtccatgcttgtccttgaccacccagaaactatcgatgacctcgcccttcttgtcatcggacacctgctcgaaatgtagatgggtgccgttgtgggccttcagtcgaagatacccaaagtcctggctgtggaaggcactccacggaggcatgcgcttgaagaatggctccctgccctcgtgattgccggcagctcccgaaatgatgtgtattggtgcaccgggattcacatacggctcggccagcgatccattgaacacggtgtagttgtacatgggccacatccgctcgtagcagtgctcgtgtgcccacaattcaatatctacgccgtactgataaaagagtggctccagcccgaagaaatccagcatgggcagaccctttcgaacgattgtctcatgattggcacagtcatctccgttgtcattgctgcagtacatgggccgatggccgtatgtgataatccagggacgcttcttccggttttctggcttgttggcctcgatcaaatcccgctccagccagtcgtactgcatcacgatctgcttgatcccgaacttagtgaaataatagacttctgtgctaaaaccgatgaagtgcaccggtccaagatcgaagctatagaacatgttatccgatccacccggcatgctgaaccgattgatgtagtgcgaaaagttgctatgggttgaaagggaaaagtccttatatcagtcatcatcattatcatcatcgcaattggcttgtggtgtagcacttactacttctcctcgtggttgcccacgcacaccatatatggtaagtaggcggctatggtctccacctggcgcataaactcgtcgccgacctctccgttttcccagtccatgtcgtaggcgaagtctcccacatggatgatggcgtcgtactggccgctctgcgtttcacgctgcagcgctggaagggatgccgcattcaccacgcccatatcgccgtagatcgccaacgagggcgaccagtcggcgtgatcgaatcgcgtccgaaaccaataggtggcggaccagcccaactcactgccacagtggtagagataggtgctattcggtttcaggtgggacagcgtcacctgcattcggatgggttcatggattagatgccttcgtttgcgactcttgctgcgtcgttactcacacgatgtatatactgggtggcctttttggctccaccatccacgaatttcgtgggcatttgcgtcgccttcactcgctgatgcagtccatcgatgccgaactcacagattgattcgttggtgttgtcgcgcgtgttccaggtgacgacaatgtcgagcacggtttctgcacaagcacactgattaactaggagcttaacactgagcatgtcacatatttacaacacttgtctacaagatgaagtcaactattaatggattcactcacaaaccatttgattgatcgttgaattctcaattgagttgttcccagttttatgatattgaattgttttatcccaaaacaataagcacaatgaaaagttcaagacatttattgtaaagatactaggcatttaaacaacaatcagtgtacaatcggattgccgtgactataataaacccggtaatcggatttcatgtacttattgataataaaaaccgatcgggtgcatatccattagtcctttaacattgatcctaataagtatatcaagtacatcccatacacattaaaaacaatttgcttaagacagcagttaccgagtaccagtttttgaacatcaagtaacatgcgacagagataagaaactaagttcatttacgttcttatcagcttatgttaaatgcacacttaaaagcgcttgcatatgtgtaaatgctgcgtttgttaaattggctaagtataaaactgtagtttgtttcgggctgggttgagatatttggataaggaatgtgccacgcttattgctatagtttgtgatcgaatcaggtcgaggcgaatgtgcgctactaatactgcctgttgctattgatgcgtgtaatgcctcgagagactcctttagcttgaattgattcggctcaggttatggttcagattgggaatgactatttagtttcggtagcttccatgcttggatttcaccaaccaaaagtcatcgatgatggcgccgttcttgtcgtcggacacctgctcgaaatggatatgtgttcgattgtgagccttgagccgtgtgtaaccatagtcctggctgtgaaaagcgctccattcgggtattttgcccttgaatggttctcttccctccttgcagccggcggatcctgtgacgatgtgcacaggggcactaggatcattgtacggcgaatccttcagcgttccattgcgcaccttgtaatcgtaaatgggccagagtctctcgtaggagtgctcgtgcgcccaaatggccacgtccacgccgaactcgtaaagcagcggctccaatccgaacatgtgtacaaatggccagcccacccgcgtgagagtctctgagtgggtgcagtcattgtcgttctcgttgctgcagtacatgggtcgatgaccgtacaagatgatccacggacgcttgttccgattctctggcagattggccttggccagatcctcacgcaaccattcgaactggaataccagcggctttaaaccatagttgagaaagtagtagacctccgtgctaatgcccacgaagtgcacgggtcccagatcgaagctgtagaacatgttctccgtacctcccggcatactgaagcgggcacgatagttcgagaagttgctgcaacaccaacaattagatcctgcttctaccaaaaaacactctactctctgctctactagctactcacaacttctcctcgtgattgccgggaaccaccatgtatggcaggtaggcagccaccgtttcgatctgccgcataaactcatcccccacgcgagcattcttcgtgttcatgtcgtaggcgaagtcacccacatggatgatggcatcgtacatgccgcgctgcgtctcctgctgcaatcgggccagggattgggcattctcattgcccatatccccgtagatagccagcgatggcgaccagtcaacggatgccgagggcactgtgcgaaactggaagatggccgaccagccaaaatcgctaccgcaatggtaagagtatgtggcatttggctccaggtccctaagcgtcacctaagcaaagtaaacaataagtttttctctctctttctggtacatcaactgcgatgtcaaggtggatcgattgattgttaagagatggagtgcaagcagtcctggctcattggttcttaatttggttctaagagccggattcaaggttgcattcctcttacattctcacatcaatctacttgaatcgtttgatcggttgcatactctatgcataccctgtggatgaactgcgtggcctgcttgtgaccgccgtccacgaatttagtagcctttccccgggcctgttgggtgagcctgacctgtccgtctaccagttgaccgtactccaccacgctgaccgcacccacttcctgatccggcggcaggctgcgcgtggaccaagtgacgactatctcgctatcggtgcgttctgcttcagaggacaagcggatatcgagaaacggggaagagtaaaagaaaaacaaacttgagcaatttcgttggtccaatgttggtacgtttcaaatgaaaggaaaacaaacaattagcccccatccggcatctaatatcatttagatttggcattaatactgattactaaacatgaaaatgtatagatttatagtataatataaacaatgaactcgaattccagatttgccacgataatgattcgcataattaaagttgattgaaacaagtgctacttggttactttaatgaataacttcaatcccattagcatcgcttgtgccaaattgaatttgaatctgtaacgggtgcagggtcgtccagtcattcatgaccaaatgttattgtccaataaaaccctgatatttttgctttgcagcgacgctccattgtttgcttcatccttatcgccaacccaacagaaactagaaactagaacacaaagccaaatggccggtgggatgacgatcgaccgtatcggcaaatatgaggccccacagggagccaaagtctatcaatctttgggttgcatttcagggttttgaagtttgcaatgcccgcgttgtcgtagacaacagtggaaccccaatatggcggaataatgctattttttttgggggggaatcacctgattacaaaaaagactggccgagcggctgacgtttttaatcttgttcagtttttcgccaatcgcactacacagcgattaattttagcattgtgcacgaacacattcacagtggcatacttaaattgtttgttaatgtttttgtgtttgacctgccacctcatcaggccttaaataagcttgaatttattgctgcttccaaaaattcggaattagatgttatcagttttggagttttatgggactttcgattattaatataaagctatatttatacaatatttggggaaaccttaggtattaccttgttgtaatttgtaggctgtaactaacgatcgtatagatattaactacaattaaatataactatgcattgcgcccgttattgtgggtgcatttgcatttgttcatcccatttataggggcgacgacactgataatcattttatgtagcaaatgattctgggcgggattggaaagcaagtattgatatcactcgataagtgcctctggaattgcgtactatacgatcaatgtttttcaaaaccatatgtgataatacacataaaggaaaatgtaagtacaatgtaaggtaatgtaaataaaataaactttcctacgtgatagatttgtaatattagaaacttatatgccaagctatcatttttctcccagtgtattctaacactaatgcaacgctgcaggtgagcaatttacataatgcgaaaagtaaagaagatcgcactcacctccaaaggacagatgcacttgctccggctgatagtgaacaatgtcgacgtcctggtcgatgggagtgctcctaatccccggaagaagcagcaccagcaggagcagcgacgctagcagagcgaattgcagtctctgcatttttaccgttttgtatttacttgtgtttgttgttgcacagtaacgcagtcagcaaaaacattgccaaatcacaattgcgtcgttgtcaaagtggggacacttggctcggggagtcgttggagttaaacgggggaatcgacaaattcgcttgcgggaacaacaaaaaatgagcactaatatggaaatatccagcaatttataagcgcagccacaacaaaaacaatccgggtgcagtgtgaccttggccgccgaacagcaaatgccagtggtaacgattgcacgctggcgacaactatcgatagaaagcgataagtgagcgcgcgatttgaacttgatacgtaaataaattacgtgaaaatgacaaatttatctaaagctgtttgaataaaaatgaaatagcgtttcaaattcaaaacagctcaattggttattctattgttaatacatttcgaccaattactcaatttcaattaaatcaatcaattagaaatgtacgcattattgcagaatatctttattatataacagcatatgaaatgttttggggaatgaagtccctctaagagctaaatgaaactacacacaattcgagatcctttgtcggtcccaattgaatgcttgaaaacatgcggatcgttttgttcatataagcgccttcttagcaataaacatagaagaatatatatatagatatatagattagggtatatgggtataaatacaggataacaatagagagagagagatagagagatagttttaacaatacatacaactaggataactggatatacgtatgtaaataggtttaaggataacattagcataacaactaaggacttttggcagccttatcgactttgtggcatacatgctgtgaaattggcaaagcaattccgctggacgtggaaatacatatgtatacgatacaggtaatacatctttcggacaaggaaacctaactacttctcggcgggggcaccactcgatcccgtggccgctgcactgggcatgctgctcttgcgctgtgcttgcgagatctgcacgatcctcgagagcggcgagtgggtgctgctggtgctgggtctcgttccggcgggcaagggcagcagccgttgagcggacgttccgccagactcgtcgatggcccccgctggcaaggcgcttccacttcctccgggcggcgac

SEQ ID NO: 1703 - DNA, 1550 bp, DROSOPHILA
atatttccatattagtgctcattttttgttgttcccgcaagcgaatttgtcgattcccccgtttaactccaacgactccccgagccaagtgtccccactttgacaacgacgcaattgtgatttggcaatgtttttgctgactgcgttactgtgcaacaacaaacacaagtaaatacaaaacggtaaaaatgcagagactgcaattcgctctgctagcgtcgctgctcctgctggtgctgcttcttccggggattaggagcactcccatcgaccaggacgtcgacattgttcactatcagccggagcaagtgcatctgtcctttggagaaaccgtgctcgacattgtcgtcacctggaacacgcgcgacaacaccaacgaatcaatctgtgagttcggcatcgatggactgcatcagcgagtgaaggcgacgcaaatgcccacgaaattcgtggatggtggagccaaaaaggccacccagtatatacatcgtgtgacgctgtcccacctgaaaccgaatagcacctatctctaccactgtggcagtgagttgggctggtccgccacctattggtttcggacgcgattcgatcacgccgactggtcgccctcgttggcgatctacggcgatatgggcgtggtgaatgcggcatcccttccagcgctgcagcgtgaaacgcagagcggccagtacgacgccatcatccatgtgggagacttcgcctacgacatggactgggaaaacggagaggtcggcgacgagtttatgcgccaggtggagaccatagccgcctacttaccatatatggtgtgcgtgggcaaccacgaggagaagtacaacttttcgcactacatcaatcggttcagcatgccgggtggatcggataacatgttctatagcttcgatcttggaccggtgcacttcatcggttttagcacagaagtctattatttcactaagttcgggatcaagcagatcgtgatgcagtacgactggctggagcgggatttgatcgaggccaacaagccagaaaaccggaagaagcgtccctggattatcacatacggccatcggcccatgtactgcagcaatgacaacggagatgactgtgccaatcatgagacaatcgttcgaaagggtctgcccatgctggatttcttcgggctggagccactcttttatcagtacggcgtagatattgaattgtgggcacacgagcactgctacgagcggatgtggcccatgtacaactacaccgtgttcaatggatcgctggccgagccgtatgtgaatcccggtgcaccaatacacatcatttcgggagctgccggcaatcacgagggcagggagccattcttcaagcgcatgcctccgtggagtgccttccacagccaggactttgggtatcttcgactgaaggcccacaacggcacccatctacatttcgagcaggtgtccgatgacaagaagggcgaggtcatcgatagtttctgggtggtcaaggacaagcatggaccgtaccagtctgatctcaactcaaaaactttgtga

SEQ ID NO: 1704 - protein, 453 aa, DROSOPHILA
MQRLQFALLASLLLLVLLLPGIRSTPIDQDVDIVHYQPEQVHLSFGETVLDIVVTWNTRDNTNESICEFGIDGLHQRVKATQMPTKFVDGGAKKATQYIHRVTLSHLKPNSTYLYHCGSELGWSATYWFRTRFDHADWSPSLAIYGDMGVVNAASLPALQRETQSGQYDAIIHVGDFAYDMDWENGEVGDEFMRQVETIAAYLPYMVCVGNHEEKYNFSHYINRFSMPGGSDNMFYSFDLGPVHFIGFSTEVYYFTKFGIKQIVMQYDWLERDLIEANKPENRKKRPWIITYGHRPMYCSNDNGDDCANHETIVRKGLPMLDFFGLEPLFYQYGVDIELWAHEHCYERMWPMYNYTVFNGSLAEPYVNPGAPIHIISGAAGNHEGREPFFKRMPPWSAFHSQDFGYLRLKAHNGTHLHFEQVSDDKKGEVIDSFWVVKDKHGPYQSDLNSKTL

SEQ ID NO: 1705 - DNA, 3947 bp, DROSOPHILA
acgtggacatgcgaaaggtgggcgccggtcgtggccagatctctgcttacccgcgccagctggagagtctcatccgactgtcggaggcgcacgccaaggtgcgtctcagcaaccaggtggaattgctggacgtggaggaggcttggcggcttcatcgcgaggctctcaagcagtcggccacggatcccctgtccggcaaaattgacgtgggcattctcaccaccggcttatcaacagccgctcgcaaaaagcgcgccgatctggtggcagccatcaaggaaaacctcaagaagaagggcaaagttctcacagttccctatcagaaactgtttagcgatattaaggaaggatcccaaattgtaagtgctaatataatatatttataatataaaatcaatgtaaacgataatttattgcagatgatcacacgcgagcaatttgaagatgccctgaaggaggtgcaagatgagggcgcaattgttgtcatgggaaagaacaccattcgtatttgttaattttattacatttatctcattcaaaaccaaccgcaaattcattcattcctatttttaagcgcaactacaaaaatgttttcaataaaaaaatttcaaattattcgtttctgttttatcaactaatatgtaaagaaaaattgcacataattaaattatttggaaagtttatatattgcggtagaaaaataattgattgatatttgaatataatttttttatttttcgagcagcttataatgtaaaatatatggacatgtcaacgtggaaaatgttgtcaagcttgctaaaatattgataaagtgatttatacataagaagagcacatatcacttaaatttgaaaaggcagaaaaactgaatcttaaaattcgtgtaattaagcattactttggaaagccaaacaaaaacaaatttcgaatatataggagtaccccaactaaaaaaggaatatcccagttagtgccgttttttagcgcatttgcgcaggcgaagtgcagatattttggcgctctggctgctgccacactgtgtgtacggaaaatgatggagttcgggaaatcgtcggatcactcccagcacagcgcttccgaggcgtcggcggactccggcagcctggcaaacagcgatctggccgtcacgcccaccaagcgggagcgccgcaagtcgccggccaccagttcggacaacaacagcaccagcgtccaaccgccaatgtcgccgtcgtcctcggtggcggacaccacctttgagcccaccatcgacatgatggtcaacgactttgacgacgaggccacgctgaacgaggaggaggctctggcggacatggaggcgcacagtgccgaggacgagatcgccacgctgcgcgaggagagcgagatgcccatcgaggagctgctggccaaatatggcgggacagcggcttcgccggcaatgagcagctcgaaccgttccggcagcagttcacgacgtgcacgtagggccacaaagcgccagtaccaggaactggacacggagatggctcacacgtcgacctccacttcgagcagcacatcgcaactggagaaacacgacggcatagaccaggaggaggaacccaaggaggaggccgataagctagcatcacccccagaatcaggagaagcttcgtccgtggacacggaggatgcgcaaaagtatgaggggatcaagaagcagcatcgctcacatttgctggacctgtatccagatgaatccttcgtcgatctggcgcccacatgcggagaggagacggaaagatgtaggtttaaaaataaaacgtgacagaatctaattatcacttccattatgtaacacttttatagtcactccactgcaaacactgttcgatgaagtggaggccgaggaggaggaggaaagcgaatccgagttggacgatgctcggaagataataatggtgggtcacgactatcaggctgagatcccagaggggctgtcgcaatatggcgatatattgccatatgagaacgaggatcagttgatctgggagcccagccaagtcagcgagcgcgaggtggaggaatatctggccaagatacaggaaacccgatcgatagttccgccggatgacgggtcagagactacggcgggcgaggaaggcgcagctacaggtgctactatcgaaccgccggctcccattacagctccagccacgcctccgagggctccgcttgcgacaagtggcgctggcgatcaggagctggtggtaaaggataatgagcaggcgctccatctgcttgtccagtgcggttacgacttcaaagaagccctacgacgcaagcgcatgaacgtcctgcctctcactgataccatgagcagctggtccgaggacgagtgcctaaagttcgaggagggcattcagcggtttggcaaggacttctatcagatacgtcaaaaccaggtaaaggagcgtccattgcctgcggaccgccctagcaagtaatctatgggctcgttgggctctttcaggtgcgcactagaaccatgcgcgagctggtccatttctactatctgtggaagaagagtgagcgccgggatcagagctttgctttaaacgacaccatcgatcacatggatgttttcatcaacgaggcgggcggtggcaacggaagtggtaatggaaatggtgccgggatcgtatcgggcaccgctaacagtaatggtagctgctcaccgcatagcagcaatggtcacagcaatggggatttgtctgccctggagaaggataccatcgccagtcctcgaaaacccgcctctaagagctattctattatgaccgggagtcaggcggtaggtaatccttccggggggaaccgaaagcgatgctcatccgcatctctgcccctggaggacgaggacaacaacgtcgaggaagaacccagcctgtccacagtgtaaacgacatctctatcacaatcaccatcatcattatcataaccgagcgcaggcgctttcgattcggttgggccaggcgatgtatttgcagggcgcttcattaccattaccactcactataaatatgcatactgtacgtgtagtatataccatatgtctaaacatatatattccagattcttaaatcgacatctctcataacccgtaaagaatttctctattgttaagtgtgcgattcgtctatttgttacatgtgcgtgtggattccggaaccaagtacttatcgcttatatatacaatatattttcgctcaatccttgagtttcgttgaatgtcaataaatgtaatatgtatatctgtaaagtcaattctattgttttgtcgatatttgaccaaatgttttaaaacctccaataatttaatgaatttcaattctcaatttacgaaagtaatgtatgatcagaaaagataaatatatatgtacatcgaaagctttgtagactcacaggtaagattcgctacaaatcagatactaatattacataaaagtacatcttagatatcttagatgagcatgatttattttatttggttcaaaacaaagtatgcatcatattattaatttattcggcctagtattttcccctttaaaagcctttgtttacatatagaagaaacaatatttaaacgaaaattaaccaaattttatcaaatatgcattagtttaatcgctacttaaaagacaagctgacggatttcaaataaccatcttaacgaaagatcaatcgtactccgtattccctaaaagttaaccggatcggaaacaaagaaccggtccgtataaatatacatacatatctcgtatacatagatacttaggtatgtctgtatcttttccccagttttctttgcaaggcgttcttgaaaatggccaattacggtgttggattcccatttattggccgcatgtctgtccacgtacattgtgcatacgaatgtgtgt

SEQ ID NO: 1706 - DNA, 1815 bp, DROSOPHILA
gcgaagtgcagatattttggcgctctggctgctgccacactgtgtgtacggaaaatgatggagttcgggaaatcgtcggatcactcccagcacagcgcttccgaggcgtcggcggactccggcagcctggcaaacagcgatctggccgtcacgcccaccaagcgggagcgccgcaagtcgccggccaccagttcggacaacaacagcaccagcgtccaaccgccaatgtcgccgtcgtcctcggtggcggacaccacctttgagcccaccatcgacatgatggtcaacgactttgacgacgaggccacgctgaacgaggaggaggctctggcggacatggaggcgcacagtgccgaggacgagatcgccacgctgcgcgaggagagcgagatgcccatcgaggagctgctggccaaatatggcgggacagcggcttcgccggcaatgagcagctcgaaccgttccggcagcagttcacgacgtgcacgtagggccacaaagcgccagtaccaggaactggacacggagatggctcacacgtcgacctccacttcgagcagcacatcgcaactggagaaacacgacggcatagaccaggaggaggaacccaaggaggaggccgataagctagcatcacccccagaatcaggagaagcttcgtccgtggacacggaggatgcgcaaaagtatgaggggatcaagaagcagcatcgctcacatttgctggacctgtatccagatgaatccttcgtcgatctggcgcccacatgcggagaggagacggaaagattcactccactgcaaacactgttcgatgaagtggaggccgaggaggaggaggaaagcgaatccgagttggacgatgctcggaagataataatggtgggtcacgactatcaggctgagatcccagaggggctgtcgcaatatggcgatatattgccatatgagaacgaggatcagttgatctgggagcccagccaagtcagcgagcgcgaggtggaggaatatctggccaagatacaggaaacccgatcgatagttccgccggatgacgggtcagagactacggcgggcgaggaaggcgcagctacaggtgctactatcgaaccgccggctcccattacagctccagccacgcctccgagggctccgcttgcgacaagtggcgctggcgatcaggagctggtggtaaaggataatgagcaggcgctccatctgcttgtccagtgcggttacgacttcaaagaagccctacgacgcaagcgcatgaacgtcctgcctctcactgataccatgagcagctggtccgaggacgagtgcctaaagttcgaggagggcattcagcggtttggcaaggacttctatcagatacgtcaaaaccaggtgcgcactagaaccatgcgcgagctggtccatttctactatctgtggaagaagagtgagcgccgggatcagagctttgctttaaacgacaccatcgatcacatggatgttttcatcaacgaggcgggcggtggcaacggaagtggtaatggaaatggtgccgggatcgtatcgggcaccgctaacagtaatggtagctgctcaccgcatagcagcaatggtcacagcaatggggatttgtctgccctggagaaggataccatcgccagtcctcgaaaacccgcctctaagagctattctattatgaccgggagtcaggcggtaggtaatccttccggggggaaccgaaagcgatgctcatccgcatctctgcccctggaggacgaggacaacaacgtcgaggaagaacccagcctgtccacagtgtaa

SEQ ID NO: 1707 - protein, 585 aa, DROSOPHILA
MEFGKSSDHSQHSASEASADSGSLANSDLAVTPTKRERRKSPATSSDNNSTSVQPPMSPSSSVADTTFEPTIDMMVNDFDDEATLNEEEALADMEAHSAEDEIATLREESEMPIEELLAKYGGTAASPAMSSSNRSGSSSRRARRATKRQYQELDTEMAHTSTSTSSSTSQLEKHDGIDQEEEPKEEADKLASPPESGEASSVDTEDAQKYEGIKKQHRSHLLDLYPDESFVDLAPTCGEETERFTPLQTLFDEVEAEEEEESESELDDARKIIMVGHDYQAEIPEGLSQYGDILPYENEDQLIWEPSQVSEREVEEYLAKIQETRSIVPPDDGSETTAGEEGAATGATIEPPAPITAPATPPRAPLATSGAGDQELVVKDNEQALHLLVQCGYDFKEALRRKRMNVLPLTDTMSSWSEDECLKFEEGIQRFGKDFYQIRQNQVRTRTMRELVHFYYLWKKSERRDQSFALNDTIDHMDVFINEAGGGNGSGNGNGAGIVSGTANSNGSCSPHSSNGHSNGDLSALEKDTIASPRKPASKSYSIMTGSQAVGNPSGGNRKRCSSASLPLEDEDNNVEEEPSLSTV

SEQ ID NO: 1708 - DNA, 4466 bp, DROSOPHILA
actggcgattataattccatgctcgactcaaagctcgaaaaatgccccgccgtgcgaactgccacaatcctctaccatcgagaatgattaccctcttttatgacagaatactaagtttaaaatggcgcccgaacagggatctctccacttgtctgtaatctttctgaacacatcacaagtgatttgagtattgttcaatcctattggaattagcaatcctcttagtttatctgtaacaagacatggaagttatactcttaaatttgaataccgaagtctgttggattgaagtttccctggtaatattggttttgcacctgcttataaattgcgcagcactgatgattatatttcaacaaaaagctctcacaagcacaacttcaatatcgggccaagcatttcaaaaagaaacactgcgaaacattaggaagtctttttaaaaacctagattccctaaaaagtatgcagcaatcaaatccaatagttttcaatcccattcagtatatatatcactaattagaatcactgatggatgtgatagtccaagaactcatccactttgttctctcaggttaaaagtaaaaacccatacaatttttggatctatctcgaaactatttacagtaaagcttctactaccgaatatatcaataaatatcaataaacgttttaaacaaataagttttgactttattttcataaacacaacttgaaaactattttatcagcgtaagtgtagtcacaaattacaaaatatagccttgctgctgtgtccgcatgtgattgtgtctagatttagtgttagttatggaacatttcggggtttcggagagtgtttaacctgagtaagaagcgcaactgacgttcgtggcttccaaagtgtagatagagtttgacaaattaaaaaaaaatgtgtagtagtactatggtgaaacaaagttagttagtaacagaacaacttaaggaggaggaggctagttttggtgggtggaatcggtcttcaccgatgacgtcgctcacgctcttcatagtgttcgttgtgccggctcttgctgctccgctcgtagccaccaccgtcccgcttgcgctcatggcgctcggagcggtggcgactccggctgcggcttctgctgcggctacgcgagctttgtctatggttgtgcttcttcttgtgcttgctgcggtggcggtcgtaatccttattcttatcccgatcgcgatccctctccctttcgcgctcgccgtaaggcatctgtggtggcagcggcgccggtgggtagtcctcatagccaccgcgaccacggccgtaggacgagccagacgcggcagcatagtagtcacgctcgtcataatcgttgcggtagttattcggttgtgggtaggcgttggaacgggagccagcttgtccaccgccacgtccgccgcttccacgctctactcctccctccggatagtcctggtagtccgcatcctggccagcggctccaggaccaccaccagtgcccgccgttgaccgacccgtgctcaactgatggacggtcaccccctgctccctacagtattgctcgatcctcttctcgatctgcttttgaatcggcacggggatgcgcggaaagagcgtggagaaccagtccagcttggtcataaactgataaaccatctgtccgatggttaagacctgcaaatagcttaggttagttccaagttctatcaaccgagtgttggttttcgtgtgattggtggctcatacagttgactcacctggccgccgcccgctttcacgtcgatctcctcctcgtcctgcaaatagtcctcataccagtcgtaaaggtcacccggcggctgcgtgtatcgcaagtacataaagcctggggcacggaataaaaatgagagactcgggattaaaacattttcaaggagttgaacttgtggtggttggccaaaggggtataatgagtttcatggtagagtggctcgatttgattgacgggaaagtattacttagttggaaggaagcctattaatttttgaatggaatatatgttttcaattagtgggaaaggccactctgacaaaacatggaattttcttttggacaaatttaaaaatcatgaatgtattatatagcatttaatcggcaaaatcatgcaataggtaactgaaaatccctaaaaaatagttcttaataggcaaattaccgtagactttgactttttcctttgattttagttaggaatttctgaaaaagcaatggttgaatgtcaagatggtgatttaagtcgaataaatttgaaaagatttgtgcatgcttaatgaactgctccgggaattgcataaacatgaatacttgataaaataaaatatttgcaagtagggtaaagattaccttcgcaggcagatgcaaggagatgctaggtcctcttctcgcaaaaggcacaacttgaaatcgaaaaggaaacgtgattgttgttcaatccatagaataccatccgccaagattctctattatagtttgcaaccgtccaaatcgacccaccctgcttcatgtattttattttcttttttcttatttttttttttcaaatttggggtgatgtatggtgtggtttggtttcgtttggtgagctgggggagcaggagcaagcgacggcatatgtgacggctgaactcatgcgacttaccaacacctacctagtgcccggatgtaggccgagtctgtatgattgagcagtccgttgatctgcttccgggtcagccgcagcgtgtatagcttgtagagcaggcaatatgccgttgacacaatgccgccggcgccaacgcctcgcacctagaaaggaataggataacgaaaatgagtgcatacattcatgcattgcataaagcatcgccaacgattagcgctacatttcataaaccactcacaccgccgcacatgcccgtttgtccggacgttttgcgggatccacgctcccagggctccatatgcttcacctggtagtagatctcgtcgaccacttcatggtacgttttcagtttaaacaaatggactgtttggggtacacaaaaaaaaaggcgggttagtaagtgtgacgattggcaatagcacgcgtgtggatttggttgcacctttgaagtagctggagctctggatgttggccaggatcagggcattcaggttcatcgaggattcgttgccccaaaagggcagcgtgttgtgctgcttgccggccttcttgccaccgccggccgaagatgacgccgaataatctgcacgagacaagacgccgccatcaatgaaacgctcgcggggattggatgctatgttcttactcaccttcgtccatgcctactgctcttttactattgggcgcattaattttacggctaccgaaggattgtgtgcgcgggaaaacgcgaaaaatgcaagcacaatttgcaatttacatgcgagaaaatgcccaaattggcgatgtgtatgcgttagcagtcgttatcggtgtgttatcgataacgctggagcgggcaattcttaaggtcactgctttggtcgtgactgttcaccacaagtcgtgattttcaataatttgtaataatttatttaatatttgcttatgaaaccttatttgttagcgtaatatataatatataatatattattatatcacagtaagcgcaattttcttttccttctaatgtttttgggtcaattcttatgaaaatgcacagaaaattcgcatttcgttcagttatatgcttgtccttttaattattaatttatttgatttgtaatactacatttagaaaacaaaaagtgtaattttccgttactaaatcgtttcaaaaacttgtaaatatttccagtgaatggcagagtgaccagggcgtcgaaagaattgcctttacgggcattcgcagcgaggtcacactgtgcccaactgaatccaatccgaatccccatcttcgcatccgcatctgcatctgcattccgccgccgaggacgagcacccagtggccaatccgccgaccatgtcgcccaagtacacacatgcgattgtggccaggtgagtggagcccaaattcgtctcaattcgacggattgccgcatccggaggagggagtgccccagtggcgcggaattaggtcacccaaccaaacgttcgtgggtacacatgccagtgggtggggctgcaccttccaagccgcccagttcctggatcctgtctttaacactatctagtttggatctatctgattattcaaatctttctatagctacatatctaaaatagaacttataagcctgaggataccaattttgaagttatacgtttaaaaatacagtttcctgtttaccaagcattaatttatctatttgacacatcttctacaatagtttctcccacaatcattaaacaaaatgcttaagaataggaattaataactttctttcttataaggagtagtta

SEQ ID NO: 1709 - DNA, 1319 bp, DROSOPHILA
caatttgggcattttctcgcatgtaaattgcaaattgtgcttgcatttttcgcgttttcccgcgcacacaatccttcggtagccgtaaaattaatgcgcccaatagtaaaagagcagtaggcatggacgaagattattcggcgtcatcttcggccggcggtggcaagaaggccggcaagcagcacaacacgctgcccttttggggcaacgaatcctcgatgaacctgaatgccctgatcctggccaacatccagagctccagctacttcaaagtccatttgtttaaactgaaaacgtaccatgaagtggtcgacgagatctactaccaggtgaagcatatggagccctgggagcgtggatcccgcaaaacgtccggacaaacgggcatgtgcggcggtgtgcgaggcgttggcgccggcggcattgtgtcaacggcatattgcctgctctacaagctatacacgctgcggctgacccggaagcagatcaacggactgctcaatcatacagactcggcctacatccgggcactaggctttatgtacttgcgatacacgcagccgccgggtgacctttacgactggtatgaggactatttgcaggacgaggaggagatcgacgtgaaagcgggcggcggccaggtcttaaccatcggacagatggtttatcagtttatgaccaagctggactggttctccacgctctttccgcgcatccccgtgccgattcaaaagcagatcgagaagaggatcgagcaatactgtagggagcagggggtgaccgtccatcagttgagcacgggtcggtcaacggcgggcactggtggtggtcctggagccgctggccaggatgcggactaccaggactatccggagggaggagtagagcgtggaagcggcggacgtggcggtggacaagctggctcccgttccaacgcctacccacaaccgaataactaccgcaacgattatgacgagcgtgactactatgctgccgcgtctggctcgtcctacggccgtggtcgcggtggctatgaggactacccaccggcgccgctgccaccacagatgccttacggcgagcgcgaaagggagagggatcgcgatcgggataagaataaggattacgaccgccaccgcagcaagcacaagaagaagcacaaccatagacaaagctcgcgtagccgcagcagaagccgcagccggagtcgccaccgctccgagcgccatgagcgcaagcgggacggtggtggctacgagcggagcagcaagagccggcacaacgaacactatgaagagcgtgagcgacgtcatcggtga

SEQ ID NO: 1710 - protein, 398 aa, DROSOPHILA
MDEDYSASSSAGGGKKAGKQHNTLPFWGNESSMNLNALILANIQSSSYFKVHLFKLKTYHEVVDEIYYQVKHMEPWERGSRKTSGQTGMCGGVRGVGAGGIVSTAYCLLYKLYTLRLTRKQINGLLNHTDSAYIRALGFMYLRYTQPPGDLYDWYEDYLQDEEEIDVKAGGGQVLTIGQMVYQFMTKLDWFSTLFPRIPVPIQKQIEKRIEQYCREQGVTVHQLSTGRSTAGTGGGPGAAGQDADYQDYPEGGVERGSGGRGGGQAGSRSNAYPQPNNYRNDYDERDYYAAASGSSYGRGRGGYEDYPPAPLPPQMPYGERERERDRDRDKNKDYDRHRSKHKKKHNHRQSSRSRSRSRSRSRHRSERHERKRDGGGYERSSKSRHNEHYEERERRHR

SEQ ID NO: 1711 - DNA, 6439 bp, DROSOPHILA
cgctacaatacacgcttagcagtttttacatttccgcttcgactacaacaacattcactacccgccgttgatccttgttttctgtctgatttacgtggagcacctaccaacaagcaacaaaataatggcgcccgtgcaaggtgagtttcacagttaattcgattccaattgaaccattcaatttatgcatgcccatttggacgattaaaaagcggtttgtagaaatagtggctcttgtggattgttcgcgtagcttctgtagtttctgtagctcgacggttgtgagtcaccggttttgttggattactggattgtcttagtagagagacaacgcaaaataagaagaaaacatctctcacctttgcctgctcgcgattccggcaggtggtaaatagatgctgcggcggctggggaagattgagcagcgccttgaccaggcccagacccaatcctcgattgcagccggttatcaggatggagttcatgttttttttttccgaagatccgcgatcgagttgctcgaaatcttatcgcgtcgtacttgagataaaaccaataaagggcggcactactatacgggttccgtgtgttctgtggatttcaccagacccgcagccagatctttccgtgcttatcaatcgactttattgccgtaacacaagcgtgaaaatagtgaaatgttaggaaaaattttgacggccggctgtttcgttcggacagcagcagtgttaccaaccatccgcgagttatcgatacacttgcgcattgccaaacgtgcgtttcgcacatttccaattggcaaagggcagaacaactgttgtgatgttcaaatcccaaatggaatttcgcaatccaatggatgctcctttatggcaaatccattttatcccaaacattctcgtttttgcggtacgcgctcttgcgccctctctctttctcgctgcttctgttacgtagccgtttatcggcgcctctgcctgcccaccgctttcgcagcattcccggccgaaccagcgaacgtgtttgtgttgtgtgttccgccgtcatttttctgcacccttttcgcgaatagtttcgtttcgcctccagctggtagagtgaaacgccaaacgttgaagaaggggaaaggccaacaagatgaacttgtgcaattcgagattctccgttacgttcgtgcggcagtgctcgacgattttaacgtctccttcggctggcattatacaaaacagaggctcactgacaacaaaggttccccattggatttccagtagtctcagctgtgcccatcacacgtttcagcgaactatgaacttgacgggacagcgaggatcacgcgacagtactggagctaccggtgggaatgctccagccggatccggtgccggcgcaccaccacccttccagcatccacattgcgacagggcggccatgtacgcgcaaccggtgcgaaagatgagcaccaaaggaggtgagcatcgatatcgattgatattctgattagatctttgctgttgccgccgcagctgctgctcctgttgccgccggttggcaacgcggtcgattgtcgcggttttcttgcttgttgttttttctgggtcttcttgtgtttaaccgacgccattatgcaataaccgttagttgcctggccaaaaagtccattactctgctcttattacctggcttatcgggtttctgcggcacgtattcgccaagggtttatatgcctgcccggcatttgctgtctcacatttgcaccgtcatcgtcaatcgtcatcgcgcacccgctccaactggaattgtacagtcggggtcgcgcgaacagcactcgaaactcgtatcatgctgaagtacatgatttgcgccatcgttgtgggcgccaaaaagagcacatcctctaagtataatggtcaacaaagttctgaatcgcgtataaatactatgtcagtcgaatttttttaattgaattatggattgctcataaaaccattactcaattgcagcttaaacaatatcagttatttgcctcaaaaaagaattacatcatatgacttaacgaattaataatatttgttaaattacattcatacaagtcacttgtattgccattttgcctttagctggtaaaaaaaaactaatatctatttatatgaagttaaacgtatttgatgttttaatttgtaatataatataaatcccacatgccacgatcaagttttcttgttaaatgaataattagccaatcgagcagatacgaagcttctaattccgaaaacaatagaagaatttacttataaatatatgccatattctgatttcaaatggtaattaagggtataataggatttcttaaagcaccaacgtgatatgtgtgatttttgtcgaatgcggtgctcttgaacgaataaccctttgcggaatgttcgagaatcgctttatgatgatgatgatgatgatttcaccatatcagtcgggtgcatttattccctttatctgtgttttctatttcgtatctctcgtatccgtcgctcaacgagcgcccgccatcgtctttgatctttcatcatcattgctgagctgcgtcatcaccacttcattccgcaattaattgcagtgtgacgacaacaattgtttatttgcactcgcattcgtacgtagccacctgatttccccctgttcctggccaggattagcattccgtccgataaaagcgaattgtgtgtggtgttgccaactagttttggggcgtaaccatgacaaagtccggcgggtcaaagcaaaccgaatgggggggcgtaggtggacggacggaagaaaggcgtggccgggctgggatgggcgtggcttggtgtgtggcgatgtcgctagatgattgctccactttgattcgaactcccactgacccagtggcatgtgtggcattcggcagcactatcgctacctggcaactgaagccaaggagctcgacgggattgcacggtgcagattacggattgcaggaggccaaacagtcttcgttccgcacttctttggtctggatgcatctgttcgaattcataccggcttcccagttggtcgagggtgaaccacgccaccggaggagcatctaccgatccgcctatctggacatacgactgcgcgaggagtccaccaaaggcaggcggggattagccataatcatgagtgaagctaaagagaaacttgagtagttggcaccacatggctaattgatatcattacctatcactgataaggattttcaactaatctagatactggttaagaacaaaaacagaccatgccaatacaacatggctattgatgttactaacggtgataagtttttaataatacaaggtgaattggctgtgctacgattagatttcctgacggctcctcatgttctgtgacctcttgacctctttaagcccaattttggcagtagattacatatttctatagacaaaaggcgatgaatcaaacgaaaaccttttttctcctgcaggatcctacgactacgaccttattgtgattggaggcggctcagctggcctggcctgcgccaaggaggcagtcctcaatggagcccgtgtggcctgtctggatttcgttaagcccacgcccactctgggcaccaagtggggcgttggcggcacctgcgtgaacgtgggctgcattcccaagaagctgatgcaccaggcctcccttctgggcgaggctgtccatgaggcggccgcctacggctggaacgtggacgaaaagatcaagccagactggcacaagctggtgcagtccgtacagaaccacatcaagtccgtcaactgggtgacccgtgtggatctgcgcgacaagtaagtgtgactatatctatggcttccgctcgagcatccccactaattatacccttctatttgcgctcaggaaagtggagtacatcaatggactgggctccttcgtggactcgcacacactgctggccaagctgaagagcggcgagcgcacaatcaccgcccagaccttcgtcattgccgttggcggccgaccacgttatccggatattcccggtgctgtcgagtatggcatcaccagcgatgatctgttcagtttggaccgcgagcccggcaagaccctggtggtgggagctggctgtaagtagctactttcatttgcttacatcaaattgatgaataacccattcggtttctgctctttcactcagacattggcttggagtgcgctggattcctgaagggtctcggctacgagcccactgtgatggtgcgttctattgtgctgcgtggcttcgaccagcagatggccgagctggtggcagcctcgatggaggagcgtggcattcccttcctccgcaagacggtgccgctgtccgtggaaaagcaggatgatggcaagctgctcgtgaagtacaagaacgtggagaccggcgaggaggccgaggatgtttacgacaccgttctgtgggccatcggccgcaagggtctggtggacgatctgaacctgcccaatgccggcgtgactgtgcagaaggacaagattccagtggactcccaggaggctaccaatgtggcaaacatctacgctgtcggcgatatcatctatggcaagccagagctgacgcccgtcgccgttttggctggccgtttgctggcccgccgcctgtacggaggatctacccagcgcatggactacaaggatgtggccaccaccgttttcacgcccctggagtacgcctgcgtcggcctgagcgaggaggatgccgtcaagcagttcggagccgatgagatcgaggtgttccacggctactacaagcccacggagttcttcattccccagaagagcgtgcgctactgctacttgaaggctgtggccgagcgccatggtgaccagcgcgtctatggactgcactatattggcccggtggccggtgaggttatccagggattcgctgccgctttgaagtctggcctgactattaacacgctgatcaacaccgtgggcatccatcccactaccgccgaagaattcacccggctggccatcaccaagcgctccggactggaccccacgccggccagctgctgcagctaaagcgggaacgcagctcagccgcctgggacgtgtcgaagccgcttgctccacccgaaatcccgtagatgaatggttgttgtcgcggcccagcgatcgatgagttcaatagttccgtttcgtttccacaattaacacccaacacaatagctctgcgcaagggaggggcactgggcagcgatggcgggtggaacgacaccagtggaactacccgcgcgaccagcccaacccacgactgctgcgccgccgacatgcactcaaaattttgaatttgtttgaacctatgaaattaactatgaaatcccctaaatgtacggttgaagaatataatttttcaccaacaaacccctctgtgtttcagttctgtgcatttcctttaaaacatacctcgacctttagcccttcctctgccttttcaatcaagtaagttcattagccatgcaaatggcttgacttgacctggctaaatcgattctgtctgccagcctgacaacttgttagccacccgactaattgctaatgccattgctaggggaatctttgccctcgagggctataaatcagctacgaacgatggcaccctggagatacatatatcagtgggtaataaattatactttagttttcaaaggaaaaacagtgcgtgataaagtgtaatagaagctacgaaaaggttgaagtttatgacctaaggaatcctcgcaagcaaatcaaaatcaaattaagacagtaaattgatgcaatcaattaatgaacagcaaagagaattcaatagcttctataaggaattagcattaatcatatatgtatgtatggaacactttcgaggtggtatctccgattggatgccacgaaacaaagcgagatggctatactatgaaccaagcgacttggaatagcccaatatacccatagtgaaacccaacccattgataagtcgctgttgtgatattttttctattacatttttattttggttttcctatttttcgtattgaataactcctttgttttgaacaacgtaagactttttcatttacaactgacgcagcgctggcgcctctgcagccgccgatcgtgctcctcatcccgctactgcgctggctcttcccgcggctcgtcctggtgtctttgtgtccgttaattagtgggcgagtgcggcgcgaaaggacgaagggcagagtttaaaaaaaaacattaattagttattagtttagatcagacgcgagagtgggcgcctagatagccacactctgcttggcctcgttctcccgctgctgcttgttgaccgccgatatgcacttggccatggtgggcgaggcgcgcgaaatggcgtcgg

SEQ ID NO: 1712 - DNA, 2264 bp, DROSOPHILA
cccggccgaaccagcgaacgtgtttgtgttgtgtgttccgccgtcatttttctgcacccttttcgcgaatagtttcgtttcgcctccagctggtagagtgaaacgccaaacgttgaagaaggggaaaggccaacaagatgaacttgtgcaattcgagattctccgttacgttcgtgcggcagtgctcgacgattttaacgtctccttcggctggcattatacaaaacagaggctcactgacaacaaaggttccccattggatttccagtagtctcagctgtgcccatcacacgtttcagcgaactatgaacttgacgggacagcgaggatcacgcgacagtactggagctaccggtgggaatgctccagccggatccggtgccggcgcaccaccacccttccagcatccacattgcgacagggcggccatgtacgcgcaaccggtgcgaaagatgagcaccaaaggaggatcctacgactacgaccttattgtgattggaggcggctcagctggcctggcctgcgccaaggaggcagtcctcaatggagcccgtgtggcctgtctggatttcgttaagcccacgcccactctgggcaccaagtggggcgttggcggcacctgcgtgaacgtgggctgcattcccaagaagctgatgcaccaggcctcccttctgggcgaggctgtccatgaggcggccgcctacggctggaacgtggacgaaaagatcaagccagactggcacaagctggtgcagtccgtacagaaccacatcaagtccgtcaactgggtgacccgtgtggatctgcgcgacaagaaagtggagtacatcaatggactgggctccttcgtggactcgcacacactgctggccaagctgaagagcggcgagcgcacaatcaccgcccagaccttcgtcattgccgttggcggccgaccacgttatccggatattcccggtgctgtcgagtatggcatcaccagcgatgatctgttcagtttggaccgcgagcccggcaagaccctggtggtgggagctggctacattggcttggagtgcgctggattcctgaagggtctcggctacgagcccactgtgatggtgcgttctattgtgctgcgtggcttcgaccagcagatggccgagctggtggcagcctcgatggaggagcgtggcattcccttcctccgcaagacggtgccgctgtccgtggaaaagcaggatgatggcaagctgctcgtgaagtacaagaacgtggagaccggcgaggaggccgaggatgtttacgacaccgttctgtgggccatcggccgcaagggtctggtggacgatctgaacctgcccaatgccggcgtgactgtgcagaaggacaagattccagtggactcccaggaggctaccaatgtggcaaacatctacgctgtcggcgatatcatctatggcaagccagagctgacgcccgtcgccgttttggctggccgtttgctggcccgccgcctgtacggaggatctacccagcgcatggactacaaggatgtggccaccaccgttttcacgcccctggagtacgcctgcgtcggcctgagcgaggaggatgccgtcaagcagttcggagccgatgagatcgaggtgttccacggctactacaagcccacggagttcttcattccccagaagagcgtgcgctactgctacttgaaggctgtggccgagcgccatggtgaccagcgcgtctatggactgcactatattggcccggtggccggtgaggttatccagggattcgctgccgctttgaagtctggcctgactattaacacgctgatcaacaccgtgggcatccatcccactaccgccgaagaattcacccggctggccatcaccaagcgctccggactggaccccacgccggccagctgctgcagctaaagcgggaacgcagctcagccgcctgggacgtgtcgaagccgcttgctccacccgaaatcccgtagatgaatggttgttgtcgcggcccagcgatcgatgagttcaatagttccgtttcgtttccacaattaacacccaacacaatagctctgcgcaagggaggggcactgggcagcgatggcgggtggaacgacaccagtggaactacccgcgcgaccagcccaacccacgactgctgcgccgccgacatgcactcaaaattttgaatttgtttgaacctatgaaattaactatgaaatcccctaaatgtacggttgaagaatataatttttcacc

SEQ ID NO: 1713 - protein, 491 aa, DROSOPHILA
MSTKGGSYDYDLIVIGGGSAGLACAKEAVLNGARVACLDFVKPTPTLGTKWGVGGTCVNVGCIPKKLMHQASLLGEAVHEAAAYGWNVDEKIKPDWHKLVQSVQNHIKSVNWVTRVDLRDKKVEYINGLGSFVDSHTLLAKLKSGERTITAQTFVIAVGGRPRYPDIPGAVEYGITSDDLFSLDREPGKTLVVGAGYIGLECAGFLKGLGYEPTVMVRSIVLRGFDQQMAELVAASMEERGIPFLRKTVPLSVEKQDDGKLLVKYKNVETGEEAEDVYDTVLWAIGRKGLVDDLNLPNAGVTVQKDKIPVDSQEATNVANIYAVGDIIYGKPELTPVAVLAGRLLARRLYGGSTQRMDYKDVATTVFTPLEYACVGLSEEDAVKQFGADEIEVFHGYYKPTEFFIPQKSVRYCYLKAVAERHGDQRVYGLHYIGPVAGEVIQGFAAALKSGLTINTLINTVGIHPTTAEEFTRLAITKRSGLDPTPASCCS

SEQ ID NO: 1714 - DNA, 4396 bp, DROSOPHILA
atgctcatccgcatctctgcccctggaggacgaggacaacaacgtcgaggaagaacccagcctgtccacagtgtaaacgacatctctatcacaatcaccatcatcattatcataaccgagcgcaggcgctttcgattcggttgggccaggcgatgtatttgcagggcgcttcattaccattaccactcactataaatatgcatactgtacgtgtagtatataccatatgtctaaacatatatattccagattcttaaatcgacatctctcataacccgtaaagaatttctctattgttaagtgtgcgattcgtctatttgttacatgtgcgtgtggattccggaaccaagtacttatcgcttatatatacaatatattttcgctcaatccttgagtttcgttgaatgtcaataaatgtaatatgtatatctgtaaagtcaattctattgttttgtcgatatttgaccaaatgttttaaaacctccaataatttaatgaatttcaattctcaatttacgaaagtaatgtatgatcagaaaagataaatatatatgtacatcgaaagctttgtagactcacaggtaagattcgctacaaatcagatactaatattacataaaagtacatcttagatatcttagatgagcatgatttattttatttggttcaaaacaaagtatgcatcatattattaatttattcggcctagtattttcccctttaaaagcctttgtttacatatagaagaaacaatatttaaacgaaaattaaccaaattttatcaaatatgcattagtttaatcgctacttaaaagacaagctgacggatttcaaataaccatcttaacgaaagatcaatcgtactccgtattccctaaaagttaaccggatcggaaacaaagaaccggtccgtataaatatacatacatatctcgtatacatagatacttaggtatgtctgtatcttttccccagttttctttgcaaggcgttcttgaaaatggccaattacggtgttggattcccatttattggccgcatgtctgtccacgtacattgtgcatacgaatgtgtgtgtgtgtttttcgcactgtgggtagaaagacgagtataaattgcggcgaggatcaaatgtcaggctgaaacccaaccgcaaagctacagaagatctgataaataaccccggtcgccacttgtcatgtctgcttcacttgcattttcgcagtcccaagaagaggagactcaacccgaaacgtgcaagcatacacgtataaacattaatatgtacgtgtgtacacatatacagacaacggatacagtcttcggttccaggctcacgatcgttccagctggagcttttgttcccacacaccctcgtctgtatatagaaatgtacatatgtatgtgcgctgtggcggtggctccactggcgtggcgtgaattttgtacgttccctccagctccatttccaagcgacccagccagccgaccgtagtaaaatccagttttgataaaaataaacaaagtacactacaccgctctctatacgctacactatgaatttccagtctctgcggctgggtcacctggaaaaggatctcctttcgcgtaacgggagggtgggccatagagctctatgtaaagacttttaccgctaaagcgcgtgacatgtccgctcaagtcgctgtacgggtggaattctattgcaatagccgttttcggtgcagagcatattagattcgttacggtgggctcacaatggcgaagttaacaaccgtaaaaagcgcaaatacgacacagagttgcggccagcgcagcggaagcttaacatccggataatattgccaggcagctcagttgttgttctgccgcctcgcctgcgcctgcttcttcttcttctgcttctcctgcttcttcttcctcttcttgggtcttctgttcgtggcaaagcctgttgctcaagcctctctcctccttcccgatcccgcagctccgccttcgcctttgcctgtgccgtcgcaaccagctccgtccgctctttccacaattctctctcggcaccgccaaaaggcacgtaaactggttgttgctggctgggccgtacacttcgtggtgcccgtatttttcgtattttcagtgctgcctgaacgcttgagctgcgcgagtcgcttgccgggaaactcggagttggaatcggaactggatctggctaactagctatcgggctatcggaaattggccactcggatctggacatggagatggcctacaatgcgtcatcgtcggcggcctccgtcggctctgcttctgccgccgcctctgccaccgcctccttcgccttcaccaacaccgccaagctgcccatcgaaacggtgaagcgcctgattgccgccgtctcacgacgtccgatgttgtggctgcgcaacaatgccaatggccagaagcgcagcgacatcacgcctgtttggttcgaggtgggtcaggatgtgaatttgccaggtgagtgtatggctgactatttctcctctgcgctttccgctaaaatgactcccccctttcacagccgacatctgccgaattaagtggggccacctgagggacaactttcgcaaggtgtacatccgcaataacctgtccaatgagacgccctcgtcgtggcgcttctacaacgatatgcggttcatggagcccgccgttcacgagaatatcatgcgtcagacgcgaagcagcagcaagaagcacccacccggacactggacggagaacaataatgtgctggggccggacaagtatgactcaatgcccattgttgctacggagcccatatgcgagctcagccacagctatgactcggagctacaccagcccagcttctcggacatcagttcgttcttcgaggatcgcgactgccagccgccggagaataagagatttaagtcggagcccagtcagagggaggaggacgaggaggatgacgatgacttcgacgaagatgccgcctcggagaacttggaagaggaacgcggcaatcgtgccgatgctgccagttccggtgtattcaccatagaagtgctcgatgacgacgacgaaatggagcaggcggtgaccaagaccaaggcgaataacactagccacggcggatccagcctgaagagcgagcaggaggccaaggtgttctccaattcgcagtcacccaccgccgatctgccattcaagtatatcagcacggatgtggccacgaatacggatccctctggtggagatctccaggacgaggcggatcgcatgttcctgctcagtctgatgcccttcctgcaaagattggacagccgccggcgtctgcgcgtgcgccagaaattacagaacgtgctcatcgaggaactggagtttggctgaggacgcgtatatccgggggaatgtggggagatttactttataagcctagcttacagtattataagaacgcgactgactaactctgtgaatctgcctacatacgtagcatgtaatcagtattccggcctgctttccttcataccaacacacttcaatacataccatattgcattacaatacatatttacacttcaaatagacgatcacgccagcatgattacttgtttcttcctcaggataaccgctcacttttacctgtatctgcgctccggtgcacctgcgccttttacctgcgcaccccgcccgcagttcgagttcccaattatccacggtcactgttgcaattgcatttttccagccacgggcggctcaaaatttctgtcagtgcaaaacaagttctttaagggtggtgcacgcggcaacaacaacaaccacaaggtgattccctccgcattttcgcgccacatgcgccgttaatgctaatgtaccgcgctctcgctcgctctctccgctcaccaatcacaatgcgctccggatgggcgaaacttggtcgagcctaggcaacttgataattcccttttggtgtgttgtgttttttgcctgaaaacatctccccatgttttaaaaatgattcaaagctttcgttgaataatggcgggcttaacagttctgcgatttgcttaatagggtccaattggatggagtttaactttcaaaaactttcgctaaacagaaagctcatcttctaatgagtagagtctgaaatttagacgcagaatccataaaaattcttagtggttcatgcattgttgttaaaatgttgaatgctgttttgtcttttcggaactcatttggaattccaaaatttaaggtgaaacactatttaattttaatttaaaattccttttaatttcagcagtatgattcccctctgatttgtaatcacaaaaatgttcatggccattcattgaccatcatttatacttattataatcattta

SEQ ID NO: 1715 - DNA, 1026 bp, DROSOPHILA
atggccaattacggtgttggattcccatttattggccgcatgtctgtccacctgcccatcgaaacggtgaagcgcctgattgccgccgtctcacgacgtccgatgttgtggctgcgcaacaatgccaatggccagaagcgcagcgacatcacgcctgtttggttcgaggtgggtcaggatgtgaatttgccagccgacatctgccgaattaagtggggccacctgagggacaactttcgcaaggtgtacatccgcaataacctgtccaatgagacgccctcgtcgtggcgcttctacaacgatatgcggttcatggagcccgccgttcacgagaatatcatgcgtcagacgcgaagcagcagcaagaagcacccacccggacactggacggagaacaataatgtgctggggccggacaagtatgactcaatgcccattgttgctacggagcccatatgcgagctcagccacagctatgactcggagctacaccagcccagcttctcggacatcagttcgttcttcgaggatcgcgactgccagccgccggagaataagagatttaagtcggagcccagtcagagggaggaggacgaggaggatgacgatgacttcgacgaagatgccgcctcggagaacttggaagaggaacgcggcaatcgtgccgatgctgccagttccggtgtattcaccatagaagtgctcgatgacgacgacgaaatggagcaggcggtgaccaagaccaaggcgaataacactagccacggcggatccagcctgaagagcgagcaggaggccaaggtgttctccaattcgcagtcacccaccgccgatctgccattcaagtatatcagcacggatgtggccacgaatacggatccctctggtggagatctccaggacgaggcggatcgcatgttcctgctcagtctgatgcccttcctgcaaagattggacagccgccggcgtctgcgcgtgcgccagaaattacagaacgtgctcatcgaggaactggagtttggctga

SEQ ID NO: 1716 - protein, 341 aa, DROSOPHILA
MANYGVGFPFIGRMSVHLPIETVKRLIAAVSRRPMLWLRNNANGQKRSDITPVWFEVGQDVNLPADICRIKWGHLRDNFRKVYIRNNLSNETPSSWRFYNDMRFMEPAVHENIMRQTRSSSKKHPPGHWTENNNVLGPDKYDSMPIVATEPICELSHSYDSELHQPSFSDISSFFEDRDCQPPENKRFKSEPSQREEDEEDDDDFDEDAASENLEEERGNRADAASSGVFTIEVLDDDDEMEQAVTKTKANNTSHGGSSLKSEQEAKVFSNSQSPTADLPFKYISTDVATNTDPSGGDLQDEADRMFLLSLMPFLQRLDSRRRLRVRQKLQNVLIEELEFG

SEQ ID NO: 1717 - DNA, 8746 bp, DROSOPHILA
agcatgattacttgtttcttcctcaggataaccgctcacttttacctgtatctgcgctccggtgcacctgcgccttttacctgcgcaccccgcccgcagttcgagttcccaattatccacggtcactgttgcaattgcatttttccagccacgggcggctcaaaatttctgtcagtgcaaaacaagttctttaagggtggtgcacgcggcaacaacaacaaccacaaggtgattccctccgcattttcgcgccacatgcgccgttaatgctaatgtaccgcgctctcgctcgctctctccgctcaccaatcacaatgcgctccggatgggcgaaacttggtcgagcctaggcaacttgataattcccttttggtgtgttgtgttttttgcctgaaaacatctccccatgttttaaaaatgattcaaagctttcgttgaataatggcgggcttaacagttctgcgatttgcttaatagggtccaattggatggagtttaactttcaaaaactttcgctaaacagaaagctcatcttctaatgagtagagtctgaaatttagacgcagaatccataaaaattcttagtggttcatgcattgttgttaaaatgttgaatgctgttttgtcttttcggaactcatttggaattccaaaatttaaggtgaaacactatttaattttaatttaaaattccttttaatttcagcagtatgattcccctctgatttgtaatcacaaaaatgttcatggccattcattgaccatcatttatacttattataatcatttatactatttataaaaattgaaatataacagttagcagaatcagtgtgaccagccattgtgaggatcaaaaactaaacctccaattcggctatgcccgcgataccctgaacgaacaggggcgcgaatgacaaaaacaacaaaaaccagcagcagcagaagggcagcgtcgtaacgagagagccgggcagagaagaagaggaagaggcaacggcagcggcgagcgcatgaacgtgagttttgcagtttgatggttaaatgcgtgcgtgaaggttggagtgaagattttgagccgaattcgaatcctagtccccgccgcaataagtgggtcagaattggagccgttcgattgggccaaacaaaaagctgggcgccaccgcagactgcagctaaaacacgccgccaaagtaattggaagaagaagcaggcgcacaataggaataattgttcatggattttttcgatttctcgttcgcttgcagaaggaaaagtgcacgagggtggaaccaagggtaaataagattcgcccgaaaacgcttggaaaatgtaaacaatctgtaagcacagcgacgataagcgattttcaaagagtttgccagctttttacatcgatcaaacactcgcataataaacgaataagaactgacgattaaatcgaattgaagtggagtgacgactatgggataccctaggaccgcgtagagtgaatgaatttgacaagtgagttaaaaaagccatggggcacgaattaagttagcataatatatgtgcgtaaatcaattcagtgctattaactaagtttgttgggggaaatgttagctgtgtaatccgcataaaaggaaatcttgtttaggacccatacgcccctgataccctggaccgaagcggacgccattatcctattagccgttatgccccatcaagcgattcgattgtttgaggttagtaacagtacatctgaccaaacttctgcatcgaccctctgtattaaacgcagttctttgcggcataagtgaaaataaatagaagataaaatgtgcatgtgagcctcccgtgcatgagtgtgcctgtgtccgtgcgccctgcgaaggagaaacagagagcggaagaaataggaaaagaagagagcgggcgaaacgaaagagagagcgacggttttggagcgcgcgcgcacatcaaaattaaaaaacaaactgtgagatacatttgggtttattttttatattttgtttaggctacataggcgatgatgatgatgttgatgagcggcaaaagcaacagagagagagatagagagagagagagagagcgagcgactcgagtgttatgttgtgttttcagtttcggtttcggatgtatcttcttcagtcggaataaggaatacacgattgtcggagcgaacggattacgcataagaactctctggaaaacgaatttcgcctcgcgaaaatccgctgaaaaggcaaagccaagccaattcaaaacggaatccgcaccgcatcaaattaaaaatcgaatcaattagcgaaaatcggtactgaacgcgcgacccaacaacaacaaaagccaagcgtcttgcatgcggctgctaaaaaaggtgtgtacgcgaaggagatgcacgtagagagcgaaagaggaggcacgagcgtgccactatcaacagaatttgataaatagactttagtccaattgctgccaaatgcaaatattgattttcactactcccaagatttcccaaaagattcctctcgacgcttttccgtttttggaaaatatacatacacaaatatacggacgatttgcggcgcagaaaccacctacatacggacatgtagagaaacttgtgtgaatacaaccctcgtcctcatccccctatgtttttgcgtcgtatcctcgctgcacgaacacaaatgtagcgctgtaaccgtgtgtgtatgtgtgtgtctgtgtgtttgtgaaaggactttaacttcttggtcgtgttttttccacgtcctgcgactcggagacagacccgtttcaatggaaaacgttcaagggtgacaagggtagtttcgctgatgcctcctccttctcctccccctcttctttctgcatggagtccttttcctgctcttgttcttcttatccttgtttttgttgccgctgtctacacggttcgaaaatatcctagaagtgcattcctttcctagggcgttgcattgtttagccgaaaaaaagggtaccaaagctgagtttgtttattgatttcatcaggactgttcgcaatccaatcgcaaccattacgcacaaccgcttttcttaaactacagatggtatggaaattcacgttgttgtgatttccctttaaacactttaaggagtgtattttctttttatagaatgctaattcatagatgttaaaacatccctaacatcttgtcgttttttaaaatctccttgtcaaaacggtaataacattcaaagttaccttaactcaaggaacgtaaaatcttgtccttaaaatgggtttatttaataatatcaacatatttgcgcattaagtatatacattttcctggcttaaatttccaatttggtttgctttaaaattttacttagaactgattaaaccgaacaagttcgttaagttcttgtttatcgaaatgcaaatccatttaaaggggtgtgatcctttacaccaactttttattaatatatattctgggccatagtgcatcttaatataagaactgaactgccaggcaaattgttttcaccacagatcgacaaaaatcatcaatcgcttgactttaatatttttccttgacgagagcaacgggaggcctaaactcaacccgcagacattcaataacccttttccaccttaaccccattcgtaaactggatttgctacccctcaagtcatactataaattaactcaaatcacccaaaatcagaatgaaggaagaaatacacgttcctgtcgtcaagttttccgcagagtgtggaagaaacagctccgtaatcctgacccggtggagggatgaaagtcggtcgttttattgggtctacgctcctcgtcttagagatggaaaccagttccgtctgttgttttatgacgtagtcgctttgtgtttgccaccccattctccccgccggaaaagtcgcttgcgcagtgctggcgaagcgaggtggtgggtggaaagacaggaaaatattgtaactacgtgataaggttgagcgctgaggtggggccccgtgagggtggtttctaatcccagtccagtttgttttcccgtgtttttggggagaaatttcccgactctagtatctgggttacagaaagtatctaaggagtacaggcagttcgccgaattgcgcgcgaaaactcgccattttagctcgtaaattaggaaatgcgtggctaattccgaaattccgggattccaaagaacttgacaatggcatgaatgcaaccaagtatcttacagatacaaaagatacacacaaatctgacctgctgccgcgcggcacacagctgcctttctcgggttgcattgcttttctcggattcgggacgggcctacttaaaggatcaggggtcggggatccggccttgtggattggtcataagaaggcaggcaagcggtcggggaattttcccgctacctacgatgatgcctagatgcagctgcaactgcctgcctaggactacttaatgaagcaccttttccttggccaatttagttaggttctacccttcggcaactgacgacgtcccgcgcgttccaaacgcagtttagaaaaaaaacacaaaacatttttatccacgagctcttcgcgtcttcgagttttcgtcaaacgtctctaaaattattcgcaaatcttactaatttttgtagcggaaaagcgccactccattgactgctgccttgtgctatagaaacgtgatctcaccactcttatgatggaacttttgtcaaacaattcggttccgcaacaaatggccagcagcaatgcgccgagcgccaacaatgtggcccactcctcaacggccaacggaagtggaggcggcagtgtgagcagcaatgccagcaactcctccgagcgactgctggcgggcatcctggagagctttcccgcctgggacctcaacgtgggactactgcccaacgtgggccagaggtgagatagaaacacaattaaaaatctcgagaggctcgacttaaatcactcttcaacttttttttctagctcaccaccacgcgcagacttctttatcaataacttcctgggcggcctggacacgcatggcgacttcagcattggacccattggcagcggtgcccgcagcaatccgaagatgtcgccagagtcatctaacaactcgagcatcagctgcggttggtgcgaggttagtgcttcaatacgctgcctggagtgcaacgagttcatgtgcaacgactgcctaagggagcatcgcaacagtccgctgtcctccaaccactcgatcgtgtccttgcccacgcccattggagcctcgcccacgggtggcagctcggtaaatgcacagactccgcccagcggcaactttatctgcgacatacacaacgagatgttgcgctacgtatgtgactactgccggaaattggtgtgtcagtgctgcacactgcacgagcacaaggagcacagctacgcgtccatccaaagctttatggtgggctcgaaggagaagctggagggcgccattgagagcagccaggtgggcacgcgctgcattaagagcagcattgacaaagcgttggccttcatccggcttatcgagcgcaattgcagcgagctgagcgataatatacgcaaggcattccgtcagtttatcattgccatcgaggaccgcgagcgtttcctcctggactttgtggaaaagctccgccagcgtcgtctggccatcctacacgatcagatggcaggcttaaagtctgctctcgccggactctccgaaacgtccgatatgcttagcaaggtggcggacaatgcctgcaacatggaccagattgaaattgccatgaagttgaccaatgggcagaggcagatggagcagtttgcgggcatatataaggacctgcagccaaaacaggaagtctttgccttcgcaccaccagattacagcctgctacaggatatccgcaaccagggtggcgttatcctggtggacgacaagaacttgcccatcgtctctagcagcaacggaattgtgccgagcgtctccagtgttaatgccgtggccgcggcctccgtgggagttgtgggaggcgttgctggagtagtcggaggcgttggcgtgtcaaacggcctggacttggccttcggcatgaacatgcccaacaatccgctgagtgttgcttcctcaagtgtgcgacgtcccctgttgcgagacaatagcttccggattccatcgcccataatgcaaccacgcggaggaagtgcctgtgggatgtccagtgggatgtccagcgctgctcttgattgggaactcaatggactgcgcagctcgccaggattacacttcagtgcgccgcgaaccacgcaggccattccgggatgcatggatctggtcaaggtgcgtaactcgaatgctctctcgctatccttcgccaccgagggccacgaggacggacaggtgagccggccatggggtctatgcgttgataaaatgggccacgttctcgtatcggatcgccgcaacaatcgcgtccaggtcttcaatcccgatggctccctaaagttcaaattcggccgtaaaggcgtgggcaatggagagttcgatctgcctgctggaatctgtgttgacgttgataatcgcattattgtggtcgacaaggacaatcaccgtgtgcaaatctttaccgccagcggcgtcttcctgctcaagttcggcagctacggcaaggagtacggccagttccagtatccgtgggatgtggccgtgaactcgcgccgccaaattgtggttaccgactcgcgcaatcatcgcatccagcagttcgactctgagggtcgcttcatccgccagatagtgttcgacaaccatgggcaaaccaaaggaatcgcctcgccacgaggcgtttgctacacgccgacgggcaacatcatagtgtctgactttgacaaccactgcctctacctgattgatccagacatcaacgacgtatgtatgattgtaaatagcttagttccattggtgcttatgcgcttttgaacttgttgcagattctttccgtgaagggacatgagggctcgggcttccatgaatttaatcgaccctccggcctgtgctgtgacgacgagggccgcattatagtggccgattcaaagaatcaacgcatcctggtcttcaatcagaacctggactttatgtgggatgtaagtacacttttcagcttaggatcaaccaacagggtattggaacctcactaacatggtattattgcgttccccaatttagatcgaggtgcgaccctccatcaatcccttgatgccgcccacgctggacgagaaagatcgcacttgcgatgtggccataatgccagacggtcgcattgtgttcctcattgaactgtcgccagactccaaggaagggtcaaacccttacaagcggtttgtgcacgtattctaaataaggccacgagtgccgatctttttttttagaccatttacaagagcgaaaccttagcgtagagtttcaaataacatgacgattatgaggaggtgccgaaaccgatttaataagaaaaaatctgaaatcatgaaagttagcgaaaatttttagcttaagtgctacaacgattacctcgatattgcttaagagttatggttacgatttggtaatttacaatacaatacgaattacacatatgtatctatggatatctatatctatacgcatatgcatatatctagcgaatatacaagcccaaccaactagaactataactaaaacaaaaacaaaaaacaaaaactaaagcgaaaggcaggcggttgagtaggatttaggagatatatataaacgtagggtccgtgagcattcagtagagttaccgaacctagtaaaagataatgcaaagagggaactcaaccatttactagatgaaaatattattacctgttagttagactgaaaggcagtttgctagctgatagaaggaggtacgaaccaggtcaggtggcgattgtgtttttttttacgggtttgcttagcggaatgaggaaactacattcgacaagagttactaaacatgatttgcagaaacactgtatggtatggtattaatgtttgtattatatttatagttcgtttgttcagttctgtttttcgtttattttaaaattactttttttttgggacatacatatgtattttaatgatttccttataattgagactgagcatttgacaacacgaactttgcgtgtacggaagcaaagcgaaacaaaacaaagaaacaaacaaaaaacaagaaaatattgatggaacccgctgacttttcgttgaactttatacaaagactgattaactaaaccgcaatttcggagccaactaaagaaccatatatggtgaggccaaaataagtgaaagagcaacacactcaaattgcaatgacattgataacgtaaagtaacttaacatagcttaacatacatactttcgcgcatatagagcgatacagatatcatatagatccgatcatccagtcacgaatcatcatgggcatagctgaaaccgagtttaactgacattcatcgacatatttacccatccatccatccatccatccactcactcataccgatcatgcatcacagggctttgtttttcgtttgtcgttactttgtaattattgtgaaaggatttagccacaggatacagattcacggcaggttgaaaggaggaggaggaggagggaggggttagctaaa

SEQ ID NO: 1718 - DNA, 3241 bp, DROSOPHILA
cagcggcgagcgcatgaacgtgagttttgcagtttgatggttaaatgcgtgcgtgaaggttggagtgaagattttgagccgaattcgaatcctagtccccgccgcaataagtgggtcagaattggagccgttcgattgggccaaacaaaaagctgggcgccaccgcagactgcagctaaaacacgccgccaaaaaggaaaagtgcacgagggtggaaccaagggtaaataagattcgcccgaaaacgcttggaaaatgtaaacaatctgtaagcacagcgacgataagcgattttcaaagagtttgccagctttttacatcgatcaaacactcgcataataaacgaataagaactgacgattaaatcgaattgaagtggagtgacgactatgggataccctaggaccgcgtagagtgaatgaatttgacaacggaaaagcgccactccattgactgctgccttgtgctatagaaacgtgatctcaccactcttatgatggaacttttgtcaaacaattcggttccgcaacaaatggccagcagcaatgcgccgagcgccaacaatgtggcccactcctcaacggccaacggaagtggaggcggcagtgtgagcagcaatgccagcaactcctccgagcgactgctggcgggcatcctggagagctttcccgcctgggacctcaacgtgggactactgcccaacgtgggccagagctcaccaccacgcgcagacttctttatcaataacttcctgggcggcctggacacgcatggcgacttcagcattggacccattggcagcggtgcccgcagcaatccgaagatgtcgccagagtcatctaacaactcgagcatcagctgcggttggtgcgaggttagtgcttcaatacgctgcctggagtgcaacgagttcatgtgcaacgactgcctaagggagcatcgcaacagtccgctgtcctccaaccactcgatcgtgtccttgcccacgcccattggagcctcgcccacgggtggcagctcggtaaatgcacagactccgcccagcggcaactttatctgcgacatacacaacgagatgttgcgctacgtatgtgactactgccggaaattggtgtgtcagtgctgcacactgcacgagcacaaggagcacagctacgcgtccatccaaagctttatggtgggctcgaaggagaagctggagggcgccattgagagcagccaggtgggcacgcgctgcattaagagcagcattgacaaagcgttggccttcatccggcttatcgagcgcaattgcagcgagctgagcgataatatacgcaaggcattccgtcagtttatcattgccatcgaggaccgcgagcgtttcctcctggactttgtggaaaagctccgccagcgtcgtctggccatcctacacgatcagatggcaggcttaaagtctgctctcgccggactctccgaaacgtccgatatgcttagcaaggtggcggacaatgcctgcaacatggaccagattgaaattgccatgaagttgaccaatgggcagaggcagatggagcagtttgcgggcatatataaggacctgcagccaaaacaggaagtctttgccttcgcaccaccagattacagcctgctacaggatatccgcaaccagggtggcgttatcctggtggacgacaagaacttgcccatcgtctctagcagcaacggaattgtgccgagcgtctccagtgttaatgccgtggccgcggcctccgtgggagttgtgggaggcgttgctggagtagtcggaggcgttggcgtgtcaaacggcctggacttggccttcggcatgaacatgcccaacaatccgctgagtgttgcttcctcaagtgtgcgacgtcccctgttgcgagacaatagcttccggattccatcgcccataatgcaaccacgcggaggaagtgcctgtgggatgtccagtgggatgtccagcgctgctcttgattgggaactcaatggactgcgcagctcgccaggattacacttcagtgcgccgcgaaccacgcaggccattccgggatgcatggatctggtcaaggtgcgtaactcgaatgctctctcgctatccttcgccaccgagggccacgaggacggacaggtgagccggccatggggtctatgcgttgataaaatgggccacgttctcgtatcggatcgccgcaacaatcgcgtccaggtcttcaatcccgatggctccctaaagttcaaattcggccgtaaaggcgtgggcaatggagagttcgatctgcctgctggaatctgtgttgacgttgataatcgcattattgtggtcgacaaggacaatcaccgtgtgcaaatctttaccgccagcggcgtcttcctgctcaagttcggcagctacggcaaggagtacggccagttccagtatccgtgggatgtggccgtgaactcgcgccgccaaattgtggttaccgactcgcgcaatcatcgcatccagcagttcgactctgagggtcgcttcatccgccagatagtgttcgacaaccatgggcaaaccaaaggaatcgcctcgccacgaggcgtttgctacacgccgacgggcaacatcatagtattctttccgtgaagggacatgagggctcgggcttccatgaatttaatcgaccctccggcctgtgctgtgacgacgagggccgcattatagtggccgattcaaagaatcaacgcatcctggtcttcaatcagaacctggactttatgtgggatatcgaggtgcgaccctccatcaatcccttgatgccgcccacgctggacgagaaagatcgcacttgcgatgtggccataatgccagacggtcgcattgtgttcctcattgaactgtcgccagactccaaggaagggtcaaacccttacaagcggtttgtgcacgtattctaaataaggccacgagtgccgatctttttttttagaccatttacaagagcgaaaccttagcgtagagtttcaaataacatgacgattatgaggaggtgccgaaaccgatttaataagaaaaaatctgaaatcatgaaagttagcgaaaatttttagcttaagtgctacaacgattacctcgatattgcttaagagttatggttacgatttggtaatttacaatacaatacgaattacacatatgtatctatggatatctatatctatacgcatatgcatatatctagcgaatatacaagcccaa

SEQ ID NO: 1719 - protein, 698 aa, DROSOPHILA
MASSNAPSANNVAHSSTANGSGGGSVSSNASNSSERLLAGILESFPAWDLNVGLLPNVGQSSPPRADFFINNFLGGLDTHGDFSIGPIGSGARSNPKMSPESSNNSSISCGWCEVSASIRCLECNEFMCNDCLREHRNSPLSSNHSIVSLPTPIGASPTGGSSVNAQTPPSGNFICDIHNEMLRYVCDYCRKLVCQCCTLHEHKEHSYASIQSFMVGSKEKLEGAIESSQVGTRCIKSSIDKALAFIRLIERNCSELSDNIRKAFRQFIIAIEDRERFLLDFVEKLRQRRLAILHDQMAGLKSALAGLSETSDMLSKVADNACNMDQIEIAMKLTNGQRQMEQFAGIYKDLQPKQEVFAFAPPDYSLLQDIRNQGGVILVDDKNLPIVSSSNGIVPSVSSVNAVAAASVGVVGGVAGVVGGVGVSNGLDLAFGMNMPNNPLSVASSSVRRPLLRDNSFRIPSPIMQPRGGSACGMSSGMSSAALDWELNGLRSSPGLHFSAPRTTQAIPGCMDLVKVRNSNALSLSFATEGHEDGQVSRPWGLCVDKMGHVLVSDRRNNRVQVFNPDGSLKFKFGRKGVGNGEFDLPAGICVDVDNRIIVVDKDNHRVQIFTASGVFLLKFGSYGKEYGQFQYPWDVAVNSRRQIVVTDSRNHRIQQFDSEGRFIRQIVFDNHGQTKGIASPRGVCYTPTGNIIVFFP

SEQ ID NO: 1720 - DNA, 5961 bp, DROSOPHILA
aataaattattaattaatattgaaaccgcgcgtctttcggctggaatattcctctcgcggtcactggatggtcttcgataagggtgctccaccacaagtgtgtgtatttactgtcacgtagagtaccttaacttgttccacaaagataacactatatttgtttgccccaggcgaacgaattgtcccatgggggaatgttgtcttagaactcgaagtgtcttaaatggcgcattgagttgcgtatcgctatatggaaatctagatctctagatctccagggctttgcccgccgaagtcagcctttgattcatggggaattactatgttctttgctggaatctaagatatgtttacaattagtcagagtaatgctcccataagtcggcacagatagcacccccgaaaatgctaagaccacgagctcagtcagtgagtttctagacgtggtgaatgaaaaccgaaagtgtttgccgatgtctagcattgaaccccgtgcggtgaccttcgcatcgatatgctccagtcgcaatcagttgttctccgtgattaattgttttgattccgctggtttgcccgtgtgccatagtcggtgattgattgggagacacgaataataataaaataataaacgagtggagtcggatgaagtggagtggagaggtgtggattgggaacggagtggtgaatcatgcagaggacgcgacacctgttccggcgatcgagggtgggtcaggtggttcaggtagctcaggtggttcaccactaaggtaaccatgtcaacttcgacccgcctgttttttccgggggttgcagtgctgaccaacatctggcctgctcctgaccctcgtggctagcacatgcgtttaatcgatatgaaagtggtggcggtttttcacgttggccaaaacaaactggagttagtccgtttcgaaaaccagtaggctatggcagggcattcagttcgaaaactatctaaatgagtgcttaattctaagctattatggatttatgtcttaagggctctcaggtaagctcagagcgacatggtctacccccttttggattaggtactaagagtggtcaaccgcagataaacctcgccacacgacagaaaacgaagcccaagtacaccagtcgttcgctgacgacgctccacaatccgtgtccccatttccggccacgctcggccaacttcctgcagcagcgcagtcgctcctcgcctttcctgggacgacctcagtcggcggaccccaagttcggtcgtcggttgagcaactactttgttgagaaggagctgcgcaacggcggcaaggtgagtgggtttaacaccctgcggtcatcggtgttgtaatattacctttttagagacaagtctcgtcgaacgacttgctgaaatccctgctggaggagcccatcaagcgcagttggctctgccgcagcacctgcaactcctccgagtccgactactcgctacacaaacgcactcccgacagcagcgaggagggggagcagttcctggtcaacatgccagttggtgagaaggtaaaatcctactcctcgtactctggaaatcagggcctcagtaacggggctcttcttcagcgcaccgccaagccagatcttccgggaagggtgtccttcagcaagccgaatatgcacgcggacttggactccagtgactgcgacaatgacaagcaggaagtgcgtcccagcatctccgctccgggtcctctaactcttcccagtttcctgagcaaagtggaacaagccgatcccgttgggcagaagaagtccgtgcattttggatccactgcagccgagggagaagttctggcggagacctacgagtatccaaagtgcccttcggagaactgtacatgcagcacgcgatcctcttccaccacaagcaccaatgaggcatcggcatcggacgttaagtgtgcctgtgatgctccaagctgccggtttatggagtcctccaagcaagtggaaccaactagtcccacacccactctcccaaaggctccgtcatcggagctagatgttataagggagtataaacaggctgtggaaggcgttcaagtggtcaagaaccacttgggaactgacaccctgaacaacattgagatactacccaactatctggacaagtacgcttctcccactaaggagaaacagaacaatctgtccgagaccaagaacatggcgaccaatagttccgctgttaacaacggttccgtcgtctacagacccgttggcaacccaagaaacttcggggcagagaataactttttgccagcagtgcaggatgataggagatcctttgcgaatggcagctccgatggcgtcattaataactatctaaaggtggcctcgacaccaccgtttgtgggcaagaaaaaggagaacgtaaagcccgccagtgccgatccaattgccaggagcagcaaatccaaggtgactaagtccacaatcaatccagctccgctgggtaagatgaagaaggccatcagtgtgggcagcctacgagaggagcggaaactctcagagtacaatctcgacaaggtggacagctggatgagcatgcaggaccagaagcaatacgatggcaagcacaagccaggactggaggacctggacgaggcacaggacaatgataccgcctcccagttgtccctaaagtcgaatgaggactccagggactcgacatatgatgaaatagtatctgtcatcaaagagatcgaagaggacaagaaaaggggttagttactggtttggatctagaagggaacgttcctcatatttgatttccttgacagacaacttctccgagggaatccccagcgaactgaacctaaacctagattcccgctgtgagacggccgacacagtgactgtgagtgaaggtaaagttcccgaaagtggagataagtacaagtaagtaaatacaaattaccacattggtatccatccagttatatactatggtatcctaacagggacatcctggcctacctgaacaatgtggagagtagttgcgacaagacgttgatggaaacacgtcgttccataccggatagcaatcgatcggaggtggagttcgtggtggagcccgatgtcaccgatgaggtgcccaagtgggtgaagagtcatggattcccttgaagttcttcacttactatccttaccctttaattcaggctatccgagttgctgatgctgcccaaccatcagcttgccagaagggtcattgccctgagcttgcgggccaacgagttggccaatgccatccatatgtccaaggagcacgtcttccagctgcgtggcgaaaagcagaagagcctgcgggccgaaaaatccaccgccgcggccaagctgcgtgatcagaagaagcactatgaggaagtggttacccgccaccagggattcatcgagcagctgctcaaggacaagggctccctctgcgagaaggtggcggccctcacgcgtcgcttggagagccagaaccaggcatgggagcaccgcttggaaactgagctggctaggaccaaggagaccaccatggcgggcgaaaagatccggcgagagcgatgggtgcgcgagaacaccaagaaaattaaggtataggttagctttaaggatctcgattcttgttatcctttaaagttgcacatataaagaatggcttaggaatattccatcattggatcagtaattagtatcttagtttagtcaaaactattacttatgatagggtccagaatattagtagttttttacatagcattatattaataatcaccaatttacttcattttaaaggaacttactgttaagggcctggaggcggagatcaacaaaatgaactgcgaccaccaacgcgaggtgaccgagctgaagcgcacccaccagatgcagttgctggacgccttggaagaggcacgcacgaagcacgagcagatcgagactagcattcgcgagagctgcgcccaagatcgtgaggccattatcgagaaggagcgcactgccatccgggagcgattcgagcgccaactggaggaggagcagaggacacaggcggagcagcgccagaaactgaccgaggagtttgccgcagagcgtgatcgcctgcagtcagaactacggcagcgggagaatgagcaccaagcccgaagacaagaggctttgcgggaacaggagcaagagctggagcaggcaaagtttgaaatgcaggagcgcatggccaagcaggaggagaagtatcagaaccgtgtcaacaccatcgagcagcagtaccaggctgactttgagctgtggaagacggagcacgaaaacaagaccaagttggcccaggcggagaaggagaacgccataaggcaacactaccgggcggagagagatcgtcagctagacgaactggtggtgcggatggaggccgacgcactgcagcacaaagaggagcacgagctaaagatgaagtgagtacatgcaggccaaataatatgagcccccctcctaagcccaatattttcagtcgcctcaaggagaagtacgagaaggatttagttctggccgagagcgtcgagaagtcgttgcgggaaaagtatgccgagactcgcggcaagctggcggaggcggacgcccaggtgcggaacagccaggcggaggtgaaacagctgcagttggagctgagccacagcaaaaagatgtgcggcgacatcatcatggagcgggacagactgcgcgacaaccttaacgcggacatccagagcgagctgggagtgctaaacgagcgccacaagcaggagatggatcagcttcagaagcgcgtccaccagaccattcagcggcaggaggagaccattgagatcctgaagggcgacaacgatgccctcaggcagcagtgtctgaagctcaacgctgtcatacgacagcagcgcaaggattattgtgttaaatagacaattactcgaaataggtgtatgggacctccaagctaaatattattaggaaggttttttaataaatgagtgacgaatggcttaaaaatgattttgaaaaatgtaaatggacttaaataattgtaacggctgtaaatgaaatcgataagcgtgctataaataaccgattcctctcaaagcggtgtggtattttcagccacaatagctgaggtaacactacacgcgggtcaacaaaaacaatacttgttcattttgaatgtttttataattggaggtttttataatggaatatgtgcaggaaaatagaggatttaccaatatcggcaatagctttggcttcgtatgcagagtaagcaattcatcctacacattaaatgagttcattttaattgccagtcttttacgcagattatagaaaagcaatgcggaattcaacaattgggagctcttgaaaaatacgaatttgccgagctactgaagattctgaatggcacagaaaaggtgagtagattgaagaagagatattcgtaatcacacctattctgtgcagtttctggcctccaagttcttctgccaactgccagcgaatgtcggcagttttcgagttctccgacagctacaggaacttcgcatcctgacggccacgcagtacatctttaggtgggtttcataaagaagctgctagatgtacggacccccatttatccgtaactgaattcacagcaaggaggactccgatcaactgcaggtggacctgatcatattcctggaatctgagttcgaacttctcgcaaatgttttcttttcagcggcttacggttggtttctcttgatcttgattctagctatttccccatttctactgatttatacaccgtcagatgctgaatctgcgttgaagctaaccttgatactgacaagcgctttggggaatctctattccggcctcgttggcaatcccaagatatgcagcttggcatatgtggagttcttgtgcaaa

SEQ ID NO: 1721 - DNA, 3384 bp, DROSOPHILA
atggatttatgtcttaagggctctcagaaaacgaagcccaagtacaccagtcgttcgctgacgacgctccacaatccgtgtccccatttccggccacgctcggccaacttcctgcagcagcgcagtcgctcctcgcctttcctgggacgacctcagtcggcggaccccaagttcggtcgtcggttgagcaactactttgttgagaaggagctgcgcaacggcggcaagagacaagtctcgtcgaacgacttgctgaaatccctgctggaggagcccatcaagcgcagttggctctgccgcagcacctgcaactcctccgagtccgactactcgctacacaaacgcactcccgacagcagcgaggagggggagcagttcctggtcaacatgccagttggtgagaaggtaaaatcctactcctcgtactctggaaatcagggcctcagtaacggggctcttcttcagcgcaccgccaagccagatcttccgggaagggtgtccttcagcaagccgaatatgcacgcggacttggactccagtgactgcgacaatgacaagcaggaagtgcgtcccagcatctccgctccgggtcctctaactcttcccagtttcctgagcaaagtggaacaagccgatcccgttgggcagaagaagtccgtgcattttggatccactgcagccgagggagaagttctggcggagacctacgagtatccaaagtgcccttcggagaactgtacatgcagcacgcgatcctcttccaccacaagcaccaatgaggcatcggcatcggacgttaagtgtgcctgtgatgctccaagctgccggtttatggagtcctccaagcaagtggaaccaactagtcccacacccactctcccaaaggctccgtcatcggagctagatgttataagggagtataaacaggctgtggaaggcgttcaagtggtcaagaaccacttgggaactgacaccctgaacaacattgagatactacccaactatctggacaagtacgcttctcccactaaggagaaacagaacaatctgtccgagaccaagaacatggcgaccaatagttccgctgttaacaacggttccgtcgtctacagacccgttggcaacccaagaaacttcggggcagagaataactttttgccagcagtgcaggatgataggagatcctttgcgaatggcagctccgatggcgtcattaataactatctaaaggtggcctcgacaccaccgtttgtgggcaagaaaaaggagaacgtaaagcccgccagtgccgatccaattgccaggagcagcaaatccaaggtgactaagtccacaatcaatccagctccgctgggtaagatgaagaaggccatcagtgtgggcagcctacgagaggagcggaaactctcagagtacaatctcgacaaggtggacagctggatgagcatgcaggaccagaagcaatacgatggcaagcacaagccaggactggaggacctggacgaggcacaggacaatgataccgcctcccagttgtccctaaagtcgaatgaggactccagggactcgacatatgatgaaatagtatctgtcatcaaagagatcgaagaggacaagaaaagggacaacttctccgagggaatccccagcgaactgaacctaaacctagattcccgctgtgagacggccgacacagtgactgtgagtgaaggtaaagttcccgaaagtggagataagtacaaggacatcctggcctacctgaacaatgtggagagtagttgcgacaagacgttgatggaaacacgtcgttccataccggatagcaatcgatcggaggtggagttcgtggtggagcccgatgtcaccgatgaggtgcccaagctatccgagttgctgatgctgcccaaccatcagcttgccagaagggtcattgccctgagcttgcgggccaacgagttggccaatgccatccatatgtccaaggagcacgtcttccagctgcgtggcgaaaagcagaagagcctgcgggccgaaaaatccaccgccgcggccaagctgcgtgatcagaagaagcactatgaggaagtggttacccgccaccagggattcatcgagcagctgctcaaggacaagggctccctctgcgagaaggtggcggccctcacgcgtcgcttggagagccagaaccaggcatgggagcaccgcttggaaactgagctggctaggaccaaggagaccaccatggcgggcgaaaagatccggcgagagcgatgggtgcgcgagaacaccaagaaaattaaggaacttactgttaagggcctggaggcggagatcaacaaaatgaactgcgaccaccaacgcgaggtgaccgagctgaagcgcacccaccagatgcagttgctggacgccttggaagaggcacgcacgaagcacgagcagatcgagactagcattcgcgagagctgcgcccaagatcgtgaggccattatcgagaaggagcgcactgccatccgggagcgattcgagcgccaactggaggaggagcagaggacacaggcggagcagcgccagaaactgaccgaggagtttgccgcagagcgtgatcgcctgcagtcagaactacggcagcgggagaatgagcaccaagcccgaagacaagaggctttgcgggaacaggagcaagagctggagcaggcaaagtttgaaatgcaggagcgcatggccaagcaggaggagaagtatcagaaccgtgtcaacaccatcgagcagcagtaccaggctgactttgagctgtggaagacggagcacgaaaacaagaccaagttggcccaggcggagaaggagaacgccataaggcaacactaccgggcggagagagatcgtcagctagacgaactggtggtgcggatggaggccgacgcactgcagcacaaagaggagcacgagctaaagatgaatcgcctcaaggagaagtacgagaaggatttagttctggccgagagcgtcgagaagtcgttgcgggaaaagtatgccgagactcgcggcaagctggcggaggcggacgcccaggtgcggaacagccaggcggaggtgaaacagctgcagttggagctgagccacagcaaaaagatgtgcggcgacatcatcatggagcgggacagactgcgcgacaaccttaacgcggacatccagagcgagctgggagtgctaaacgagcgccacaagcaggagatggatcagcttcagaagcgcgtccaccagaccattcagcggcaggaggagaccattgagatcctgaagggcgacaacgatgccctcaggcagcagtgtctgaagctcaacgctgtcatacgacagcagcgcaaggattattgtgttaaatag

SEQ ID NO: 1722 - protein, 1127 aa, DROSOPHILA
MDLCLKGSQKTKPKYTSRSLTTLHNPCPHFRPRSANFLQQRSRSSPFLGRPQSADPKFGRRLSNYFVEKELRNGGKRQVSSNDLLKSLLEEPIKRSWLCRSTCNSSESDYSLHKRTPDSSEEGEQFLVNMPVGEKVKSYSSYSGNQGLSNGALLQRTAKPDLPGRVSFSKPNMHADLDSSDCDNDKQEVRPSISAPGPLTLPSFLSKVEQADPVGQKKSVHFGSTAAEGEVLAETYEYPKCPSENCTCSTRSSSTTSTNEASASDVKCACDAPSCRFMESSKQVEPTSPTPTLPKAPSSELDVIREYKQAVEGVQVVKNHLGTDTLNNIEILPNYLDKYASPTKEKQNNLSETKNMATNSSAVNNGSVVYRPVGNPRNFGAENNFLPAVQDDRRSFANGSSDGVINNYLKVASTPPFVGKKKENVKPASADPIARSSKSKVTKSTINPAPLGKMKKAISVGSLREERKLSEYNLDKVDSWMSMQDQKQYDGKHKPGLEDLDEAQDNDTASQLSLKSNEDSRDSTYDEIVSVIKEIEEDKKRDNFSEGIPSELNLNLDSRCETADTVTVSEGKVPESGDKYKDILAYLNNVESSCDKTLMETRRSIPDSNRSEVEFVVEPDVTDEVPKLSELLMLPNHQLARRVIALSLRANELANAIHMSKEHVFQLRGEKQKSLRAEKSTAAAKLRDQKKHYEEVVTRHQGFIEQLLKDKGSLCEKVAALTRRLESQNQAWEHRLETELARTKETTMAGEKIRRERWVRENTKKIKELTVKGLEAEINKMNCDHQREVTELKRTHQMQLLDALEEARTKHEQIETSIRESCAQDREAIIEKERTAIRERFERQLEEEQRTQAEQRQKLTEEFAAERDRLQSELRQRENEHQARRQEALREQEQELEQAKFEMQERMAKQEEKYQNRVNTIEQQYQADFELWKTEHENKTKLAQAEKENAIRQHYRAERDRQLDELVVRMEADALQHKEEHELKMNRLKEKYEKDLVLAESVEKSLREKYAETRGKLAEADAQVRNSQAEVKQLQLELSHSKKMCGDIIMERDRLRDNLNADIQSELGVLNERHKQEMDQLQKRVHQTIQRQEETIEILKGDNDALRQQCLKLNAVIRQQRKDYCVK

SEQ ID NO: 1723 - DNA, 4994 bp, DROSOPHILA
ggcagcgccgattaacgctgctcatcgatattttttagcaagtgcttaaagcgccatctatcaactattggcgtgcttttcaaaagtggattctacattttaaatggtaagttttaatattcaagttttaagatagtagcgcttaataacttttgatagacttggaaacaagtactactactaataataaataatgtgtaataatatgtactgagcagtacttttagtataattcgggcacaccagcttaacggtcacactggtcgtcattttgccgccaaaatgaaaaaaccgcgcttttttttaattcttccattataaataatgtagttaaagaactgattcctgtttataataaccatttctattccactttggcgcaaataatattttctatgtattatgctattctgtggtccacaaatctccacaaataaattgaaacaagtactttcgttttttcgttttgttttaactgaatttaatagtgcacaattagtagtatttagtaggtagtcgcataaccattatattaaaaacttagtctaagctcttgttgcgtgttgggtgtgttcatttcttagttacttttcgtatcgttacgatcgacagttgcaactgccttgtgggtattatctccagccattcgggtatctctaggattcgccaaacgtgaatttttttgtttttttttttgttttggataaataaattacactacagcagcagcagcagcacatataggccaggctatatatcttctatatatgtatatgtacgcgtatatcgtatatattaaaaaatatgtgtatgcatattgtgatttcagtctttgattttaaacttaaggggttaaatgtacgcaaactgttagaaaaaaacaaaaaaaaaatgtataactaagcctaggaattggggattaatcgattcggaaattggaaatgtctttgtctccggggcccagccccaaacctccgtgtggaaatgtatggatttcccattagggtttgctctcttcacccgtctgctccgcttgatctcctccagaaccagaaacgggtgactgaatggcctccgcctgcgcttgcgcatgcgcctccgcctccatggatgcctgcagctccacaaagatatcaatgagattgttgataccgatgagatagccatcttcgtggttgcccaccttccaggcggagtagtgatcgatccgcagctgcggcggcagctccaccgtcttggcgaaatcaattagccatatgctggcgtgggtctgatcgtggacgaagagcagggagctgccgataacctcgtgggtctggaagaattccgagaccgcaagggtggcccttatggctcgcaaacgctgtatgtagcggggctgtatgcaaaaaaaaaaaaagaaaagaaaataaaataaaaagaaaagaaaaagtaatgacaagcgcagggaatccccaagttaatggcattcaactgggcatgcttggctaatttgaatacccaccaaaatatgtgggtgaccgctgaggaactcgagaaaggccaacttgatttgttcgcgtgacttcgtcgttttgaaatctttggaactggtgccatcgctcttcttgatgccctgcgaatgatgtttagacgattaaattaatggctttccattaacttttctgaatgaataattaatgtttacatttgactttaaggataaatgtgtagcctggcactttgcacacgcttctcattcacatagtcgtatgttaatttagtggtttcgtttttttgggttggctattcaagtttaaatggaatagattcaattcaaattcaagcccacctcgatgcggaatcccagcgtggccgtgctggagatggtctcacgccagaccatgtaacgtggcttggtcaccgccttggctgcgtgctcctcggcggtgggagcgtggctgtcgatttggatcatcttgtcgtacatatccttgcgcagcttgggcttctccttggccttggacagctcctcctccagataggtgcgcacacccaccttgcagtccatgacgcatggctgcacatagtcactgagcagatcctgcagctgcaggtaaactgtttgtgccacacgattatatcagttagattagttagcaaggataatcacaattcgtttcactcacgttcgccatcctcgctggtcacctgacccttgtaaacgggcacatagggcctaagcagatcgtgcatgagaatctggaagcactcctcctccttgggacagagcttcttgagcacggtgcccggttcgggacctgccttgaagttgccctggtgtccggccagttgaacccatggatagcgctgcttcttgtacgtctgaaagaagggcgtccactgaacgatgttgcgaatctttcgccagccggagctctgcaagaatcgtgggtaaatcgattaactcaagatgatgctagaaaaatcagcatttttaattcttataatacaagtgtgcaaagtctgcgagaataatacgttaaatcaattagtaaatagctcataataatgttacagactgttgctacatttcgctaataatgcattccactaattaagttttgtttgtttattggaaatgaaacagtttgcatgagacagctggctaatgacccatttttgtgccctgatttttcagctgagttgttatcactcgatcacatgtgaaaacacgagcggaaaaatcacgtggatacaccaacttgtttttgatctataaatttggttgtatttagtacttaaagttgttcaagtcgaatactaataactaatataatgtatgatgtatacaaaccctttcaaagaacttaaactatattattagatcctgagatagatcctatatctttatcggactacccatcctaccttcttgccggtggtgctggcttgggatgcggcacccgatcccgatcccgttgccgagccagccgccgaggtcgacacatccgagtcccattcggagctgagatcatcgctgctggcgtagccatagtcccgcggcatgggcacctccagcagcgacttggagtactgaatgtagccgggacacagactttggcccaatggcgaatgcgatcgtcgtggtcccgggctcgttggcgatgctggcgaggtgggtgagcccaggggcagcgaatgctgttgcgacagcttgcggcccaaattcaagcgcaggccacaattgtgggccacatgctcacccgaattggccgtaatgctaatggtcggcatcgatagcttcttctccgctcgctggcgaatcccatgggcctgggcgaaggccaaactgcatttacgcggctgcatattgttgccggagagtttgcggcgaaagatcttcttggaggaggaactgggcaaagcgttggcattgctggcgccgccacttgactccgacttgtggcccgcatcctcgctgtccgccgatgtcggtctgcgtccggaatcgctatcctcatcggcctcctcgccattgtcatcgtcaccattttcgttttcgcctccatttccatcctcttcctcgtcatcgtcgtcatcgtcgaatttcaatttggatatctcctcgggcggaacgtcggggaagtgcagcagcttcacggtcaccttcttgcccgcctcattgtagtacacctccttggcgctcattctgtcgaaatcctcgtagattcgtacctgcggcgagggcggcggtgtcggtggcgttacggagcccttggctttgccgtttaggtttatgccacttgcacttgcacttgcacttccgtttccggttgccaaggccggtaatctagctggcccgttcttctgcttctgattctgattggatttattcggctgctgtggctggctgagggcgcacacggacatcttacatggattctggcccacggcactcgattaagtgcatcagtggcaatacctgatagcgaatgcaactatctatgtatttctgcaaattgtgtaacgaaaattcgtagtttgagatacacagatcgagtcgccgaagagtcagagagctggagagctgagcaatcgttgcacttgcgaacccgttcgcgcctaaaaaccacatcatatttccccgccgcgatcataacgagcgattgagcgaatcaaatgggcacccaagccacccagatacccttccatcaagtcactgattatgggagtctatagagcatttagatctgcctgcttgcccagtaaagcctattgagtatttatgtactttcccctgaaagtccctgttaatggtgaaaccccccatttggagaatcccttctggatcagggaatcatcgcttcgttgcagctgaatctttggcttttgactgcttttgggctgctgctgctgctgcgactgtaatgcgcacacatcaatcaaaattgattaaatttaccacatacatatgtatgtgccatgtaacgcagtccgcaaaaagcaaagatagacgaaactaagtaggcattgtcggagcgtgttggcatcttggcagctccatctgcggcatccgaagctagaagctggcaaaatggtcaaactggccaatggtcaccggctacatcggcaacatgagcaccagcggcaccaagtagctaacagcgacaccatcgagcggcaaccacaagcgaaaccgcccagagtcgggcaaggcaatccaatccaatccgaaacccaaatcgaacagcacattatgataataatggaaatgccagcgacgcggctatccagttacgccagtgcacaacagcaacaatactcgcatatatatatgtatacatatatctaccgccatacaaatacaaatgcatatgcatgtgtatatatgagcatgtatgtatatgcgaactgaaatttctttataacatttgacgtcatttgcaaatgttgacgccgtcgtcgcgaggcgataacgaagcaccaacagcaacatgagcaacatgagcaac

SEQ ID NO: 1724 - DNA, 2095 bp, DROSOPHILA
aaatacatagatagttgcattcgctatcaggtattgccactgatgcacttaatcgagtgccgtgggccagaatccatgtaagatgtccgtgtgcgccctcagccagccacagcagccgaataaatccaatcagaatcagaagcagaagaacgggccagctagattaccggccttggcaaccggaaacggaagtgcaagtgcaagtgcaagtggcataaacctaaacggcaaagccaagggctccgtaacgccaccgacaccgccgccctcgccgcaggtacgaatctacgaggatttcgacagaatgagcgccaaggaggtgtactacaatgaggcgggcaagaaggtgaccgtgaagctgctgcacttccccgacgttccgcccgaggagatatccaaattgaaattcgacgatgacgacgatgacgaggaagaggatggaaatggaggcgaaaacgaaaatggtgacgatgacaatggcgaggaggccgatgaggatagcgattccggacgcagaccgacatcggcggacagcgaggatgcgggccacaagtcggagtcaagtggcggcgccagcaatgccaacgctttgcccagttcctcctccaagaagatctttcgccgcaaactctccggcaacaatatgcagccgcgtaaatgcagtttggccttcgcccaggcccatgggattcgccagcgagcggagaagaagctatcgatgccgaccattagcattacggccaattcgggtgagcatgtggcccacaattgtggcctgcgcttgaatttgggccgcaagctgtcgcaacagcattcgctgcccctgggctcacccacctcgccagcatcgccaacgagcccgggaccacgacgatcgcattcgccattgggccaaagtctgtgtcccggctacattcagtactccaagtcgctgctggaggtgcccatgccgcgggactatggctacgccagcagcgatgatctcagctccgaatgggactcggatgtgtcgacctcggcggctggctcggcaacgggatcgggatcgggtgccgcatcccaagccagcaccaccggcaagaagcagagctccggctggcgaaagattcgcaacatcgttcagtggacgcccttctttcagacgtacaagaagcagcgctatccatgggttcaactggccggacaccagggcaacttcaaggcaggtcccgaaccgggcaccgtgctcaagaagctctgtcccaaggaggaggagtgcttccagattctcatgcacgatctgcttaggccctatgtgcccgtttacaagggtcaggtgaccagcgaggatggcgaactttacctgcagctgcaggatctgctcagtgactatgtgcagccatgcgtcatggactgcaaggtgggtgtgcgcacctatctggaggaggagctgtccaaggccaaggagaagcccaagctgcgcaaggatatgtacgacaagatgatccaaatcgacagccacgctcccaccgccgaggagcacgcagccaaggcggtgaccaagccacgttacatggtctggcgtgagaccatctccagcacggccacgctgggattccgcatcgagggcatcaagaagagcgatggcaccagttccaaagatttcaaaacgacgaagtcacgcgaacaaatcaagttggcctttctcgagttcctcagcggtcacccacatattttgccccgctacatacagcgtttgcgagccataagggccacccttgcggtctcggaattcttccagacccacgaggttatcggcagctccctgctcttcgtccacgatcagacccacgccagcatatggctaattgatttcgccaagacggtggagctgccgccgcagctgcggatcgatcactactccgcctggaaggtgggcaaccacgaagatggctatctcatcggtatcaacaatctcattgatatctttgtggagctgcaggcatccatggaggcggaggcgcatgcgcaagcgcaggcggaggccattcagtcacccgtttctggttctggaggagatcaagcggagcagacgggtgaagagagcaaaccctaa

SEQ ID NO: 1725 - protein, 382 aa, DROSOPHILA
MPRDYGYASSDDLSSEWDSDVSTSAAGSATGSGSGAASQASTTGKKQSSGWRKIRNIVQWTPFFQTYKKQRYPWVQLAGHQGNFKAGPEPGTVLKKLCPKEEECFQILMHDLLRPYVPVYKGQVTSEDGELYLQLQDLLSDYVQPCVMDCKVGVRTYLEEELSKAKEKPKLRKDMYDKMIQIDSHAPTAEEHAAKAVTKPRYMVWRETISSTATLGFRIEGIKKSDGTSSKDFKTTKSREQIKLAFLEFLSGHPHILPRYIQRLRAIRATLAVSEFFQTHEVIGSSLLFVHDQTHASIWLIDFAKTVELPPQLRIDHYSAWKVGNHEDGYLIGINNLIDIFVELQASMEAEAHAQAQAEAIQSPVSGSGGDQAEQTGEESKP

SEQ ID NO: 1726 - DNA, 4446 bp, DROSOPHILA
atgtaccccttacaaaaaatgcgaaaattgacccaaaaattaattttcctaaatccttaaaaaaatgataggcgtcgttagtattggtaaatagctgctcaaaacagttattctttcatctatatgactaattttagccaagatatgatgaaaattccaatgggaattgtttaatttatgcaaaagccgtttttcagaatattcggcataaaataatatgttttgtgcccagaactttaataataatttataaaaaataatcggcttgattaaaaaacaacataatatgctaactactgttacttttttttttttaattcttcagtaacattcgcgagggcatcatccggtgcattttggccacggacatggcccgtcacaatgaaatcctcacgcagtttatggagataacgcccatcttcgactatagcaatcgtgcccacatcaatttggtatgtcgcacccaccacattctcgatgagaaggtattaatttaactttcgatacattctttcgcagctctgcatgatcctgatcaaagtggcggacatttcgaacgaggcgcgacccatggacgtggccgagccctggctggaccgcctgctccaggagttctttgcccagagcgcagccgagaagtccgagggattgccggtgacgccgttcatggatccggacaaggtcagcaagccgggctcgcaggtgcgcttcatcggactcgttctcctgccactattcgaggctctaggcgaactggtgccggagctaaccgagctcatcatcatacccgtgcgcatcgccctagagtactacaggtactattcatttctaatgcgaacttgtggcacaacaacattttatttaattatctaattaatttttgtgccccactttcaggcgcctcaacgatgcccagacaaaaacgcgcaaatcggtggcggacagcaatacgtccgcaacctccgatagcaacagcggcaccatcgattccaatgcggcgatggtcagcacaccgggaggcgccagcgataagctcagcttggacaagggacagggcaattcgcagggctccggcggcggaggaggcggaggaggaggaggaggtgccggtggtgggacaggatctggatgcggcagcaatgccgctggtagcgtatcgccacaaatgccacgctccggatccgggatcagtgttaagtcgcgacgcagcattccatcgcaaaagtccgcctcgaggacgtccgtggatgagcccggaggaatggcgtcggagctccacgatttgccggagggcagcgagagcggtgattcggaaacggccaccgaagttgatgtaagtggcccagaccttctgtcacatgtcacatgattgtgaacaaaattgaactacattatctattaacatacttacgaataatttaaaaataatctttatttaatatattacccacctaacgaaatcatttaaaatattttaatatcttttcgactggccaacttcaattcctgcgtaggaacacaaaaaatgtctgtaaacctgaagtgaatattttaacgcaattcaaatggtattaaatttcatttttgccgaaatatatttaatgaattcagtttgtgttcttagtgttaatgccaatgcaaaataaatatatcctttaaagaaagtagacttttttattttgctaaatatttgtaggctttaatgtgtgtaaaaatgcttctattaaaatcattaaaaagtaaagagaaattttatgtaaagtgtattacatttggtttttagttcattcattacaagacataactttctcatcgttttaagctgtgaaattccattaaaaactgacacgaagaaaagaatacgggtcaaagtttgtttcagacaattacattgtgcacggcatataaactaatcagtattttccgtttacattcgatttttgcaggtggccgagaagacgtccaagttcaaggtggacaccgagggcagcagcaaccggagcaagtcctcgcactcgacctcccggaagtcctctcgcgagaagcgtccctcgatgatcggtgaactgtgcagcagtggcggtggccagcgaatccggaactcgtacggcaacatccacggctatcacagcaatcgctgtcattttggcaacaatcgggcggttagcctggatcagtatagtagtgccggtaacaatcgccgcctctcggacggactgccgcaggtgatctcggacagcaatgttttctacggccggcacaatcggagcagcacggagaccactgttgctgttggcaatccgcaggataccaatgcgaataccaatcatccggtcggatgtcagctgaaagagctattggcccgcaccgaagcggactcggatggtgagggcgatggcaatggcagagaggacaaaaagattccattggtcataccgtcgatgccgcagctggccacatcatcgaacggtaacatatcgccgacactggtggtcaccgagcaaatcctgcccagcaacggcagtacacggagcagcgccagcagtggccgtggcggctccggcgtacctggaggatcgggtggctctgggatgcctggaccatcggccggttctggtagttcatggaaatcgagactgcgccagttctccgattactttagcttcagctttgataagagcaacaagcgctttggcagcacacgtagtagtccgtgtcccggttccaattccagttcgggacggaccaataacaatgccaatggattgggtgaaaatcaggacggattgggagcaggaggcggtataaagccgggcatgtgctgcaccaccatcaccaatagctcaggatccacggtaaaaggcgagacgagaggaggtaccgccggtgcaggcggcggtgctctgaccaccatgaccaccggaaatgatgcccatcaacgccatcgcgcctatagcctggatgtgcccggcatgatgagatactcctccaacgacagcagtcgccatcccagcaacaatacgcttcagagtgcgggtggcggtgctggtttgaccaccggattagaggtcactgcccaacgagtgccgcccagtttgagcgttgaaatgggcctggccagcggctcatcatcagaggcgggcccaaagatttgacaacaggggagcaccaggcaggatgcggtagccattagcaagggctacgacggggccgttgagcaacaggaggaggaggaggaggaggaggatgagcaggaggacgatgacgaggatgagggacgcgaggagcaccgccagctgcagcggcatcagcagcagccggacgcttcgtccagctgcgaggtgtcctccatgtcgatgaccgtgtggtcggcgattggtcagcgtttgaacgccctcgtctgccattgctgcgaacgcaaattaccggaaccagaaaatgtctaagtgggtggaaagtagggccaggtttaacccagaacccatcgccacccatttaagatgcaatcaaatgcccccatcccctgtcctcatttttagcagctgggggattccttggctttcacagtcattgacttttgcctggtagcttaggtttacgtttaactcctagcaaattacattaggtttccactgattttactctcttgttttgtttttttttttttttttaattattattttatatttttatcttgttaccttttaagtatttttatttatgtacatgcgcatacacacacacacaaatatatatatatatatacatctattattattgaacgaagttgctgttgtgggtagaaaaactacgagctgcaagtacctacctgaaatgcctcgatcagcaaagcgaggtaaatgcattaacgacattgccaacgataatagttcactaccaagttagcatggcaatggaagagaactaactttgttagctcctttgattcagatgaatactgttttttttcttttttgctgggaatttctcgttaatagctgcatggcagcatcaattttccgtgccagtgaattctcagaaggagaggattcggattccaggatttcagacaccaaaaaaaaaaaaaagtttgaggccttcagttttgcttccatgcgaaattcacgtctaattacgcaaaacaaatttcgcccattgaaatgcatggtacatagggtatatggctacatcgatgtatgcaacaggcatggtcgctggatttatccgatgtatgtagattcagtcccagtcgactaattccatttgcttgtagctcgttgcctgtttctcccgctttttgcccaattttttgtgttcgtttggttcgatttttgcacgtgggatgaaagtcgctgcattgggatgcccgcaggagcaatgtccatggccaaacgattggattgggcagccgcagctgttgatgttgctgctgctgctgctgttgct

SEQ ID NO: 1727 - DNA, 2304 bp, DROSOPHILA
ttcagtaacattcgcgagggcatcatccggtgcattttggccacggacatggcccgtcacaatgaaatcctcacgcagtttatggagataacgcccatcttcgactatagcaatcgtgcccacatcaatttgctctgcatgatcctgatcaaagtggcggacatttcgaacgaggcgcgacccatggacgtggccgagccctggctggaccgcctgctccaggagttctttgcccagagcgcagccgagaagtccgagggattgccggtgacgccgttcatggatccggacaaggtcagcaagccgggctcgcaggtgcgcttcatcggactcgttctcctgccactattcgaggctctaggcgaactggtgccggagctaaccgagctcatcatcatacccgtgcgcatcgccctagagtactacaggcgcctcaacgatgcccagacaaaaacgcgcaaatcggtggcggacagcaatacgtccgcaacctccgatagcaacagcggcaccatcgattccaatgcggcgatggtcagcacaccgggaggcgccagcgataagctcagcttggacaagggacagggcaattcgcagggctccggcggcggaggaggcggaggaggaggaggaggtgccggtggtgggacaggatctggatgcggcagcaatgccgctggtagcgtatcgccacaaatgccacgctccggatccgggatcagtgttaagtcgcgacgcagcattccatcgcaaaagtccgcctcgaggacgtccgtggatgagcccggaggaatggcgtcggagctccacgatttgccggagggcagcgagagcggtgattcggaaacggccaccgaagttgatgtggccgagaagacgtccaagttcaaggtggacaccgagggcagcagcaaccggagcaagtcctcgcactcgacctcccggaagtcctctcgcgagaagcgtccctcgatgatcggtgaactgtgcagcagtggcggtggccagcgaatccggaactcgtacggcaacatccacggctatcacagcaatcgctgtcattttggcaacaatcgggcggttagcctggatcagtatagtagtgccggtaacaatcgccgcctctcggacggactgccgcaggtgatctcggacagcaatgttttctacggccggcacaatcggagcagcacggagaccactgttgctgttggcaatccgcaggataccaatgcgaataccaatcatccggtcggatgtcagctgaaagagctattggcccgcaccgaagcggactcggatggtgagggcgatggcaatggcagagaggacaaaaagattccattggtcataccgtcgatgccgcagctggccacatcatcgaacggtaacatatcgccgacactggtggtcaccgagcaaatcctgcccagcaacggcagtacacggagcagcgccagcagtggccgtggcggctccggcgtacctggaggatcgggtggctctgggatgcctggaccatcggccggttctggtagttcatggaaatcgagactgcgccagttctccgattactttagcttcagctttgataagagcaacaagcgctttggcagcacacgtagtagtccgtgtcccggttccaattccagttcgggacggaccaataacaatgccaatggattgggtgaaaatcaggacggattgggagcaggaggcggtataaagccgggcatgtgctgcaccaccatcaccaatagctcaggatccacggtaaaaggcgagacgagaggaggtaccgccggtgcaggcggcggtgctctgaccaccatgaccaccggaaatgatgcccatcaacgccatcgcgcctatagcctggatgtgcccggcatgatgagatactcctccaacgacagcagtcgccatcccagcaacaatacgcttcagagtgcgggtggcggtgctggtttgaccaccggattagaggtcactgcccaacgagtgccgcccagtttgagcgggagcaccaggcaggatgcggtagccattagcaagggctacgacggggccgttgagcaacaggaggaggaggaggaggaggaggatgagcaggaggacgatgacgaggatgagggacgcgaggagcaccgccagctgcagcggcatcagcagcagccggacgcttcgtccagctgcgaggtgtcctccatgtcgatgaccgtgtggtcggcgattggtcagcgtttgaacgccctcgtctgccattgctgcgaacgcaaattaccggaaccagaaaatgtctaa

SEQ ID NO: 1728 - protein, 751 aa, DROSOPHILA
MARHNEILTQFMEITPIFDYSNRAHINLLCMILIKVADISNEARPMDVAEPWLDRLLQEFFAQSAAEKSEGLPVTPFMDPDKVSKPGSQVRFIGLVLLPLFEALGELVPELTELIIIPVRIALEYYRRLNDAQTKTRKSVADSNTSATSDSNSGTIDSNAAMVSTPGGASDKLSLDKGQGNSQGSGGGGGGGGGGGAGGGTGSGCGSNAAGSVSPQMPRSGSGISVKSRRSIPSQKSASRTSVDEPGGMASELHDLPEGSESGDSETATEVDVAEKTSKFKVDTEGSSNRSKSSHSTSRKSSREKRPSMIGELCSSGGGQRIRNSYGNIHGYHSNRCHFGNNRAVSLDQYSSAGNNRRLSDGLPQVISDSNVFYGRHNRSSTETTVAVGNPQDTNANTNHPVGCQLKELLARTEADSDGEGDGNGREDKKIPLVIPSMPQLATSSNGNISPTLVVTEQILPSNGSTRSSASSGRGGSGVPGGSGGSGMPGPSAGSGSSWKSRLRQFSDYFSFSFDKSNKRFGSTRSSPCPGSNSSSGRTNNNANGLGENQDGLGAGGGIKPGMCCTTITNSSGSTVKGETRGGTAGAGGGALTTMTTGNDAHQRHRAYSLDVPGMMRYSSNDSSRHPSNNTLQSAGGGAGLTTGLEVTAQRVPPSLSGSTRQDAVAISKGYDGAVEQQEEEEEEEDEQEDDDEDEGREEHRQLQRHQQQPDASSSCEVSSMSMTVWSAIGQRLNALVCHCCERKLPEPENV

SEQ ID NO: 1729 - DNA, 3283 bp, DROSOPHILA
tcgctggatggaggactctttccagatgagcactattccctcatttccggagcacaggaaccaccacaaccgggtcttcggaggcttcctcatgcgaagtgccctggagataagctgggcagcagcctacctctactgcaaaacgcgacccaagctggagcacatatccgacatcagcttcgagaagcccgtcagcgtgaacagcttcatcaagatgaccgcctatgtggtgtacaccaaggagaactacgtgcagatcatgaccgttgcagatgtgatggacccacaaacgggcagccaggtgaccaccaacacgttctactacaccttctcgtctccggacacggttaccgaggtgctgccccgctcctaccacgaaaccatgtggtacatccaaggtcgtcgaaagttcgaggccagcatgggcccagtgtagacatggttcagcctgtgattgttactcaagatattatgcaaggctatcctaccagataaatgcaattaccagttcagtgtttacaaaaagcaataaatgtctgttgtttaatgatgtgcttaaccaaccagcttaaaacttttaaaatcttctattaaaccctatcgaagagtactagattaaatgtttattaatataataactgtcaaaataatccctaatttttgccgactttacattttttggatacccattacctgtaatcaaaaaagcagagctgaagcaaaatttatagttttaatttcgtgtcggatctgagttcagatctcgatcccgatccgtttccatggggcctggtcttagaaatgttaaattatgtgttgtaccttttttgctcggagcccgcagctgccggagcttgttaaaggccaggaccctcaggaagatgacacataaaaattccaggtgaagcaccaacacaactagcagaaatcagattttataggccacatttcttctagctctaatgggcgtaactcctctgcggacggtcaatacgccactatgacggagagtaagtacttccattccagaaataggtgctacttgtccagatatcccttttagtcaagaagaagatgctgaaaagcttcggcctggagcctgggttcaccacggagccgaagtccagggaggatctactcaagtaccaacccaagtttgaggacttacctgcgcgatctatgcaggactcgttttgttcggccatcattcctctgagcacgaatgcagttctgcaggacaagtatatcaactttagaggcttcgcgcgccttggcaggcttctggaggacatggacatcttcgccggtaccatctagtttggccaaagccatgttgttgaataattgtctgcttaattcttcgtagcttggtgctgtaataggcacctgaaagtgcccaatctgccagagggagtacccttgccgtactccctcgtgacggtcctggtggaccggatcgacttcaccagtgtctcaccccagggcacccaagacatccgtctgtctggccacgtgtcctgggtgggaaccagttccatggaggtggtggtatggctggagcagattgtcaatgaggagtatcagaaaatcacgcgagctctgtttctgatggcggcgagaaatgccaccaacacagctgcggctccagtgaatcccattcagcctgccaacgaggaggagaagcgcatcctagctggcgggaccgacaggaagaagcaacgacagctactcatcgctcagtccgtcttcaaggtggaacccaacgccgaggaacaatctctcatctacaaactctacaaaaggactactcccaacgagcaaaccggtccgcgccgcctcctgcctcccaactgcatttggatgcacgactccttccagatgagcactattccctcattcccggagcacaggaaccaaaacaacactgtcttcgggggattcctcatgcgcagtgccctggaaattagctgggcaacagcgttcctctactgcaaggccagacccacgctggagcacatatcggacattagcttccagaagccggtcagcgtgaacagctttatcaagatgaccgcgtatgtggtgtacacccaggagaactacctgcagatcatgactgttgccgaagtcctggacgcgtacacggggaaccacgtgaccactaacacgtttcactataccttctccgctccagacgcggttactgaggtgctgcctcgctcctaccacgaaaccatgtggtacatccatggtcgccgcaagttcattgccagcagaagctaagcctcaaaaaaaattcccgctcagtttaaattcacgtagtcagtatttcttatagctaatgtacacaaagactggattagtttgagcaaatcttgtaaaatatgttaaccaaactgtgccaggtgatatttcctgatccaaaaatctatatgatgcctattaaatcgagtaactattcaaattccttatcgaaagcagaaagcgtatagttggccgttggccctggcttttatttcgaatacccagttgcgtgaagatcatgaccactgccaatgttctgggcacgcacgtgattggtggtgagccctactcccactccgcagattagattgggtccacaattgattcatagaaaacattatattttcggtaatgttttgctgtctaatcagaccgaaaattgaatgtaaaactttccatcttcttcgctagtctggcacttttcgaaaacatcatctttacacctcatttcagattagattgcaagcttgagtagatgcactgaaaaataagatgtttctgtgctagagacggaatatattcaaacacatagtcagtacaatattatgggatcacatcattctagcatcaaataatctaacatattttcaaaagatttaattcccaaaagatcaaaatatacaaatccgctcgagaacctacgctatttcttgcagtgcaggcagaagatctctcaccaagcggacaggtgatcgtcatgcgcgggttctcagtcgccggagagccatgtaatcgcacaacgcggaacatttgccaacgctccactcggttctagaatcactctctattttgcagcccaagtgaaagcacttcatgtaaatccgaacgagctgaggcgtattacgtattaggagctgggaactacacccaagtgccctgcaagtgatttccccaaaaaatccatgccattggatccccccagtaggcggttcaactagttgcaatttccaaggccccgtcaacctagacacctggaaac

SEQ ID NO: 1730 - DNA, 1170 bp, DROSOPHILA
atgacggagatcaagaagaagatgctgaaaagcttcggcctggagcctgggttcaccacggagccgaagtccagggaggatctactcaagtaccaacccaagtttgaggacttacctgcgcgatctatgcaggactcgttttgttcggccatcattcctctgagcacgaatgcagttctgcaggacaagtatatcaactttagaggcttcgcgcgccttggcaggcttctggaggacatggacatcttcgccgcttggtgctgtaataggcacctgaaagtgcccaatctgccagagggagtacccttgccgtactccctcgtgacggtcctggtggaccggatcgacttcaccagtgtctcaccccagggcacccaagacatccgtctgtctggccacgtgtcctgggtgggaaccagttccatggaggtggtggtatggctggagcagattgtcaatgaggagtatcagaaaatcacgcgagctctgtttctgatggcggcgagaaatgccaccaacacagctgcggctccagtgaatcccattcagcctgccaacgaggaggagaagcgcatcctagctggcgggaccgacaggaagaagcaacgacagctactcatcgctcagtccgtcttcaaggtggaacccaacgccgaggaacaatctctcatctacaaactctacaaaaggactactcccaacgagcaaaccggtccgcgccgcctcctgcctcccaactgcatttggatgcacgactccttccagatgagcactattccctcattcccggagcacaggaaccaaaacaacactgtcttcgggggattcctcatgcgcagtgccctggaaattagctgggcaacagcgttcctctactgcaaggccagacccacgctggagcacatatcggacattagcttccagaagccggtcagcgtgaacagctttatcaagatgaccgcgtatgtggtgtacacccaggagaactacctgcagatcatgactgttgccgaagtcctggacgcgtacacggggaaccacgtgaccactaacacgtttcactataccttctccgctccagacgcggttactgaggtgctgcctcgctcctaccacgaaaccatgtggtacatccatggtcgccgcaagttcattgccagcagaagctaa

SEQ ID NO: 1731 - protein, 389 aa, DROSOPHILA
MTEIKKKMLKSFGLEPGFTTEPKSREDLLKYQPKFEDLPARSMQDSFCSAIIPLSTNAVLQDKYINFRGFARLGRLLEDMDIFAAWCCNRHLKVPNLPEGVPLPYSLVTVLVDRIDFTSVSPQGTQDIRLSGHVSWVGTSSMEVVVWLEQIVNEEYQKITRALFLMAARNATNTAAAPVNPIQPANEEEKRILAGGTDRKKQRQLLIAQSVFKVEPNAEEQSLIYKLYKRTTPNEQTGPRRLLPPNCIWMHDSFQMSTIPSFPEHRNQNNTVFGGFLMRSALEISWATAFLYCKARPTLEHISDISFQKPVSVNSFIKMTAYVVYTQENYLQIMTVAEVLDAYTGNHVTTNTFHYTFSAPDAVTEVLPRSYHETMWYIHGRRKFIASRS

SEQ ID NO: 1732 - DNA, 2561 bp, DROSOPHILA
cgagtgaaaatgaagaagtgacgggcttcggtggtatagcggcgaaaacagaagccgacaatgcacgaagtgggcacgaagccgagacacgactttcactgacaaatgtctacgtggtgccacgtctagggttgcaagggcctctcgatccgtaggtcaattactcagtttttagctatttagcttactcaggataggcattctgcctagtcatacataaaacattcatttgattatagttaaaaacattttctcatatctaaaataatcaataatattagatcttggcttattttgttgacatttgagtgcaccgacaactctagcgagacaagtagtgatgccaaacgccgcaactgtcattcctcgtgttttttcatgtttatcatttaaaagcaatattttggtcaacataatattttatgcaattataaaattcaaaatatatttattttttataccaaatatcattttttgacggaggtaaaaatgctacaaatattttacagcactgttcggccatcgtgctgccaacttggctattacaccgctattatctggctattttttctgctagaaaatattatgttgacattattaatataacattgtctgtataccagaaatattataaaacaaaattgaatggtcaaatttaaatgtagcaatacaaattggaaaaatttttaaaaaatcaataatagatatatgaacacaattttctattgttattgtgtgaacaataaaagttcgcttaaagatttaggaaaaatgcaattaaatataaatactaatttttggaacacgaaccatttaaaaaaacaaggcatacggagggtaaaaactactttttcgagtagtaaaataatttttttcgctattttctagccactcaagcgcaatcgatagtgagcggggccgttaatcgcagctatcgattggcctgcgcaacgcagccaacttcacgtcgctgtgccgataaccgctcaacttcctttttgcttgcggctgtcaattgaagcgcatcttgcacgtgaattctctgcgaatttagcatttttagcgatctaacatggacaaaccagttgtgtgggcacgcgtcatgaaggttctgggccgcaccggctcccagggtcagtgtacccaggtgaaggtcgagttcctgggcgagcagaaccgccagattatccgaaacgtgaagggaccagttcgcgagggcgacatcctgacccttttggaatccgaacgtgaagccaggaggctgcgctaattggcgaccaaactcgagaaggtaagcgcacctggaatattggccacagtgaacacacgtcttaacacaccttctatttattccgcagacctttttacacacacatacacaaaactgtttttcgcacgcgccttgtttttttcgcggagaagaagaagcggatggcaagaaatccgaacgaggctgctgcatattcgttataaacaaatgaaaatacacacctaattcgccagaaaatcagcaaaaatgtgttttaaataaatctcgagagcattggaccgcctttgtacgaaaagaaaaccaatcaagcctgtgttttggtttcattaccttttttgtttctgtgttttttttgagtgcccagtgaaaattgacaatggaatgtggtcttcaagcgacttcctttaacaatatgtatttgcatttagcagaaacccttgccttctcggaaatcaacaaagaaaatacagacgaaattctccagttgctaaaaacacgtttcgttgatttccttataaacgcaaagtttttctgttaaacacaatgatcagaagttctggacacgttaacatcttaaaaaaaatgttttattttttcgtccacgaaaagatatttcaaagagaggccagccgagtgattatatagcccaatcacatttcagatttgacaatcaatgttaatgaatgcacagtattttttgtataaaaaatagtttaaatatttgaactgctggagctgcacagaaaatatacgtaacatttttataataaaagtcaatagctcagttagttaatatataaaacattgtatagcaaattatggtttaaaaccactgaggtgcatatgtttctatattccttaagcctaattttccctacaaagtcagcggaaaactggacagtctctctattttggccaatccaagggtaatgcgtgcttctgcaggttccggcagttggagatcggatttgaaggactccaacgaggattcgggtgcggaaaacttgggttgcagctgactaagatgaagctctaggtatttaacctggttctgcagcagtttcagcgattcctccaggaaatttctgaattctgtcaatgctgcaggtgttttggtttgctgctgctcattacataggtgcaggcactcaatctcgaagtcagttacttgggcggatatctgccctagctcggaaaccagtttcgatctatgaattggatggcaaggcaaatcagaaaagtttctggctgggattaggccacttacatgctgtcctgcaggctacggtaa

SEQ ID NO: 1733 - DNA, 494 bp, DROSOPHILA
gcttgcggctgtcaattgaagcgcatcttgcacgtgaattctctgcgaatttagcatttttagcgatctaacatggacaaaccagttgtgtgggcacgcgtcatgaaggttctgggccgcaccggctcccagggtcagtgtacccaggtgaaggtcgagttcctgggcgagcagaaccgccagattatccgaaacgtgaagggaccagttcgcgagggcgacatcctgacccttttggaatccgaacgtgaagccaggaggctgcgctaattggcgaccaaactcgagaagacctttttacacacacatacacaaaactgtttttcgcacgcgccttgtttttttcgcggagaagaagaagcggatggcaagaaatccgaacgaggctgctgcatattcgttataaacaaatgaaaatacacacctaattcgccagaaaatcagcaaaaatgtgttttaaataaatctcgagagcattggaccgcctttgtacg

SEQ ID NO: 1734 - protein, 65 aa, DROSOPHILA
MDKPVVWARVMKVLGRTGSQGQCTQVKVEFLGEQNRQIIRNVKGPVREGDILTLLESEREARRLR

SEQ ID NO: 1735 - DNA, 4994 bp, DROSOPHILA
tgggccgcaattacacgcagtacatccccgatcgggacggacgcttcaagctgaataataccgatcgtattctagtggaaatacgggatgcgatcaccatgatccaccgtcccgtgaccttcaagcacatcctgccgcaatacgatcgatgcgatgtagtgttgtgctacgaccgccggcaacggaaggcgttgtccataaatggtgaggcctgtcaggattacagcggtgagattctcacccggaagcacttactgggtgagagaaaggctgcggatgaccagctggtcacagtggttatcgttattgccggctggaacaacgtaatccgcgataaggatcgtttcaccggccaaatggatatgaagctaaggcagctgcggcaattgggacatcagccactggtggtaagttttgctttatcctatgtaagctatattaaaatgaaaactttctcatccttcgaacagtatggtcaagcatatgaaattctctatctctttctattttaattgaatttacatcctttttattcacaagctctctctctctctttctctttttatacgaaacgcacctatttaaatgtaccaattgtgtatttcttcttagactgcgggttgtattattataattatttaattgtctaatcttttcctgcttttttccacagatctattggcacgagtggcgggaactggagaactcagctgaccgccaggactttctgaaacgccgccttagccaaattgcaaaaatttagcaggaaataaaaacggcaatagaattgatattagtcagtcattagcattatctgaacattgtacaggcacaacactacgatctattaattatctagaaaaaaaagcaataattatcgaatatttaataatgaccgcccgcggccgacaactactagcacagcgtcttgctcccggatccccgcaatcggaccgcagcggaccgttcgtcgcgatccattgtatggttgatgccgtcgtcagagggtggcgctcaacgctcgcttggtgtactcgtagaccacgaacagggtggccgtggctggaatggtgcgcaggacagatggcagcaggccgcgatagagtgccaggacaccttcgcgacggactatgtccgctcccacggcgaacatgctttcgttgaggttcttcacctgtatgcgactcttaattacgtctgcaggaaacgtcgacgtccagaggcagacgcctccaatggcgccggcgatcatcgtacgcagtggtccaatatcatctttggattgatcatccctgcaaaggaaaataagaattatgccaatgtaaataactatttaactttgtccaacatctttcatttgaatagactaacgaagatcgagttatctgtccagctaaggattttgttaagatattgttgaacaaattctgtaaatgactaaatataactatactgctaattagtatgataactgaagaagaacgattgttgttcactcgtaaacattaaactcattaatctccttctatggaatttgtttgtactcacctgcggagtaattcacgggttccctcgtagctgccgaagaaaaagaaatatccgggcatctcgcgcaggaaagtcgagctcaatccgcgatagaagcctctgatgcctgcggagaagagattaatcaacggattagaccaatggtagctaagaaaatagcgaagatggacacgtgaggatggggctatcaattaaattcgcattggaacatcaatcaaaggcgaaacggaaacgtgctcatgatctgccgacttgaggctgtcaattgtggggcatcattacatcggtaaatttccacttgactgatagtggcccaaccatgtgcattggccgtagctgcacgttccgctccctgtttcccgatgctttccagcttgtagtacttgtagtagtacaccaccagtataccctagatgtgtacagatctatctcgcactacgtcactgctgtgcgtggcatgtttcgagctgcggctctatgtggctatgaatagtcttatcagtttccatagaaatccctaattcgcttttcgcaatctgcgtagtaaatactcaatatttatgttttggaaaataacgagaggaatgccagccttcctcgtgctcgattagattggattgactgggctttttataaccttagctgcttttcaatggcttattcttcctgtttattgctaaagcaatttggaaaatattctaaaaaaaaaggcctttaaaagcactattttctaaatatttaatgtcccgcagattaagtttgagacaaattagatcataaaaagtttatagtttcgtatgtcagacaaacagtagacccattaaacatttttgttacaatttctagggtatttaaagaaaggcgatctgcagttcttaaagattgccaacattgcaacgttttcaagatcgcattaccctggcattcacaggcgtcatttaagtccctgtatattgaatgcaaaatgaatgctgaagttttgtaattgaatgagcgataataagtttttgccaagcgataaggtcggccaaatcgagccacttttaatcgccttaggtataattacccatcgaaattatgttttaggatcgtaactacaattatgtatctgaatcgaaagttaaattaaaccgccatcagaacgtcgatggatccggcaacaccaagtggatccgatccccgaccatgtggagtgcttcatttgtatgggtgcgatgcgtatctgtgtttatatcgcgcactgcgatgcgataattgtgaattattaggaggaacagatcgccgaaagccacgcggagataatctaatcggaccgctcgaggcacgagaacaacaacaatcggtttcccggttgcccaaggctacgccccccccaaaagattccgggataaatgtgatcgttgtgaaacatagtgtttcgatataaccatttccacttaatttgggcatttagtagtgccctagtacagtgaagacacgccacagtgaattgcaaatagcttctaagtgggcatgaaactaattatagatttttgggttctctggttgaagggagcatattaactttttagacttcacttttagttcagttgagtttatttatgatgtgcactgtaccacctttaattcactcagatatgctgaccattcataaactcaaacgaacatcagaatcatgatcaattcaatatgcttgaaaggttatattcggaatgcttactcggacgttatatggcctttaatttaaagaaagttacatattgtggtgtagttatcaagaaaatggacatatagatacaaaagtatctggatacaaaagatgcacagatagatgcaaatcaaggacactcaccttcggtccgccatatgtagcgcgtcagtgtccagggtgttcgtatgtcctgcggatgagccggttcaacgaagttcttcatctcgcgcagcgcctgcagcttacacttgatcagctccgtggggcagagggtcagtgtggagaagcaagcggccagggaaccggcgcaggcgttctgcacggtggttaaatcgccagccgtctccttgcccacgcagaaggcaacgaatttctggcatccaccgtaggcggcgaacagcaccgaattctcggccacattggcgaatacggccggaacggaaccggcgtacaagccgcgcagtacgccatccttgcggtatgtgctcaaaaagcagtccaacatgccgcgatatgcctccggaaaggtctgcagcttgaccttgaccgtgtcgaggggctgggacacatacacctgggccgctccgcccagggatcccgccaaaaagtcgatcagaccctcgacgaagttgatgttgttgcccgtaccgccgccgtgcatgtctagacgtcgtacgaaacgcagaaaaccgccgacaacgaacaacaggccgtcgcgtaccgctctcagcgtcgatttcacactgatcggcctgttcagccagccgcttttctttttctcaccatcggtttctccatcttcctcttgtccctcctgtgggtggggatgagtggtgggggatatgagcgagcggtacaatagggttgtcagctttcgtttatatatcgcattaggggagtgttcccaattccacgccaaaaatattggtggtggaattgaaatcactcatagatagtcgcaatataatttgttctattgtgtgtaatttaattaattatttataataataatgaaaataatattctaaatgaatatcacaaatatatatatacagatttcgatggtctaatagattaactcataagactataataaaaactaacgtcattttatataagattgccatctgttagtcgatataaatatttctatgatcgatcatttcgatagtgtcgataagcatagccaggcataaacattatataaagtgattatgtcttttgtgcgtgttagtgttatgctactggcgatgagttcatcgatcagctctatctatgctgccaaattgatcgcgataacttaatcgaagtaaatatatcgatagctcgttgatcggcttcgacaactctacctgcagggcgcgttcgtaggcctcgatgatttcgtcgggcgtcattatcagtacgctgctgcccgcttgactgctcccgattcgcgggggcggcgggggcatctcgtcttcgttgggcggcggttcgggtggcgcctcgtccgttggctggctcttcgggtggcgctgtttgatcggttccggttcgagggggggcggcagcgatacgaattctgccgcttcgctgccggcttcttcgttatctccatcttcattatggttgctggttggcgctgcggcgctggcggtgtcctgctcgcactcgctcatggacacgggcgcgagaaagggatggggcgctgggtccgatggtcgtgctgtccctttctgtccctgctcgagcg

SEQ ID NO: 1736 - DNA, 992 bp, DROSOPHILA
cgacgctgagagcggtacgcgacggcctgttgttcgttgtcggcggttttctgcgtttcgtacgacgtctagacatgcacggcggcggtacgggcaacaacatcaacttcgtcgagggtctgatcgactttttggcgggatccctgggcggagcggcccaggtgtatgtgtcccagcccctcgacacggtcaaggtcaagctgcagacctttccggaggcatatcgcggcatgttggactgctttttgagcacataccgcaaggatggcgtactgcgcggcttgtacgccggttccgttccggccgtattcgccaatgtggccgagaattcggtgctgttcgccgcctacggtggatgccagaaattcgttgccttctgcgtgggcaaggagacggctggcgatttaaccaccgtgcagaacgcctgcgccggttccctggccgcttgcttctccacactgaccctctgccccacggagctgatcaagtgtaagctgcaggcgctgcgcgagatgaagaacttcgttgaaccggctcatccgcaggacatacgaacaccctggacactgacgcgctacatatggcggaccgaaggcatcagaggcttctatcgcggattgagctcgactttcctgcgcgagatgcccggatatttctttttcttcggcagctacgagggaacccgtgaattactccgcagggatgatcaatccaaagatgatattggaccactgcgtacgatgatcgccggcgccattggaggcgtctgcctctggacgtcgacgtttcctgcagacgtaattaagagtcgcatacaggtgaagaacctcaacgaaagcatgttcgccgtgggagcggacatagtccgtcgcgaaggtgtcctggcactctatcgcggcctgctgccatctgtcctgcgcaccattccagccacggccaccctgttcgtggtctacgagtacaccaagcgagcgttgagcgccaccctctga

SEQ ID NO: 1737 - protein, 305 aa, DROSOPHILA
MHGGGTGNNINFVEGLIDFLAGSLGGAAQVYVSQPLDTVKVKLQTFPEAYRGMLDCFLSTYRKDGVLRGLYAGSVPAVFANVAENSVLFAAYGGCQKFVAFCVGKETAGDLTTVQNACAGSLAACFSTLTLCPTELIKCKLQALREMKNFVEPAHPQDIRTPWTLTRYIWRTEGIRGFYRGLSSTFLREMPGYFFFFGSYEGTRELLRRDDQSKDDIGPLRTMIAGAIGGVCLWTSTFPADVIKSRIQVKNLNESMFAVGADIVRREGVLALYRGLLPSVLRTIPATATLFVVYEYTKRALSATL

SEQ ID NO: 1738 - DNA, 3584 bp, DROSOPHILA
ctggatggactggcccaggcctgggactatgtgctctgccatcctctgcagaacgcagtcgagctacgatcctttaagcaggaagaggtgctccacaagacgctgctgcgcctgcagggctgtccggtggtgcacgccctcaacctgctacagttcgcccagctctgcatcgtcgtccatcgaccgcacatggccgcctctctactcagcttctgccagagcagcgagcaacgccaaaagatcaaaaaggtatgctcgaaccgcgcactttaacgaaatgctctattgtcactctaactcttcttgcagatgatacattcccatccggtggagaaccttcggcaacagatcttggatctggaagatgctggtattttgccggtggtgctgaactttgcgctcaaggaactaaatctgtaagcgtagagatttggattttactattcccataattttttgttttattggtcgaatatctgcgttaagtgcgttcgggtcaagatacttttgtaaatatcaaggttttatacctgcaaatatagtttatacaaacgatgactattttctattttaattttaatatgttattttatatacagtagcaattagtcaatattcaaacagtacaatctcttaatttcataatttatgcatcacaaaacaatgtgttaatttgagaaattgtctagggaacttcgcttcccagtttaaaattaacaacaatcgggatgacgtcatacgtatgtatcacttctgtaaacagtgggctcaagttgatggaatactgaaaataatgagatatattaggattttttttaaatgaagactttgttgtgtaaagaacagtcagtctcaaatcaatttaattaaagtaaatgggaaaaaattaatatactaaagaatcgaacttttcgaaattagttggagacgaattttctcgagcccactgtaccagtcagctgtggccgccagctgttttctatttggggttagatcaaagacaggttacactttgtatgtaacttgaaaagcaaggagaaagctgcgaaactaagttaaaccgagatgatgcgttctttgataggagcacaaaagtgctggggcctgatccgcaccaggaactttatggaattacccaccaaacaggtgccagcatccttcgcattgttcaagtaagagcaaaaaataaatgatgagcttacatggtaaatgagtactttcatctctaacaggcgtcactactcaccgcccacgcatatcaagcaatcagcggtcgccaatgaatccggaaccatggcggagggtaagtgttgtcttgccagagtcaaacccatcgtaatccccgaacgtctgcagtcaagcaggggatgatgaagcgattggggctggagcccggttacaacccgctgcccaaatccagggagcagctgctcaagtaccagccgaagctggaggatctgcctccaagagctatgcaggattccttcacctcggccatcattcctctgagcacggaccgcagtttgcaggacaaatatgtgacctatctgggcaatgtgcgattcgggcgacttctggaggacatggacttgtttgctggtatgaggaacacatttgctggaatcttggcgcactttctcactatccgctatttccagcttggtgctgtcataaacacctggttctgcccaatctgccggagggagttcatctgccgtacacctttgtgaccattctggtggaccgcatcgatttcaccaatgtcttggcttcaggcacccaagatatccgtttgtctgggcacgtttcctgggtgggaaccagttcaattgaggtggtagtgtggctggaacagatggttggcgggaggtaccaaaagttaacccgtgccttgttcctgatggcagcaagaaacgctaacaataccggagcggctcctgtgaaccccttacagccggccaacgaggaagagaaagtgattctggctggcggcgcagatagaaagaagaaacgtcagattctctgtgctcagtccatctttaaggtggaacccaatgacccggagcagacaattatgtacgagctgtacaaaaggacaactcccaccaacactttggaactcaacaagcgcatcctgccaccaaactgtcgctggatggaggactctttccagatgagcactattccctcatttccggagcacaggaaccaccacaaccgggtcttcggaggcttcctcatgcgaagtgccctggagataagctgggcagcagcctacctctactgcaaaacgcgacccaagctggagcacatatccgacatcagcttcgagaagcccgtcagcgtgaacagcttcatcaagatgaccgcctatgtggtgtacaccaaggagaactacgtgcagatcatgaccgttgcagatgtgatggacccacaaacgggcagccaggtgaccaccaacacgttctactacaccttctcgtctccggacacggttaccgaggtgctgccccgctcctaccacgaaaccatgtggtacatccaaggtcgtcgaaagttcgaggccagcatgggcccagtgtagacatggttcagcctgtgattgttactcaagatattatgcaaggctatcctaccagataaatgcaattaccagttcagtgtttacaaaaagcaataaatgtctgttgtttaatgatgtgcttaaccaaccagcttaaaacttttaaaatcttctattaaaccctatcgaagagtactagattaaatgtttattaatataataactgtcaaaataatccctaatttttgccgactttacattttttggatacccattacctgtaatcaaaaaagcagagctgaagcaaaatttatagttttaatttcgtgtcggatctgagttcagatctcgatcccgatccgtttccatggggcctggtcttagaaatgttaaattatgtgttgtaccttttttgctcggagcccgcagctgccggagcttgttaaaggccaggaccctcaggaagatgacacataaaaattccaggtgaagcaccaacacaactagcagaaatcagattttataggccacatttcttctagctctaatgggcgtaactcctctgcggacggtcaatacgccactatgacggagagtaagtacttccattccagaaataggtgctacttgtccagatatcccttttagtcaagaagaagatgctgaaaagcttcggcctggagcctgggttcaccacggagccgaagtccagggaggatctactcaagtaccaacccaagtttgaggacttacctgcgcgatctatgcaggactcgttttgttcggccatcattcctctgagcacgaatgcagttctgcaggacaagtatatcaactttagaggcttcgcgcgccttggcaggcttctggaggacatggacatcttcgccggtaccatctagtttggccaaagccatgttgttgaataattgtctgcttaattcttcgtagcttggtgctgtaataggcacctgaaagtgcccaatctgccagagggagtacccttgccgtactccctcgt

SEQ ID NO: 1739 - DNA, 1412 bp, DROSOPHILA
acaggttacactttgtatgtaacttgaaaagcaaggagaaagctgcgaaactaagttaaaccgagatgatgcgttctttgataggagcacaaaagtgctggggcctgatccgcaccaggaactttatggaattacccaccaaacaggtgccagcatccttcgcattgttcaagcgtcactactcaccgcccacgcatatcaagcaatcagcggtcgccaatgaatccggaaccatggcggaggtcaagcaggggatgatgaagcgattggggctggagcccggttacaacccgctgcccaaatccagggagcagctgctcaagtaccagccgaagctggaggatctgcctccaagagctatgcaggattccttcacctcggccatcattcctctgagcacggaccgcagtttgcaggacaaatatgtgacctatctgggcaatgtgcgattcgggcgacttctggaggacatggacttgtttgctgcttggtgctgtcataaacacctggttctgcccaatctgccggagggagttcatctgccgtacacctttgtgaccattctggtggaccgcatcgatttcaccaatgtcttggcttcaggcacccaagatatccgtttgtctgggcacgtttcctgggtgggaaccagttcaattgaggtggtagtgtggctggaacagatggttggcgggaggtaccaaaagttaacccgtgccttgttcctgatggcagcaagaaacgctaacaataccggagcggctcctgtgaaccccttacagccggccaacgaggaagagaaagtgattctggctggcggcgcagatagaaagaagaaacgtcagattctctgtgctcagtccatctttaaggtggaacccaatgacccggagcagacaattatgtacgagctgtacaaaaggacaactcccaccaacactttggaactcaacaagcgcatcctgccaccaaactgtcgctggatggaggactctttccagatgagcactattccctcatttccggagcacaggaaccaccacaaccgggtcttcggaggcttcctcatgcgaagtgccctggagataagctgggcagcagcctacctctactgcaaaacgcgacccaagctggagcacatatccgacatcagcttcgagaagcccgtcagcgtgaacagcttcatcaagatgaccgcctatgtggtgtacaccaaggagaactacgtgcagatcatgaccgttgcagatgtgatggacccacaaacgggcagccaggtgaccaccaacacgttctactacaccttctcgtctccggacacggttaccgaggtgctgccccgctcctaccacgaaaccatgtggtacatccaaggtcgtcgaaagttcgaggccagcatgggcccagtgtag

SEQ ID NO: 1740 - protein, 385 aa, DROSOPHILA
MMKRLGLEPGYNPLPKSREQLLKYQPKLEDLPPRAMQDSFTSAIIPLSTDRSLQDKYVTYLGNVRFGRLLEDMDLFAAWCCHKHLVLPNLPEGVHLPYTFVTILVDRIDFTNVLASGTQDIRLSGHVSWVGTSSIEVVVWLEQMVGGRYQKLTRALFLMAARNANNTGAAPVNPLQPANEEEKVILAGGADRKKKRQILCAQSIFKVEPNDPEQTIMYELYKRTTPTNTLELNKRILPPNCRWMEDSFQMSTIPSFPEHRNHHNRVFGGFLMRSALEISWAAAYLYCKTRPKLEHISDISFEKPVSVNSFIKMTAYVVYTKENYVQIMTVADVMDPQTGSQVTTNTFYYTFSSPDTVTEVLPRSYHETMWYIQGRRKFEASMGPV

SEQ ID NO: 1741 - DNA, 2369 bp, DROSOPHILA
taaattgctattctagattctagattgttaagcaagtccaatgccacatacatacattccttagccattagccattagcatttgaaatgtctgaattccctttgattcaccctgttttttttgagcagtaaaagtaattttcaacacctcggccgagcccacacattccataatctcgatacccagcaagcgtagaatagaaactattattttcgcacaattttcggctcctgcggtggcgattggctcattaaatgcgaaatgcgaaatgcgaaattggccgaaactaaattatttggaaatgagccgagtgtatggggccattaaagtatctctgcggagagaaccgaatcagaataaacacattcccgatcacaatcagaaagcgtgaatagaccgcactagaaacttgggggcgatttcattcgccggctgcccattatgacatcacatacgccgaataatttgaatactcgagctttgtttgcctcattcgcatacaagcatactgtatattacaaagaaattcctcggctatttccgcccgtttccgtttcgcccaaccgattcgcacccggttccgagttgagcggcacaatgtttctatttgagtggacgcacacgtcactcccagtgaatgcagattcgaggggacagcaaaagctggcgctcgttaatttctattaaattgcgaatataagtctcaagtctcgaattttaaggctgacgccatggggctggcgatcacgatttcaacagcccctagttgcgcagtttctattaataggaaagtgtcccagtctaatcgatccgatttagtcatgtaaatagttcatgctccagctgctttgtttatgtttcggcaattacctgtctggaatttggaatctgaaatctcaaatctcgcatcttcgatctgatcggcgctccaccctgctgattgcaatcaggctataaattataattagcgccaggccagagcttagttagcattcagagggccagtcagcatgtttcctagtcgccaaaaccaaagtaatcccatccagccagcacagtcaggatctaaaatgcactcctcattcaatccccagcttccttgaagaacttcggtgacaagaccgccaacctcttcagcaagaagaaggatgaggccgagaagctggccaacgagaaggctgccgaggcccagaagctagccgaggagcaggccaagaaggtgggccagtccgtacagcagaccaagggcgaggccgagcagttggccgccagcacgggtgagtaacgaacatccaaaaaataatgaatgtaacacataaaagatgtcttagagaattaattggagttattaattctaaagacttccaaaaactcttgcaacgaagaattgaatgagtcccgtttgagataactttcaaaatcaactttcagttcttgctaaaaatgttttctcattagcattccatttccaatttatctaaaacgcaaatcttttaagcatatcaaacacaagagaacttaataaatggaattctttagtgacgcgttgacgtaaaacatgtttccaagaataagattcgcatttttgaaaacatttcttcataaatattgaaatatttctataattgtgaaaagcaatttaatgtgctagagatttataactaaacagaacatcaatgctatgttttatgctggagcaaagcccgaccaattcaataaatatctttaggagcacttttaaagatattttgtaagaatttttcccactaatatctctctttatcatacagccaaggaagccgctgctctggccaccgcggaggctcagaaggctggacaggcgattgaccagggtgtgaaccgtgccgccggagccgtcaaccaaggcaagcaggcggtggacaacacggtggcccaggcggcggccgtggcccagaactccaagcaggtggcggccaatgtggcggaggcctcccagcgagcggccgccaatgcggtggaccagaccaagaaggcggccaacgacgccatcaacaagagcgtgaaggccgccgagaacgtggcggaccagaagctgaagcaggcggagggcgccatcgatggggcactgaagcagaccagtcaaacggtggaccagaagctgcaggaggccaaccagtatgtcgaccagaagcgccagtccgtcgagaagaccgtccaggatgcggccggacaggcccaggagtctgccggacagcaggccaacgccctgttgggcaagctgcatctgggtcagaagtagaggcgtctcccttcgcggtgccacctaaaatatcttgatgtgaaaatgctttagatacaaaaacaaaaaaaatagaaaggaatttgct

SEQ ID NO: 1742 - DNA, 709 bp, DROSOPHILA
gccagtcagcatgtttcctagtcgccaaaaccaaacttccttgaagaacttcggtgacaagaccgccaacctcttcagcaagaagaaggatgaggccgagaagctggccaacgagaaggctgccgaggcccagaagctagccgaggagcaggccaagaaggtgggccagtccgtacagcagaccaagggcgaggccgagcagttggccgccagcacggccaaggaagccgctgctctggccaccgcggaggctcagaaggctggacaggcgattgaccagggtgtgaaccgtgccgccggagccgtcaaccaaggcaagcaggcggtggacaacacggtggcccaggcggcggccgtggcccagaactccaagcaggtggcggccaatgtggcggaggcctcccagcgagcggccgccaatgcggtggaccagaccaagaaggcggccaacgacgccatcaacaagagcgtgaaggccgccgagaacgtggcggaccagaagctgaagcaggcggagggcgccatcgatggggcactgaagcagaccagtcaaacggtggaccagaagctgcaggaggccaaccagtatgtcgaccagaagcgccagtccgtcgagaagaccgtccaggatgcggccggacaggcccaggagtctgccggacagcaggccaacgccctgttgggcaagctgcatctgggtcagaagtag

SEQ ID NO: 1743 - protein, 232 aa, DROSOPHILA
MFPSRQNQTSLKNFGDKTANLFSKKKDEAEKLANEKAAEAQKLAEEQAKKVGQSVQQTKGEAEQLAASTAKEAAALATAEAQKAGQAIDQGVNRAAGAVNQGKQAVDNTVAQAAAVAQNSKQVAANVAEASQRAAANAVDQTKKAANDAINKSVKAAENVADQKLKQAEGAIDGALKQTSQTVDQKLQEANQYVDQKRQSVEKTVQDAAGQAQESAGQQANALLGKLHLGQK

SEQ ID NO: 1744 - DNA, 5636 bp, DROSOPHILA
tgacaagttgtgaaccaatttggattataatatattttttttttctgctaatcgttacaccaaatagtgcctcttgttaaaatgtataaattttggagatattacatacaattacatatactaaacaaaatgcaaaccatcataaatatgatactataacgaactagcgcaattatattttatttctccatgacccttagtgaaaaaatacaactgaaatataaaatttcaaagttatacttaaagtatattttatactatatgtatattacacaagagagaatgctatagcgagttcctgaactatcagatgcccattactcagtgaatgcgaacgcgaaatttcatcatttttctgggataccgatagatattgaggaataaaataacaaaaaatatacaacaatttcaaaagggtgggcttgaccggtttggcggctttagggcgttagagtgggcgtggcaaaacattttttttgcaaatcgataaaaatgtacagtattgtacatcaataaagatgtgaaaaattatcaacacatttttcaaatgtgctgtttgtgggcgttatagtgcgtgtggcaaaatgggtgaacaaacttgcgctgcgtctttgtctctggtaatgttatgccgaatctcaaccttctaggctttatacttcctgagatcttgacgttcatacgggcagattgacatggctggatcgtctcggctattgatcctgatcaagaatatgcatactttatatcggcggaaacgctgccttctgtctgctacatgcgtttcatcgactcttgtatacccttttactctacgagcaatgggtataaaaatatcataacttttaccaaagaaaaaaattgacttcaaatttgttttttttttcactttcttcttaggttcagaaaacaaatttcggtttctcgattttatgcgttattaggtatcctaaaatttgttgctatttttgccctcttttaattttggtataatgtttgtcttacaatagccctacgcatgacctatgatgtggcgggagccacttttctagcggcttccacatcggcaccggaactgtttgtaaactttgtgggaaccttcgtcactaatggcgacatcggacttggcactatcgtgggatcttccgtgttcaatatcctggtaattgcaggagtttgcggcatatttactcaaccggtgcgtactattcaccacttaagctgcagttctgcctcacacattgttttttttgtttttgcatattttgcagaccaaactggattggtggccggtgaccagagacacagcgtggtacctcatagctatagcgtcgctcacatatgtgttgtgggattcgttggttatgtggtatgaggcttttgcccttttactactatacatttcttatgtcattcaattgtcctttgaccgtaggatccaaaatttggttcgacgtaagaagagtttcttttcaacgtttatttattttatatatctttttattttaaaacaagagagaaatatatacccgttactcagctagtgaaaatgccaacgcgaaatttcaacgttagagtaggcgtggcaaaacattatttaccaaatcgacaaaaatttacaagacttacaaaaaaatgaaaaaatatcgaaatagttgcaatagttgcaatagaatagttgtcaaaagttttaggcggtttgtgggccttagagtgggcgtggcaacattggtcaataaacttgcgctgcgtctatgtttctagaatctagaatctagaaatttctagaatagttcctgagatctcaaagctctttcgggcggaaggacggacggacagagacaggttgactattgatccagatctagaatatatttactttatatggacacgcttccttttacctattacctgtttcatcgaatctagtatacccttttactcaaggagtaacgggtatatacctaacatatgtttgacttaagatttgactgatatctggaaggttatgcattgataacgatgcaaaattatcgatttaattcgatgcgaaaatccgattatgacccctgaatcaagggctcagagaaataggaccctgtagttgaaataactttgtcagtacacttataaaaagaaatgtttgtgtaacatttaaactttcaaatgcagacacccagaaaaattaagaacgaaaaaacgagatcggttgtgcttagcgtactcggtggcatgatcagtcgcatcaataagacggtcgttaggggaagactgaaaaaataagagagagagagagagagagagagagaaatgagagcaaaatcctctcaaagttataagggagctatcgattttagattcgtgtccttgtcaactaaaataatattttgttggtgcgaagagtggtataaataaagctcgaaaacgagaaataaagggctttccctaataaattttacctatttacaatctttcgccatctgtaattatgtattaccatattcaactaatataacgttgaaaacgcaatgctttaatttatgcgtgtgcattttacatatttattgcaattcattcatgagcaaattcacccgggtatgtaccaaagacggtttgtttttaatttattaaattttaataaattttaacagtaatgcttttttttactctaaaaaaaaaaacaattttaaataaatcgaaatcgattcctttcaagggcgagatcggtttttcttgatcgggtcttctcgatgccgagataggtagcgatactgataatcatttgtaacctgagaatggttcgacctcgatctgaaaattccgaacatgatcaatcttggtttgattttgagatcgagaataataaaatcaagatcgttgagaacggtttcttctttgagtgtaagcaaaaaaaaaaaaacaattttagaactcagttcagcgtccttgcttcatgcaatttctaggtcacaattcgaaatattttaatcgttatcaaagaaattttatgtctccattcaatgtaatttaataaagctttattatgttatcatgattctaaaacttgcatccactttaaagttgagcactttacagccgcgaagaaattgtcatatacaattttaagcaaattaggtgcaagaatatcaaattccagaactaacgagataagtctttcttagatgaacacgcggagtcggagctgttggacgaagatccgatgacccgcgaagaagagccgctgaagggatttcgcgaccacgtgtgtgcgaaaccgaaaacggaatacaatttttaccagtggacctggtgggccatcaaatatccggcagaattgatgcttgcctgcactgttcccagtgctagatccatcttcttcctttcaatgatttcggccatcctttggatttccttgatatcctatcttcttacgtggtttctcacaatattggggtacaacctcaacattccagacgcgatcatgggccttactgtactggccgccggcactagtgttccagaagtcgcgtcctcgtatattgtgtccaaaaaaggtaagtacctatggtaatccttccacacgcgtgtgccgaagtattttaagtgcagaaataatgctatgcttcttcgtacattttaaaaacttatttacaaggcaatttaaggatgttttccacgatcgatcagcctgcctacatatagatacatagataaaatgtcatttacacgcttgcatgtgggcggtagacataacttttaaaacataaacacgtggaatccgtgtgcgatactgctagattgtaaattaatcccaactccctatcttgcattatattacccatagactgttataataaaaaacatacagcctgccacgtagttaccgtaaaatttaaaagttctacgatcgtccgatcagaaccatttttgtcctttttgagctctttaaaatatgaattagttctcgtcccgttccgtcttatatactacctgctatatggactcgactgttgatgctgatcaagaatacaaattcttaatatggtcaaaaatgtctgctttaccttctgcaatggtatacaaatttactcagtttcgatttccgaagaaactaaagcagcgtacaaaactagaggctagttaaattatttgtataacctatttgtaaatgttactataaatcgacataaagttttatctaaatttctggcgatcaacttccatgatcaccttgattgcaacgctttaagaggaatttctatagcttatttcgaataaaattttacctaattgtttttctttcaggatatgggtcaatggccatctgcaatgccattgggtcgaacacattcgacattttagtatgccttggtctaccctggcttctgaaaattcttatttaccagcaaaagatcgatatcgactccacagcccttaccatcaccacggccatgctagtagtaactgccgccgttctttatttgggtcttctggcaaggaggtttgtgatgggcaagaccgtcggatatctaagcataatcttctatgcgctttttctgattatcgcctgtacactagagatattattgaacaaagaaaaaatgtgcgacatccaggattaattgagcctaattaatgaaaataaatttttggaatgagaaggtaatgaaaacaggaaactaccccattcttcattataaacctttcgttttttttgctagcagactaatcgggtaatagaagcatttggatcaattgtaaataattaaaataagtcatagcttggatgatctgatcttattcgctagttttaattataaaaatattgcaatgttctttgatcgttgtactgcattcctgtcctgatgtttctttccttctttgtttcttggtgcaagcctagtaaggggtctttcgttacttcatattttctctctctccgcgatctctacctgtttatatttaagatgggaccttagatacatatctatcgttcgaactcattacaccttgcatatacaggatgcctgtctgagttggtgaacagctgtataggaagctgtaggaaggttgagattctgcatacagattctagacatgcagcgcaaatttgttgacccatgttgccccggacactctaacgcccatatttttcaacgaatctagtataccctagttactctacgagtaacgggtataaaaatatgcccccaaacctcacctttctggaacatcaatatttctaaaatcgacacaacacaacactcaataagttcaacaaaaacaaaactgttgaggcaatgagcttttttattgactttgaggagtagtgtggcaatttataaacacggtaaagttaatgtttcaattaatatttcagttttatatccatatattttgcaccacagggctgtagtgtacataacgaacggcggcagtgcccgtaccgaaccgattaagagctaaagtgcatcacagcagtaccggtgtgagtaacaataaatttgtaactgaatttgctatgcagaaggcaaatgagcaagtttcaccaaattaagattcacagattaagatgcaaaatctattgctgcacagagcaatgtattgctcgctgggaccaaacatcctccccccgt

SEQ ID NO: 1745 - DNA, 1094 bp, DROSOPHILA
cttacaatagccctacgcatgacctatgatgtggcgggagccacttttctagcggcttccacatcggcaccggaactgtttgtaaactttgtgggaaccttcgtcactaatggcgacatcggacttggcactatcgtgggatcttccgtgttcaatatcctggtaattgcaggagtttgcggcatatttactcaaccgaccaaactggattggtggccggtgaccagagacacagcgtggtacctcatagctatagcgtcgctcacatatgtgttgtgggattcgttggttatgtggtatgaggcttttgcccttttactactatacatttcttatgtcattcaattgtcctttgaccgtaggatccaaaatttggttcgacgtaagaagaatgaacacgcggagtcggagctgttggacgaagatccgatgacccgcgaagaagagccgctgaagggatttcgcgaccacgtgtgtgcgaaaccgaaaacggaatacaatttttaccagtggacctggtgggccatcaaatatccggcagaattgatgcttgcctgcactgttcccagtgctagatccatcttcttcctttcaatgatttcggccatcctttggatttccttgatatcctatcttcttacgtggtttctcacaatattggggtacaacctcaacattccagacgcgatcatgggccttactgtactggccgccggcactagtgttccagaagtcgcgtcctcgtatattgtgtccaaaaaaggatatgggtcaatggccatctgcaatgccattgggtcgaacacattcgacattttagtatgccttggtctaccctggcttctgaaaattcttatttaccagcaaaagatcgatatcgactccacagcccttaccatcaccacggccatgctagtagtaactgccgccgttctttatttgggtcttctggcaaggaggtttgtgatgggcaagaccgtcggatatctaagcataatcttctatgcgctttttctgattatcgcctgtacactagagatattattgaacaaagaaaaaatgtgcgacatccaggattaattgagcctaattaa

SEQ ID NO: 1746 - protein, 353 aa, DROSOPHILA
MTYDVAGATFLAASTSAPELFVNFVGTFVTNGDIGLGTIVGSSVFNILVIAGVCGIFTQPTKLDWWPVTRDTAWYLIAIASLTYVLWDSLVMWYEAFALLLLYISYVIQLSFDRRIQNLVRRKKNEHAESELLDEDPMTREEEPLKGFRDHVCAKPKTEYNFYQWTWWAIKYPAELMLACTVPSARSIFFLSMISAILWISLISYLLTWFLTILGYNLNIPDAIMGLTVLAAGTSVPEVASSYIVSKKGYGSMAICNAIGSNTFDILVCLGLPWLLKILIYQQKIDIDSTALTITTAMLVVTAAVLYLGLLARRFVMGKTVGYLSIIFYALFLIIACTLEILLNKEKMCDIQD

SEQ ID NO: 1747 - DNA, 2751 bp, DROSOPHILA
catcgccatcaccatcgccatcagcatcagcgccaacaccagcccagtctccctcaggtgtcctgagcgaccatccagccactttgagcgtgaacaggtgagtgacaatgtgaaaagggatcctaaagggatgctagcctgatcgcacaggctgatgccatgtgggaggcccattcccgaaaacaaactgaggcaagaataaaatagaaatataagtgatcctatggggtttccaagcgatgtcatttataaaaataaaccgactttcttggtacctataactactgttactataaattacgtttataaacactataaacacgtttttccaaaaatgaggtcgattttcttttaccttttctttaactagtatcctaattgggtcaaaactgaaagtaattataatgctcagacgttttaagcatgaatatttaattcgagaaaaatggcagccatctgctataacaattttcaaagccaataaaagctcattaaaactcttcaaagattgtgctactttaaactgtcattagtagtataaaaatacatcataaaagtttcaaataataagtaaggcctatggtatcgatcaatttactctattgtaaacaatttgacaaatttataaagtttgtagtcttgggatcagcagtgtgttccactcattatctgtcgccattaactgcgtcctgtatactgctatctatggatgctgttgactcgcacaaaaagccaggattgtctgttccctgagggagtcacacttttgccgcttcgggacatttgtacacctaatgcataaaacaatgtatgtatgttaatttgcgcgaatacataaatgttgatatctggctaaaaaagaaatatactcggatagtacgtttctaattactctaagccttatcctgaaaattgagtttgctggtaaggatccatctcatatcttgccctccataaatattagatccatgatcatcgaatgtgaatatctgtaaaaaccaaaaaaaaaccgcctgcagagatgccgattcaaccaaccccagccctactcaaaaagctccatttggaagattttttcttcctcctttgactcggacttctcctcgctctgttgatccttatccttttctagcaggaagattgtctcgccaacgaacggattactgcctaccacttcgacctcattcgaattatcttcgtcctcgtcgctcagcatgagccggtatgtaggaagcccaaactctgaggattctccaaacatatcgtattccctggcctcgtcgatgtcctcgccgtcggactctacctctgagccctcactgtcgccctcacagcagaggatctcgtgggcaagcagcgaaatagtctcttcgcagaaattctcctgctcctcctccaagtcgctgtctgattctgccgacagcagactgtacatgctcgtctgcggactggtgtcgggatcggccactgtgcagctctcatctggatcggatgtgcggttcgctattagtggaaacacatttttctagattggtaatcaccttcgctatcgctagtatagtcgtcgctggttagctcactctcgctagtggaaatatccgaaacgtccgcgtttatgttgatctggtctctggaattggcagggtcgctggccatgttcgattgtgtctaatcccggctcctatatctgtacgtccatgtgctgtatctcttagtttcagactgtctgactgtctgactgtctggctgtctcctggtgtgatgtgattctgattctaaacttgtttccatgcgtgctggaaatgttttgcccggcaaatgctactgggattagttttgggtttcggggcttggactatagattcgagatgggtgcaggaagcgacactgccagcacgtaatgtcctgggcgcttccttccaggacggcgaattaaattttatgccaactgcaatgcccttaaaggcgaaggcagagagagagagagagagaggtcttcgaaacggaaaaggccacggagacagggccaagatggagccgtagttggagaccgggctaactgcggcatcgtcacaggccgcaggccgcgctccacatgcacactggttgccgaaaggacacaggactcccatagccgcacacatacacacacattcgtacgagaacgcgtacatgaactggctaccgcagcaaagttacatttgaaattttatttccatggccggggctcaaatgcaacaaataaaaacgagccacggagttgcctctgacccggttcccgggttgtactccacttcgctccggagtcgctatcattgtatcactctgatctgggccaggcgacacgcctcctccgccttctcgggtatccacacctccgttgcaaggacatccggcgtgggactcgaccatagcgcaccaagcaagccacttgatagggcaggcacaaattgccagacaacgaacggccttaatgcaattgatataaattgatataaattattatgagagtaattaccatatcgatggtgcgggaacatatataatttattttttgctcttaaagcgcaactaattaatttctgttcatctacttcgtttatttattccttgcgaataaaataataatgcacaacaaagtagttgcactagaatttcagtacttgtatattgttccatctaccctagaaatactctttatgtgtacctcaagctcaattgcttaactgcaatgtaattctagtcccatta

SEQ ID NO: 1748 - DNA, 692 bp, DROSOPHILA
gacagccagacagtcagacagtcagacagtctgaaactaagagatacagcacatggacgtacagatataggagccgggattagacacaatcgaacatggccagcgaccctgccaattccagagaccagatcaacataaacgcggacgtttcggatatttccactagcgagagtgagctaaccagcgacgactatactagcgatagcgaagatgagagctgcacagtggccgatcccgacaccagtccgcagacgagcatgtacagtctgctgtcggcagaatcagacagcgacttggaggaggagcaggagaatttctgcgaagagactatttcgctgcttgcccacgagatcctctgctgtgagggcgacagtgagggctcagaggtagagtccgacggcgaggacatcgacgaggccagggaatacgatatgtttggagaatcctcagagtttgggcttcctacataccggctcatgctgagcgacgaggacgaagataattcgaatgaggtcgaagtggtaggcagtaatccgttcgttggcgagacaatcttcctgctagaaaaggataaggatcaacagagcgaggagaagtccgagtcaaaggaggaagaaaaaatcttccaaatggagctttttgagtagggctggggttggttgaatcggcatctctgcaggcggttttttttt

SEQ ID NO: 1749 - protein, 183 aa, DROSOPHILA
MASDPANSRDQININADVSDISTSESELTSDDYTSDSEDESCTVADPDTSPQTSMYSLLSAESDSDLEEEQENFCEETISLLAHEILCCEGDSEGSEVESDGEDIDEAREYDMFGESSEFGLPTYRLMLSDEDEDNSNEVEVVGSNPFVGETIFLLEKDKDQQSEEKSESKEEEKIFQMELFE

SEQ ID NO: 1750 - DNA, 6861 bp, DROSOPHILA
acctaccttgcatgtggatgagacgtcggttttcttgcagaaattgaccggtgccagtccgggcagatagaaggcctgtgtcggggtcgcaaggtgcaagagaacgacgcccaggagcggcagaagtccggatagcaggatcatctcgaattggggtaaccaacgaacggcaggagtagcagaccttcttcctttacttgtacgggttgtaatcacaacgtggccgtgtccgcgattctctgccacactttccggatcggcgggccacgcacaaaccgtactatctggatatttatcggaatatacggagtttttcgagtgtttttactacgtttcctcttttttgccgaacgtcagcactgtagcagcgttgccacctagtacagctgagagggctgccaactggctgacaaaaaaactaccagcatttgcaaagctaaatattaccgcgaaaacctttagctcttattattattacgtgcaaaacgaaatttggtagacttaataaacttttatatttaaattaattaattcccctgttcagtaagcgaatgcaaccaatatacacacgtatacgtgtgatacttctaagatattactatttttatccactgtttcttaatatagtaatcaaattttgttcatttgttagttttttacctacgactcttaagtcaaagtattcgattatttagttcgttcgaggttttgcttccgtgcttatctttgaatatgaaaattttcgataagcacaatcattcaaatttaacgattgatttttggggaggcaaacgcgttttaatacaagtagtaagtattttggtcttatcgttcctgactaataatatattttgtcaaatggttgcacatttcctacgcatttaagaatatttaattaatacgttattagatttaaaaattatcgatagttcgaataaagcaatcgaataggtgtcgcctttttcatcgaaactcagtgctatcaaataaaaatcgacattcgtttcagctctatttcaaatcggagacacaagaaatatattgcctgcacttcccgaagagcagataaaggttctgccaccattaaataggcttataataataactaagaaaatcgccgttaggaatcccgcgcttttttaccgttcccgaaaaataaccaaacaacaatgtgagtagaatgaagagttctactgaacgcgcttgttgtgtgcgtgtgtgcgaaaaaatcaattcttttgacaatcaaggtgttgcaacctgtcgaaataaaatcgccagcttcagcggagcagcccaataactttaactcttttgtctccaccatttgcagccgacagactagtgttgtctagtaattacgcaaaaattccatcacccacacagacgcacgagctgcagaaagaaacggaaagtgaagtagaaatcatatagagaggaaaagagcgaagacatgacttccgatatcgccatgcaattgattgccattttggaaaagacggtgtcgccaggtgagtttccccactgctacaaacgtgtgtgtatagatccgaaaaatatggatttttcttcgattggcgggagggacgcgcgttatatgttgcgcagggttgcaataggcgctcgcatatgtttggttgctaggggcctccgcacacatgtgcatccacgtacatactccaagggaaacttggcggcgcgtctgtatgtattcgcaatgcttgcgctcctacaattaaggatgtacgaaccgcctgcgacataacctcactaactctaggaatcgatgaggcgtcgcttcggagtcaccaccgtatgcttggcggccagttcttccggttgctgataaggaatgcctgcaaacttgccccttgcctgaagattttatgctccaccgctacaattcattactagaccttactgcttagctcttcatatgcacacacttctttcaccatctattgtattcttattaaacaatattctcactatatacgccttgcctaaaagttcctatcttgccttcacattcccaaaagtcaattgttgtaaaattcaatggcctgataccaaagctttaagccgacccaaaatggtgggcgtgtgtaggcccacaaataaaatctttcgttgacataattggaaattaaaaatgtctaaccaaccaaatgacgcattttcagacaaaaatgagctgctatcggcgaagaactttctggagcaggcggcggccagcaacctgcccgagtttctcaaggcgctgtcagagatactggtgaacacggccaacagtgcggtggcgcgaatggcagccggtctccagctgaagaaccacctgaccagcaaggacgagaaggtcagccaacagtaccaggatcgctggcatcagtttcccagcgagatccgcgagttgatcaagaataacgtaagttacatacgctgatgttgaaacatatgacttgtacaattggcactgaataactgcgacttactttcagatcctggctgctttgggtaccgagaacacccgaccctcctgcgccgcccagtgcgtggcctatgtggccgtgattgagctgccgataaaccgctggcccatgctcatccagacactggtgaacaaggtggtcagcgaaggatccagcgagatgcatcgcgagtcggcgctggaggccattggctacatttgccaggacattcgtttcggcgtcatggagaaccagtcgaacgatgtgctgactgctattattcacggcatgagaaaggtagagccgagcaatcatgtacgcttggcggccaccacggcccttcacaactcgttggagttcaccaaatcgaactttgagaaagacatggagcgcaacttcatcatggaggtggtgtgcgaggccactcagtgccaggactcgcaaatctgcgttgccgctctgcagtgcctggtgaagattatgaccctttattaccagtacatggagccctacatggcacaggctcttttccctattactttggcggccatgaagtctgataacgatgctgtagcgctgcagggcatagagttctggtcgaacgtctgcgatgaggagatagatctggccatcgaaagccaggaggccactgatcagggccgcgctccgcagagagtgtccaagcactatgctcgaggtgctctgcagttcctgacgcctgtgctcgtcgagaaattaaccaagcaggacgagtgcgatgacgaggacacctggagcccggcgaaggccgcctccgtttgcctcatggtgctggccacatgttgcgaggacgagatcgtgccacatgtgcttcccttcatcaaggagaacatcgagtcacctaattggcgattccgcgacgcagcggtaatgactttcggctccgtgctgaatggattggagaccaataccttaaagccgctcgtggagcaagccatgcccacgctcattcgactgatgtacgactccagcgttatcgtgcgcgataccatcgcctggaccttcggacgtatttgcgatgtgcgtagtggtgatttttaaggtgattcatattgtcatactaaccttctactgctttttcctgacagataattcccgaggcggctatcaacgagacatatcttcaaacgcttttggagtgcttcgtgaagagcctaaagtcagagccgcgtgtagcagccaacgtgtgttgggccttcattggactttccgatgcagcttgggaggcagcggtcaccaacgacggagagactccggagacgtacgccctgtccccgtactttgagtacatcattacccagttgctggagaccactgatcgatcggacggagctcaagccaatttgcgatgtgctgcttatcaggcacttatggatatgatcaagaactctcccttggattgctacttggtggtccagcgcaccacgctggtgattttggagcgcttgaaccaggtgatgcagatggaaacgcagattaacaatcacagcgatcgtcatcagttcaacgatctacaatcgcttctgtgcgccactctgcaaagcgttttgagaaaggtccacgagcaggatgcgcctcaaatttccgatgccattatgaccgctctgctgaccatgttcaattcaagtgctggaaagtcgggtgtagtgcaggaggaggccttccttgccgtttcgacattggttgagcttttgggagctcagttcgccaagtacatgcccgctttcaaggacttcctcgtcatgggtctgaagaacttccaggagtaccaggtctgctgcgcagctgttggtctcaccggcgacattttccgcgcccttaaggacctaatggtgccctattccaacgaaattatgaccgtattgataaacaatctaacggagccgactatccatcgaaccgtcaagccccaggttctgtctgctttcggagatattgcgttgagcattggcaaccacttcctgccatatttgagcatggtcctagatatgttgcgcgttgcgtccaatctgcaggttaggttacaacacgaatggtatatgagggaatcgttaacactttctataatcattttcagacggacgccaacaacttcgatatgaacgaatacatcaacgagctgcgtgaaagcatccttgaagcctacactggcatcatccagggccttaagggcgttgaccagactgcccatacagacgttatgcacatggagccccacctgatgcacattatttcgttcatcaagcgcatcgctcaggagggcgacgtgtccgactcaatgttggccagtgccgctggcttcattggcgatctgtgcacttcgtttggtccgcggctatacccgctgctggatgatgccatcattacccaattccttgccgagggcaagcgctccaaggcgcagcgcaccaagatgctgtgcacctgggccgtcaaagagataaaaaaaatcaatacccaggtcatcacgcagtaggccacctgctagaggttaatgtttcttcgcttcccaccagaccctcaagattgtgtgtaatgcagtgaaagtggtgagtacacgacattcccactatgtatttcatcatcgaacgaatggtgtgtcgattcttggaaagtggctcttaaaagaaatttaaaaaaaagaaaaaaaaatttcctttaaaacttttatattcgtaatggcttgcaccaaaatcgactatcccctactctactgattgttccgagtttatttttaattttcacacatttctctatttttgcagtccagtccgaattctctgattaaaagaatctatctgctaagtttgtccgatctattgttgctgtgcaacttctaaatgctaagaccacttgtttataaaactccctacccactagctgtaagttcaattcgatccactgtttcgactcaatattttaattaaggtctgttaatattcgtgtgagtttaattatcccttacctatgcctattgtcctcgatccgtaatgcaaatcccaaaacgaactacccattgactagagcgctcgcaattgatagtaagtagttactcacaagccggctttaatggcagtttagttttgggtaggctacggcaaccagcgctttgttaacccgattttaagcattaccaaaaaccaaacgttgctgttactcaaattatgtaaaattcacaattacttataaaaatcggtagaaaataattgatttgataagaacaaatacattgaatgcattgctgccccctttggaaacattaacttgtagcggatttaagagccacactttaggatctaagaactcatgtatctaccctactagctcactagcgcaacaaaaaaaaaatataaactaagaatgaatgtgtgaaccaaaccgaaccgaatgtgatggagtgaaacatatggctgagagcgagtatgtaccaactagactatgtaagatgcgtgtctgtggtccgacccctacccctatgccaatagttatgctgtgatggatgcttgagaggaactatgtctatgtacgtggtattttgattgcgacaaacccccgaaatgtttggaaacggatgaggattccccctttctgtggcgcgcgtgtgcatcggcgtgttgtgtgatattatggattaagcgtaagaacttttctagtgaaacgaatgattttagacctaagcaaaaccaaacagcaattcaaaaagattttaaacggatttgaatttaaatttacaagcaaacgaaacgaatgaatacaaaccgaaactaaactaaactaaatgtaagacactgaaaagacgactgaaaacgaaacccaaactagaaactaaaacgaattacgaatacgaaatgacttagggacgtacaaaggcgcgggagttaagtccgtgatcgagggtggagccttttgtgaagatatgatgtgtaaatgtatgaaggtttttaagtttcagcagatagttgtagtgtgaagatttccaataaagaatacgactgactttcttgaagttcaaaatcagtatgaagtttattgtcagagagtggctactcgagtcctccgttttcgtcttatacataagtacataggttcttaattggaagcataatgaacatgccgactcggcatgtggctggctagctggggacaatgttgcagtgcgacttttgtgtaatgtcagcattcggccggaatgtcagcattcggccggatgcggtgttccagttgccgtcttcccggttgagtgtccgatgatttgtttagaggcgtgggggtttagggggtggggtggtaactcgcgcacatatcaagctgcgctctcgtcattcgggccaaactgtcgaattggtctcgttca

SEQ ID NO: 1751 - DNA, 3608 bp, DROSOPHILA
tcgtttcagctctatttcaaatcggagacacaagaaatatattgcctgcacttcccgaagagcagataaaggttctgccaccattaaataggcttataataataactaagaaaatcgccgttaggaatcccgcgcttttttaccgttcccgaaaaataaccaaacaacaatccgacagactagtgttgtctagtaattacgcaaaaattccatcacccacacagacgcacgagctgcagaaagaaacggaaagtgaagtagaaatcatatagagaggaaaagagcgaagacatgacttccgatatcgccatgcaattgattgccattttggaaaagacggtgtcgccagacaaaaatgagctgctatcggcgaagaactttctggagcaggcggcggccagcaacctgcccgagtttctcaaggcgctgtcagagatactggtgaacacggccaacagtgcggtggcgcgaatggcagccggtctccagctgaagaaccacctgaccagcaaggacgagaaggtcagccaacagtaccaggatcgctggcatcagtttcccagcgagatccgcgagttgatcaagaataacatcctggctgctttgggtaccgagaacacccgaccctcctgcgccgcccagtgcgtggcctatgtggccgtgattgagctgccgataaaccgctggcccatgctcatccagacactggtgaacaaggtggtcagcgaaggatccagcgagatgcatcgcgagtcggcgctggaggccattggctacatttgccaggacattcgtttcggcgtcatggagaaccagtcgaacgatgtgctgactgctattattcacggcatgagaaaggtagagccgagcaatcatgtacgcttggcggccaccacggcccttcacaactcgttggagttcaccaaatcgaactttgagaaagacatggagcgcaacttcatcatggaggtggtgtgcgaggccactcagtgccaggactcgcaaatctgcgttgccgctctgcagtgcctggtgaagattatgaccctttattaccagtacatggagccctacatggcacaggctcttttccctattactttggcggccatgaagtctgataacgatgctgtagcgctgcagggcatagagttctggtcgaacgtctgcgatgaggagatagatctggccatcgaaagccaggaggccactgatcagggccgcgctccgcagagagtgtccaagcactatgctcgaggtgctctgcagttcctgacgcctgtgctcgtcgagaaattaaccaagcaggacgagtgcgatgacgaggacacctggagcccggcgaaggccgcctccgtttgcctcatggtgctggccacatgttgcgaggacgagatcgtgccacatgtgcttcccttcatcaaggagaacatcgagtcacctaattggcgattccgcgacgcagcggtaatgactttcggctccgtgctgaatggattggagaccaataccttaaagccgctcgtggagcaagccatgcccacgctcattcgactgatgtacgactccagcgttatcgtgcgcgataccatcgcctggaccttcggacgtatttgcgatataattcccgaggcggctatcaacgagacatatcttcaaacgcttttggagtgcttcgtgaagagcctaaagtcagagccgcgtgtagcagccaacgtgtgttgggccttcattggactttccgatgcagcttgggaggcagcggtcaccaacgacggagagactccggagacgtacgccctgtccccgtactttgagtacatcattacccagttgctggagaccactgatcgatcggacggagctcaagccaatttgcgatgtgctgcttatcaggcacttatggatatgatcaagaactctcccttggattgctacttggtggtccagcgcaccacgctggtgattttggagcgcttgaaccaggtgatgcagatggaaacgcagattaacaatcacagcgatcgtcatcagttcaacgatctacaatcgcttctgtgcgccactctgcaaagcgttttgagaaaggtccacgagcaggatgcgcctcaaatttccgatgccattatgaccgctctgctgaccatgttcaattcaagtgctggaaagtcgggtgtagtgcaggaggaggccttccttgccgtttcgacattggttgagcttttgggagctcagttcgccaagtacatgcccgctttcaaggacttcctcgtcatgggtctgaagaacttccaggagtaccaggtctgctgcgcagctgttggtctcaccggcgacattttccgcgcccttaaggacctaatggtgccctattccaacgaaattatgaccgtattgataaacaatctaacggagccgactatccatcgaaccgtcaagccccaggttctgtctgctttcggagatattgcgttgagcattggcaaccacttcctgccatatttgagcatggtcctagatatgttgcgcgttgcgtccaatctgcagacggacgccaacaacttcgatatgaacgaatacatcaacgagctgcgtgaaagcatccttgaagcctacactggcatcatccagggccttaagggcgttgaccagactgcccatacagacgttatgcacatggagccccacctgatgcacattatttcgttcatcaagcgcatcgctcaggagggcgacgtgtccgactcaatgttggccagtgccgctggcttcattggcgatctgtgcacttcgtttggtccgcggctatacccgctgctggatgatgccatcattacccaattccttgccgagggcaagcgctccaaggcgcagcgcaccaagatgctgtgcacctgggccgtcaaagagataaaaaaaatcaatacccaggtcatcacgcagtaggccacctgctagaggttaatgtttcttcgcttcccaccagaccctcaagattgtgtgtaatgcagtgaaagtgtccagtccgaattctctgattaaaagaatctatctgctaagtttgtccgatctattgttgctgtgcaacttctaaatgctaagaccacttgtttataaaactccctacccactagctgtaagttcaattcgatccactgtttcgactcaatattttaattaaggtctgttaatattcgtgtgagtttaattatcccttacctatgcctattgtcctcgatccgtaatgcaaatcccaaaacgaactacccattgactagagcgctcgcaattgatagtaagtagttactcacaagccggctttaatggcagtttagttttgggtaggctacggcaaccagcgctttgttaacccgattttaagcattaccaaaaaccaaacgttgctgttactcaaattatgtaaaattcacaattacttataaaaatcggtagaaaataattgatttgataagaacaaatacattgaatgcattgctgccccctttggaaacattaacttgtagcggatttaagagccacactttaggatctaagaactcatgtatctaccctactagctcactagcgcaacaaaaaaaaaatataaa

SEQ ID NO: 1752 - protein, 884 aa, DROSOPHILA
MTSDIAMQLIAILEKTVSPDKNELLSAKNFLEQAAASNLPEFLKALSEILVNTANSAVARMAAGLQLKNHLTSKDEKVSQQYQDRWHQFPSEIRELIKNNILAALGTENTRPSCAAQCVAYVAVIELPINRWPMLIQTLVNKVVSEGSSEMHRESALEAIGYICQDIRFGVMENQSNDVLTAIIHGMRKVEPSNHVRLAATTALHNSLEFTKSNFEKDMERNFIMEVVCEATQCQDSQICVAALQCLVKIMTLYYQYMEPYMAQALFPITLAAMKSDNDAVALQGIEFWSNVCDEEIDLAIESQEATDQGRAPQRVSKHYARGALQFLTPVLVEKLTKQDECDDEDTWSPAKAASVCLMVLATCCEDEIVPHVLPFIKENIESPNWRFRDAAVMTFGSVLNGLETNTLKPLVEQAMPTLIRLMYDSSVIVRDTIAWTFGRICDIIPEAAINETYLQTLLECFVKSLKSEPRVAANVCWAFIGLSDAAWEAAVTNDGETPETYALSPYFEYIITQLLETTDRSDGAQANLRCAAYQALMDMIKNSPLDCYLVVQRTTLVILERLNQVMQMETQINNHSDRHQFNDLQSLLCATLQSVLRKVHEQDAPQISDAIMTALLTMFNSSAGKSGVVQEEAFLAVSTLVELLGAQFAKYMPAFKDFLVMGLKNFQEYQVCCAAVGLTGDIFRALKDLMVPYSNEIMTVLINNLTEPTIHRTVKPQVLSAFGDIALSIGNHFLPYLSMVLDMLRVASNLQTDANNFDMNEYINELRESILEAYTGIIQGLKGVDQTAHTDVMHMEPHLMHIISFIKRIAQEGDVSDSMLASAAGFIGDLCTSFGPRLYPLLDDAIITQFLAEGKRSKAQRTKMLCTWAVKEIKKINTQVITQ

SEQ ID NO: 1753 - DNA, 8034 bp, DROSOPHILA
tggccttttgtgttggtcaaaactggagcgagcctcgcacatttttcgagccatgctcaaatgggcaccggagggcgttggtgaacggcgttttgttgttgcgagcggtccaccgcaggcggcggtcactgtacgggcgaccgtgctaaattcgtagtcacacaattagcacctgtccgtccgcttggtttagctagctgactagtttcgggcagccggcgcatgtcgtctccattaccaggtctgtaacaatggattatatacattttcaccactcgctggccggctgatcgcggtacagtgagcaccctgtcgaaagcgacaggccaccattccaattaaatgaccaaaatgggcaattacgattgtgacacatttttaattgcagcatttgacatgctgcaatgtgcgaaagtgcttattattatttagttatgtgatagagttagttgcggatcgatacaaattggcaaatgagtatattacttaagcggattatcaaactgtaagctagtgaacttaatctattaattaagagcaaataagtaagttgatctgattagtagagcttccacttgcttaataaaaaataaataaataaataaataaaaaaacctggaaagtcatcacttgggtatgactactgtagcttagtgagttatactttttgcctttattgctgagataacttttttggccgtgggcgcttgtgtttaaactgaattcttgtttatttggtgtttgctttggctagataactgctcaaaatgctgcccaaatcttgataaattgcccgtttccaactaagtaagtaatgttttctgtcaaaatcgaattctttcaatgcaatttgtctagtaatctcttcttctattgtgggtgtccgcttataaatggcaaactatgtgtatttaatctgaaaaattccagaagcttgaatactttttacaaaatttgtagctaaaggtgtcttaattaatttggttttatcattttgtagatgaagaaatcgcgcgacgcggataaatcatccgccacgttgtccgccaccaataccaatgcgaatgctgtcaatttatcggctgctgataagaagaacaacaacaacaactgcagcaatcgcaacaaagagaagagcatgcaggcgaacggtaaaaattggaaggtgagcgcaattaacaacgcaactgtgcggtaattaaggaaattaaggaggtaaagcagaagcgaaagtggtgggcggaatggaaaatgcagggaaatgcgcgaaaatgcgagtgcgatagatgcgaaatgagatgaggtaactgcaaaaatcttgatgcacgtgcgacgagcacgttaaccgttatgcggccgactgactcttgactcgctcgcacttgcagacactgtgatgctccaactttaaccctacgacggcccagtatgtcaatacagtcgtgggcaagacactaggttcaaaaaaaagtaataatcacaaacggagcattgttttcgtttcttttcgttaaaaaaaaaatacatttctcttcttatactagtaaacctttcttgtcgtagcattttcttaaataatctttgtttaagtaaactagtaagcttcgagctattaaatcactttctaatgctaattaacaattacatgtcggttattgcactcatttgcatgcttgaaaagctaaacagaattggcgaaatgcgattgggaaactgggcggccgagttgtaaagttaaagtgcgtaaaagcgttaagagtgtgaaattggccggcgaaaagtgatgaccgatgtggggattatgaaacgaggaagccattcgagtttaattacttgttgttcgctggactctagtttgcattgttattgctcttcagctggctttggcagcatcacatatcgtatggaagcacatggaatcacatggaatcacatcacatggaggcacgcagccgatgaggaaaactgaaactgggccgagtgctgacccgttttcgtcttggccccaagaaaagtggtggcaacagccggcagtggttttttcctcttaccttagttgcgctttaattgtttttttttttttttttctaaattgtgcccgtgtgtctgcgttctgtttttctgtttcttctgtttttagccgctttcgcaactgcaacataaaagccaattcctctcctcattcgccgctttgttacgtgctatttcagtctgtttaaaataaacacgggctgtggatcatactacagcaatgatgaattatttattttttgtaattgaaaattccttctaaattctcttatttaaatttaaattcaaactaacctccggttaacggtagctgcatctgcttcggttggcaacgccgcctcctgcacgcttcattaagttggcaacgccaacggcgcgcaatttgaattaattgctaggcataaatacacaccagaaaatacccagaaaacgaagaagtccgaaatgcaatgcgaatttccttaattaatgctgctgcttcctcgcacaaaatccaaatatcgcatgtcgcatttgcatgctgcagcagcattaaaaacgagaaaaaaaatcataattttcaagtgcgagattttgaatttttcaccagtttaagagttttctcagccggttcgttccgtgatttgatttaacggcatgatttggctgaaaattgaacagcatttaaggcgcttagctggtcagcgacctagcttaattattgagtccgccgaaaagtgcttaatactgatgaacacaagcaattgtgtgtgtgtctctttcttttttcctcatttttattcggttcttcgcagggcattgtccagagtaatcccaatccgagtggcggtgtgggcaccacggctcagccgccaaaagttttccacaacacccgatgcacaaggcaccacaaaccgcaccacagtcatggtaatggtagtgcagcttccgccgtcggaggagctgcaggcttggccaatggaccaccaatggaagccacacagcagcgggaaagggaacgggaaagagatagggatcgggaacgggaacgtgaaagagacagggagcgagacagagaacgggagcgggaacaccaactccatatgcaccagcacaatcacgggctgcggagaaaatccgagtccgtcctgtccaccgactcggacatccgcttcacccgccggaaattgggcgatggccaaaagtgcggctgtgccgtcatcgctggattcctcatcgccctcctcgtcgccggaatatttgtctatgtgggatgtgagtactttagtaaaccaaaaatattgtatttgatacagatacattacccaccgattgtttatcccatgcagatacctattttcgaccggagccgctgccagatcgcgtttttcgcggccgctttatggtgctgaacgacaagtggagcatggagctggccaaccagaactcgatgcggtttcagcacaaggcgcgcgactaccgggagcggatcaatctcaccctgcgccgatctgacctgcgggaggcgtacgagggcagcgagatattggccctggatgggtgcgtaaaactgcatttactttttttatttagcttaagacagcacaaaaaagtacatccccatatccctcttttcccatcctatcctggttatgtacaactggctactgagaacggagtaccaattgatcgttggtcagcttctgggattcttgttcctgactggtattttaaacgaaaatcccacaatttttcctacaaaatgtacaagaaaaattttgcatacggccagcagtaccattcgtttggtgtacaatattttcgttgcatacttttgggccgtcagatttcgagtttagcagaacatagaattctcaagtctgaatcgattgggaattaagaaacaaactatattcccaaactatgttttgctcaaaatacagattatttattttacaaaaaatcaggaaaacgatttttagccaaaaattcaatatttaatataggtttttgggtataacttggctaaaaatgcccacacagccaaaagaataacagttttgtgctcctaattaccaatactaaccatccctatcacttttggaaggactttcaaaaattaatttttgcccaaattttcgcattttttgtaaggggtaccatcatcaaaatttgcgaaaaatggcaaaaaattaaaatttccatgtttgaatacagtttgatagggaattttgttacgaattcaacgaggtatgacattccatatttgagccattattttaagtgctatgctaaaattactgattattttttgacaaaaaatcaggaaaacgatttccaatttcccccaaaaaaaaacacagttcattcattcatttcctttattttgtcctttgaagttgctttaacattattaagtctatttataatttataatttatttagttacattttccttaacaataattggtttgctggttattaaatcgacaggagcgaggataacaacaacatagtcgttcacttcaacatgatcttcgatccgtacgcgggtctggtgagcagtggtgaccttttggccctattccacgaggagatgacccagccgccgcagcagcgccgccattttgccaacatgacggtggatgtggccagtttaagcatcaaggagacgactggcctgatcgaggagcccataatgtccagttccccgctgggcggacacgatgagaccaccgaaccggtggtcaccaccactccggctccgccacgtcgctgctcaccgctggagctatcctactgccgccaggtgggctacaacattaccacctatccgaatcttctgggacacgccagttacgaacagttggccgaggacgtgatcgtcttccgggaactggtggacggtgaatgccatcgggaggcctacgactttgtgtgccggctccttcagccgccgtgcgatacgcacggctccgatttgcagccaactccgggccagatatgccgcgagtactgtgaatccttcatggccggttgtggcggtcgattgccgcagcgtttccgccagttcttcgactgcgaacgcttcccggagtccacgggcacccagtcgtgccaccagaagccgcactgtgtcagcgatatgcaatccaatgtccagagtcctcggctatgcgatggctatgccgattgtccggatctttccgacgagcgcagctgcgccttttgctcacccaacgctctgtattgtgggcgtggcagggcgtgtgttccgcgcaaggcacgatgtgatggcaaggcagattgtccggatggcgccgatgagaaggattgctgtgagtaaccaccagttgttcccaggaaccacctcaaaagatttcaatgctctaaatgctgttaaatattttgtagtatctatagctccactggccgccgatctgctgcagccggagccactggttccgtacctctcccgcttccattccgccggctacgccgtcttctccgagaagggagtggtgggcaagctgtgcgccgagggtctggaaggcgatgccaagctggtggtgcgccaaacggtctccgagtcactttgcaagtccctgggatatgagtaaggatgcaattatattaaatgtattatattatatgtatatttatacataaaataacttttttagatccgtggaaatattcgatgtgcagaacgatacggaacgtttgaacgactacgtgcgtgttttggatccacatgcgccggagatcagcttcatacggacgcactgcccccggcggcaagtgctctacgtgggctgcggcgagctgcgctgtggcgtccagtcggcgcttttcaatgccaagcagcacctctcgctgccaaagatgtccgctcctggggattggccctggctggttgccctgttccgcgaggatatacacgtttgcgacggcaccctgatcacgcaggattgggtcctcaccaccgagggctgtttccagggccagccgcgtgccacttggatggccattgtgggtgcagttcgtctgtccgctaaggcaccgtggacgcagaggcgccgcatcattggcatgatcaagagcccggtagaaggttcgacggcggcactggtgcgcctggagaccccggtcagttactcggatcatgtgcgacccatttgcctgccggacgccctgcagagacgcctgctccagcagccaccggcccagaggagatctcatgttccggtggccgagcgattggagggtcaacttgtgagccaacagcgaagtcgattatcgcaggagaaccagcagttcttcctgataccatcacaggagcagcaggacagctccacggagaaccagggggatgaggatcaggacgagcaggaggatcactttggtggcgaatcagccgcctcctatatgcccaaagcggaggctttgcaccaagaattggatggctacccactgccggatcatgcgccgcaggtgaattactactcctcctcctccacggtcacatcgtcctccaccgccgcccgcatagccaccaaggctcccattttggcggctgttccggctgcccaggagcaaatctggaccaattgcaatacactcggttggtcccggcagcgggatcacctgcagcgtgtccagctaaagatgggtgacatggcgccctgcgagaatgtgtccattgcgaccgtcaactccatgtgcatggaggccacctaccagaagtacgactgcacggtgagtagccaaaagattgggaaaggcatagtgtattttctaaaatattacttagctttattaaactgattcacttcattgagagtaggaggggatacaaattaattgttcagttagttatttataatcaacgtaatgaaaagtaatttgtataaaaaagaggattgaattttatatttataactagtttatttgaaaaaaaagtttattacggcgattaattaaatctcaaatcataataggccagaagattgcttaggatctaaagtatgtttcattcacatagcttaaaattattaacaaaaatggttattttttacataatataacatttggtttggacgtttgtttggtgcgattactgcagtgtaagtcttaggaacaatggttcaaccttttagcttatgaatacatctaattggagtatcgtatacgtagtagagctatgtacaatccatgattggcgacctagatgcgaatcgagcgcatgacaggaacgggagacggaccaaccgacgtggacgctgtgcgtcttggcttcgaacagacgtccacgcgctggcgcttcttgggcggctccttttggtcatcgtcctcctgcagccgaggtatggaaatctcatccagctgctgctgcgactgttccctaaggaaacagttctgacgatgcacaggaatggcgccggcagtgggcagcgatcccaggaagcaattcatccggtagaccggcaccggcttgtactccggcaccggatcttccttttcttggtcctcctccttctgaccctcggcttgctccaaatccactagacgctttcgcttaagggactcggtctggcccagactgcggcgcatctttgaccagtcaaatctcaggtgaaaggtgatctccgggcaggggaacaaaagcaggaaatactccagcaaatgcgcctcaaacacgtagtccttgccgttggtcaggatgagggctttcctttgtgtctccggaatggcgaagcgggtcatggctggaaaaaaattcagtcaattaatattagaataatgtaatagattccgattctttacaatttactttcaatttattgtcttccaaattttaaactttttattttcatgaaaggtttatttaacaaatatttttttgatatttagttaggaaaagaaaacgctgtgaatgggattcaatacttttcagtgttcttaaagcaaaggcacgcaaatttagttgttgaattaaattttaaattggcttggaagacgacg

SEQ ID NO: 1754 - DNA, 2910 bp, DROSOPHILA
atgaagaaatcgcgcgacgcggataaatcatccgccacgttgtccgccaccaataccaatgcgaatgctgtcaatttatcggctgctgataagaagaacaacaacaacaactgcagcaatcgcaacaaagagaagagcatgcaggcgaacggtaaaaattggaagggcattgtccagagtaatcccaatccgagtggcggtgtgggcaccacggctcagccgccaaaagttttccacaacacccgatgcacaaggcaccacaaaccgcaccacagtcatggtaatggtagtgcagcttccgccgtcggaggagctgcaggcttggccaatggaccaccaatggaagccacacagcagcgggaaagggaacgggaaagagatagggatcgggaacgggaacgtgaaagagacagggagcgagacagagaacgggagcgggaacaccaactccatatgcaccagcacaatcacgggctgcggagaaaatccgagtccgtcctgtccaccgactcggacatccgcttcacccgccggaaattgggcgatggccaaaagtgcggctgtgccgtcatcgctggattcctcatcgccctcctcgtcgccggaatatttgtctatgtgggatatacctattttcgaccggagccgctgccagatcgcgtttttcgcggccgctttatggtgctgaacgacaagtggagcatggagctggccaaccagaactcgatgcggtttcagcacaaggcgcgcgactaccgggagcggatcaatctcaccctgcgccgatctgacctgcgggaggcgtacgagggcagcgagatattggccctggatgggagcgaggataacaacaacatagtcgttcacttcaacatgatcttcgatccgtacgcgggtctggtgagcagtggtgaccttttggccctattccacgaggagatgacccagccgccgcagcagcgccgccattttgccaacatgacggtggatgtggccagtttaagcatcaaggagacgactggcctgatcgaggagcccataatgtccagttccccgctgggcggacacgatgagaccaccgaaccggtggtcaccaccactccggctccgccacgtcgctgctcaccgctggagctatcctactgccgccaggtgggctacaacattaccacctatccgaatcttctgggacacgccagttacgaacagttggccgaggacgtgatcgtcttccgggaactggtggacggtgaatgccatcgggaggcctacgactttgtgtgccggctccttcagccgccgtgcgatacgcacggctccgatttgcagccaactccgggccagatatgccgcgagtactgtgaatccttcatggccggttgtggcggtcgattgccgcagcgtttccgccagttcttcgactgcgaacgcttcccggagtccacgggcacccagtcgtgccaccagaagccgcactgtgtcagcgatatgcaatccaatgtccagagtcctcggctatgcgatggctatgccgattgtccggatctttccgacgagcgcagctgcgccttttgctcacccaacgctctgtattgtgggcgtggcagggcgtgtgttccgcgcaaggcacgatgtgatggcaaggcagattgtccggatggcgccgatgagaaggattgcttatctatagctccactggccgccgatctgctgcagccggagccactggttccgtacctctcccgcttccattccgccggctacgccgtcttctccgagaagggagtggtgggcaagctgtgcgccgagggtctggaaggcgatgccaagctggtgaacgatacggaacgtttgaacgactacgtgcgtgttttggatccacatgcgccggagatcagcttcatacggacgcactgcccccggcggcaagtgctctacgtgggctgcggcgagctgcgctgtggcgtccagtcggcgcttttcaatgccaagcagcacctctcgctgccaaagatgtccgctcctggggattggccctggctggttgccctgttccgcgaggatatacacgtttgcgacggcaccctgatcacgcaggattgggtcctcaccaccgagggctgtttccagggccagccgcgtgccacttggatggccattgtgggtgcagttcgtctgtccgctaaggcaccgtggacgcagaggcgccgcatcattggcatgatcaagagcccggtagaaggttcgacggcggcactggtgcgcctggagaccccggtcagttactcggatcatgtgcgacccatttgcctgccggacgccctgcagagacgcctgctccagcagccaccggcccagaggagatctcatgttccggtggccgagcgattggagggtcaacttgtgagccaacagcgaagtcgattatcgcaggagaaccagcagttcttcctgataccatcacaggagcagcaggacagctccacggagaaccagggggatgaggatcaggacgagcaggaggatcactttggtggcgaatcagccgcctcctatatgcccaaagcggaggctttgcaccaagaattggatggctacccactgccggatcatgcgccgcaggtgaattactactcctcctcctccacggtcacatcgtcctccaccgccgcccgcatagccaccaaggctcccattttggcggctgttccggctgcccaggagcaaatctggaccaattgcaatacactcggttggtcccggcagcgggatcacctgcagcgtgtccagctaaagatgggtgacatggcgccctgcgagaatgtgtccattgcgaccgtcaactccatgtgcatggaggccacctaccagaagtacgactgcacggccagaagattgcttaggatctaa

SEQ ID NO: 1755 - protein, 969 aa, DROSOPHILA
MKKSRDADKSSATLSATNTNANAVNLSAADKKNNNNNCSNRNKEKSMQANGKNWKGIVQSNPNPSGGVGTTAQPPKVFHNTRCTRHHKPHHSHGNGSAASAVGGAAGLANGPPMEATQQRERERERDRDRERERERDRERDREREREHQLHMHQHNHGLRRKSESVLSTDSDIRFTRRKLGDGQKCGCAVIAGFLIALLVAGIFVYVGYTYFRPEPLPDRVFRGRFMVLNDKWSMELANQNSMRFQHKARDYRERINLTLRRSDLREAYEGSEILALDGSEDNNNIVVHFNMIFDPYAGLVSSGDLLALFHEEMTQPPQQRRHFANMTVDVASLSIKETTGLIEEPIMSSSPLGGHDETTEPVVTTTPAPPRRCSPLELSYCRQVGYNITTYPNLLGHASYEQLAEDVIVFRELVDGECHREAYDFVCRLLQPPCDTHGSDLQPTPGQICREYCESFMAGCGGRLPQRFRQFFDCERFPESTGTQSCHQKPHCVSDMQSNVQSPRLCDGYADCPDLSDERSCAFCSPNALYCGRGRACVPRKARCDGKADCPDGADEKDCLSIAPLAADLLQPEPLVPYLSRFHSAGYAVFSEKGVVGKLCAEGLEGDAKLVNDTERLNDYVRVLDPHAPEISFIRTHCPRRQVLYVGCGELRCGVQSALFNAKQHLSLPKMSAPGDWPWLVALFREDIHVCDGTLITQDWVLTTEGCFQGQPRATWMAIVGAVRLSAKAPWTQRRRIIGMIKSPVEGSTAALVRLETPVSYSDHVRPICLPDALQRRLLQQPPAQRRSHVPVAERLEGQLVSQQRSRLSQENQQFFLIPSQEQQDSSTENQGDEDQDEQEDHFGGESAASYMPKAEALHQELDGYPLPDHAPQVNYYSSSSTVTSSSTAARIATKAPILAAVPAAQEQIWTNCNTLGWSRQRDHLQRVQLKMGDMAPCENVSIATVNSMCMEATYQKYDCTARRLLRI

SEQ ID NO: 1756 - DNA, 4154 bp, DROSOPHILA
tggctaggccaccattgtgtgtgaactggagtaatcgtatccgttggcaacgggcgcaattagcagactgataatgataatggcgcgagcccaatgtggtcgctatgagccatccaagtcggttatgcccggccgattcagtaaacaaaatggcaaacaaaaaaaaactaacgacgtaacgtgcgcagcagcgatcagatcgcaccacttgactttgagaaagggttctgtttccagtaggttccacgggcagtaaataaactgcctcgcagctgctgggccacatgtacatatgtagatagccagataaaatgtacaaatgtatgtatgtatataacccggaggaactggttctggtgaaagagattcgatccgatacgccgaagacacctcgttggatgcgacgcgaactacacgtaatagttgaaacgctgcgatcacaaaagggggttcaaatcaggcagatcgtatatatttatatacatatatatctgggtataccggtagagtcaagacccgtttaatatgcgagacatccacgtcgactagaggactctcgcttgcgcttaacattgaaatggatgggtggtgatggtggcaaaacgggaattgtgcactcggttactgtgtcaccaatccaacagctgttgtctgcactgcaataaaatgccacatcaaagtaacaaagttacagaatatgtggaacaactaataggtaactacaagtacatgttaacagattattaaccgggtttaattagacatcacatgtagatttgtatactgtgcacaagtcactcgtcatttctttcagcgaagcattcctggcattctgattcagtctatttgcaatttcgcaattgccagtcgcagacggtgataagtcgcccgctgctatttctttccatttttttttcttttgtggaaatgtttccccggatgataagaccagaggtttgaggcgaaagtccgcccgccaccccctgataaagacccacgtgctccgtacaatcgtttattgtggtgaattacaaaaaaaaaaaagcacacaaaatatacgtaaaaaataatcactttccgcttagcgtctgcaggtgtttatcatcttatttttgggtggcgctgttgcagggaaagatgcctcacagtttcttcttcttctacgctctagggttaatgtgtaggatatataatgtagtatatgtattggttttagttgaacggggggtttgcgattcgaatccactcccactcgccaggagcggccccgttcagcgaacagatagcctctttaggaggtggtctcgaagtactccttggacttggtgggatcggccaccatggtcttctggccgggcttccagttggcggggcagacctcgccgtacttgtcggtgtactggaaggcctggacgagacgcagggtctcctccacactgcgacctacgggcagatcgttgacggtgatctggcgcaagttctgcttgtcatcgatgatgaacaggccgcggaaggggatgccagtctcctcatcgagcactccatagtcgcgggccaccttcatcgacttgtcagccagcagtggaatgtccatgctgcccagaccaccctgcttccttggcgtgttgatccaggccaagtgggtgaactggctgtccgtggagcaaccgatcacctcgcaattgatcttgcggaactcggcggcgctctccgagaacgcaatgatctcggtggggcacacgaaggtgaagtccagcgggtagaagaaaagcaccaggtatttgcccttgtagtcgctcaacttgatgtccttgaaaacaccgttgacgacggcggtgccggcgaatgcgggagcgggcttctgtagctggggcatctgttcaatgaatggatggcgaattagagacatgtttcttcaaactagcgaataattaacaacaaagtgctctgaacttagtcgccttcttttgagaacttcaattgtaaatccctcatatggtccccttgaaatctcgctgtgactgatacttcctctttcgaccgatacgcatcttatcttatctatcaagattttttgggccccacaaaaaacaaaaatttcatcactctaacctcggattattacaagataaccgttgtttaaaaaaattgcatttatagaggctagtgaaatcatggaaattaatatgaatagatactgttaaagtattatgatgggaaatcaatattatgctaggcccttagaatgaaaattggaaatatttacgaaattcttgaaatttctcatatgcaatatacctattttgtagtaaacttactattttataacctttaatcttgcctatgtaacttccaattggttttcaattgtaaagtagttaacttgatgctaattccatactaaaagtctctataaatcggagttctaatggcggcaattactaacgattaagggcaattacccttgacttccagatatttcgccacaaactggaaagatcaaagaggagagtagaaaagctgaactctacaaaatggccgccgagcgaagcgaaatggaagaaacccggaataataaattagccaaatttttcgactgctcccatttatgcgattgaatttattgaactgtcggcacgttcgcgtatttcatgtaatggatgcgaattaattacaaatcacaaacttatttctgaattggcaaatattttcctctagttttgatttcatttttgtgccctttttttcgccggctcttcgcgtgtacgtgtgtgtgtaagtgtgtgcgacggacgtgccaataaagtggaaaaaaaagaacgaaatgtgaagaaaaaaactatgctctcggtgcaaaaagttgtgaaataatctcgaatctgccgaccgaacatgaacatcattatcttttgctcatcgaaaaagaacaacaacagcaacaacagcgatgctaatttctaatcttacgctccgcaatttctcgccgactttgcccagaatgagcgacctgttcatcgcccaaggaacactcactttaaacagttatattttttctcttagtaattctcggtaattgcttgacttccgcgtgggcttcctcttgttcgttctctcgcagcttcagctttcgcacaaacaaacctttcggcacgagttgaaattcgcgaatggattgaaattaagcgaatgctggtcgaccagggctgccgcaacacggataccgcttgcgataggcagcgccgattaacgctgctcatcgatattttttagcaagtgcttaaagcgccatctatcaactattggcgtgcttttcaaaagtggattctacattttaaatggtaagttttaatattcaagttttaagatagtagcgcttaataacttttgatagacttggaaacaagtactactactaataataaataatgtgtaataatatgtactgagcagtacttttagtataattcgggcacaccagcttaacggtcacactggtcgtcattttgccgccaaaatgaaaaaaccgcgcttttttttaattcttccattataaataatgtagttaaagaactgattcctgtttataataaccatttctattccactttggcgcaaataatattttctatgtattatgctattctgtggtccacaaatctccacaaataaattgaaacaagtactttcgttttttcgttttgttttaactgaatttaatagtgcacaattagtagtatttagtaggtagtcgcataaccattatattaaaaacttagtctaagctcttgttgcgtgttgggtgtgttcatttcttagttacttttcgtatcgttacgatcgacagttgcaactgccttgtgggtattatctccagccattcgggtatctctaggattcgccaaacgtgaatttttttgtttttttttttgttttggataaataaattacactacagcagcagcagcagcacatataggccaggctatatatcttctatatatgtatatgtacgcgtatatcgtatatattaaaaaatatgtgtatgcatattgtgatttcagtctttgattttaaacttaaggggttaaatgtacgcaaactgttagaaaaaaacaaaaaaaaaatgtataactaagcctaggaattggggatta

SEQ ID NO: 1757 - DNA, 997 bp, DROSOPHILA
ctcgtgccgaaaggtttgtttgtgcgaaagctgaagctgcgagagaacgaacaagaggaagcccacgcggaagtcaagcaattaccgagaattactaagagaaaaaatataactgtttaaaatgccccagctacagaagcccgctcccgcattcgccggcaccgccgtcgtcaacggtgttttcaaggacatcaagttgagcgactacaagggcaaatacctggtgcttttcttctacccgctggacttcaccttcgtgtgccccaccgagatcattgcgttctcggagagcgccgccgagttccgcaagatcaattgcgaggtgatcggttgctccacggacagccagttcacccacttggcctggatcaacacgccaaggaagcagggtggtctgggcagcatggacattccactgctggctgacaagtcgatgaaggtggcccgcgactatggagtgctcgatgaggagactggcatccccttccgcggcctgttcatcatcgatgacaagcagaacttgcgccagatcaccgtcaacgatctgcccgtaggtcgcagtgtggaggagaccctgcgtctcgtccaggccttccagtacaccgacaagtacggcgaggtctgccccgccaactggaagcccggccagaagaccatggtggccgatcccaccaagtccaaggagtacttcgagaccacctcctaaagaggctatctgttcgctgaacggggccgctcctggcgagtgggagtggattcgaatcgcaaaccccccgttcaactaaaaccaatacatatactacattatatatcctacacattaaccctagagcgtagaagaagaagaaactgtgaggcatctttccctgcaacagcgccacccaaaaataagatgataaacacctgcagacgctaagcggaaagtgattattttttacgtatattttgtgtgcttttttttttttgtaattcaccacaataaacgattgtacggagc

SEQ ID NO: 1758 - protein, 194 aa, DROSOPHILA
MPQLQKPAPAFAGTAVVNGVFKDIKLSDYKGKYLVLFFYPLDFTFVCPTEIIAFSESAAEFRKINCEVIGCSTDSQFTHLAWINTPRKQGGLGSMDIPLLADKSMKVARDYGVLDEETGIPFRGLFIIDDKQNLRQITVNDLPVGRSVEETLRLVQAFQYTDKYGEVCPANWKPGQKTMVADPTKSKEYFETTS

SEQ ID NO: 1759 - DNA, 3599 bp, DROSOPHILA
tggctaggccaccattgtgtgtgaactggagtaatcgtatccgttggcaacgggcgcaattagcagactgataatgataatggcgcgagcccaatgtggtcgctatgagccatccaagtcggttatgcccggccgattcagtaaacaaaatggcaaacaaaaaaaaactaacgacgtaacgtgcgcagcagcgatcagatcgcaccacttgactttgagaaagggttctgtttccagtaggttccacgggcagtaaataaactgcctcgcagctgctgggccacatgtacatatgtagatagccagataaaatgtacaaatgtatgtatgtatataacccggaggaactggttctggtgaaagagattcgatccgatacgccgaagacacctcgttggatgcgacgcgaactacacgtaatagttgaaacgctgcgatcacaaaagggggttcaaatcaggcagatcgtatatatttatatacatatatatctgggtataccggtagagtcaagacccgtttaatatgcgagacatccacgtcgactagaggactctcgcttgcgcttaacattgaaatggatgggtggtgatggtggcaaaacgggaattgtgcactcggttactgtgtcaccaatccaacagctgttgtctgcactgcaataaaatgccacatcaaagtaacaaagttacagaatatgtggaacaactaataggtaactacaagtacatgttaacagattattaaccgggtttaattagacatcacatgtagatttgtatactgtgcacaagtcactcgtcatttctttcagcgaagcattcctggcattctgattcagtctatttgcaatttcgcaattgccagtcgcagacggtgataagtcgcccgctgctatttctttccatttttttttcttttgtggaaatgtttccccggatgataagaccagaggtttgaggcgaaagtccgcccgccaccccctgataaagacccacgtgctccgtacaatcgtttattgtggtgaattacaaaaaaaaaaaagcacacaaaatatacgtaaaaaataatcactttccgcttagcgtctgcaggtgtttatcatcttatttttgggtggcgctgttgcagggaaagatgcctcacagtttcttcttcttctacgctctagggttaatgtgtaggatatataatgtagtatatgtattggttttagttgaacggggggtttgcgattcgaatccactcccactcgccaggagcggccccgttcagcgaacagatagcctctttaggaggtggtctcgaagtactccttggacttggtgggatcggccaccatggtcttctggccgggcttccagttggcggggcagacctcgccgtacttgtcggtgtactggaaggcctggacgagacgcagggtctcctccacactgcgacctacgggcagatcgttgacggtgatctggcgcaagttctgcttgtcatcgatgatgaacaggccgcggaaggggatgccagtctcctcatcgagcactccatagtcgcgggccaccttcatcgacttgtcagccagcagtggaatgtccatgctgcccagaccaccctgcttccttggcgtgttgatccaggccaagtgggtgaactggctgtccgtggagcaaccgatcacctcgcaattgatcttgcggaactcggcggcgctctccgagaacgcaatgatctcggtggggcacacgaaggtgaagtccagcgggtagaagaaaagcaccaggtatttgcccttgtagtcgctcaacttgatgtccttgaaaacaccgttgacgacggcggtgccggcgaatgcgggagcgggcttctgtagctggggcatctgttcaatgaatggatggcgaattagagacatgtttcttcaaactagcgaataattaacaacaaagtgctctgaacttagtcgccttcttttgagaacttcaattgtaaatccctcatatggtccccttgaaatctcgctgtgactgatacttcctctttcgaccgatacgcatcttatcttatctatcaagattttttgggccccacaaaaaacaaaaatttcatcactctaacctcggattattacaagataaccgttgtttaaaaaaattgcatttatagaggctagtgaaatcatggaaattaatatgaatagatactgttaaagtattatgatgggaaatcaatattatgctaggcccttagaatgaaaattggaaatatttacgaaattcttgaaatttctcatatgcaatatacctattttgtagtaaacttactattttataacctttaatcttgcctatgtaacttccaattggttttcaattgtaaagtagttaacttgatgctaattccatactaaaagtctctataaatcggagttctaatggcggcaattactaacgattaagggcaattacccttgacttccagatatttcgccacaaactggaaagatcaaagaggagagtagaaaagctgaactctacaaaatggccgccgagcgaagcgaaatggaagaaacccggaataataaattagccaaatttttcgactgctcccatttatgcgattgaatttattgaactgtcggcacgttcgcgtatttcatgtaatggatgcgaattaattacaaatcacaaacttatttctgaattggcaaatattttcctctagttttgatttcatttttgtgccctttttttcgccggctcttcgcgtgtacgtgtgtgtgtaagtgtgtgcgacggacgtgccaataaagtggaaaaaaaagaacgaaatgtgaagaaaaaaactatgctctcggtgcaaaaagttgtgaaataatctcgaatctgccgaccgaacatgaacatcattatcttttgctcatcgaaaaagaacaacaacagcaacaacagcgatgctaatttctaatcttacgctccgcaatttctcgccgactttgcccagaatgagcgacctgttcatcgcccaaggaacactcactttaaacagttatattttttctcttagtaattctcggtaattgcttgacttccgcgtgggcttcctcttgttcgttctctcgcagcttcagctttcgcacaaacaaacctttcggcacgagttgaaattcgcgaatggattgaaattaagcgaatgctggtcgaccagggctgccgcaacacggataccgcttgcgataggcagcgccgattaacgctgctcatcgatattttttagcaagtgcttaaagcgccatctatcaactattggcgtgcttttcaaaagtggattctacattttaaatggtaagttttaatattcaagttttaagatagtagcgcttaataacttttgatagacttggaaacaagtactactactaataataaataatgtgtaataatatgtactgagcagtacttttagtataattcgggcacaccagcttaacggtcacactggtcgtcattttgccgccaaaatgaaaaaaccgcgcttttttttaattcttccattataaataatgtagttaaagaactgattcctgtttataataaccatttcta

SEQ ID NO: 1760 - DNA, 1013 bp, DROSOPHILA
cagtcgaaaaatttggctaatttattattccgggtttcttccatttcgcttcgctcggcggccattttgtagagttcagcttttctactctcctctttgatctttccagtttgtggcgaaatatctggaagtcaaggatgccccagctacagaagcccgctcccgcattcgccggcaccgccgtcgtcaacggtgttttcaaggacatcaagttgagcgactacaagggcaaatacctggtgcttttcttctacccgctggacttcaccttcgtgtgccccaccgagatcattgcgttctcggagagcgccgccgagttccgcaagatcaattgcgaggtgatcggttgctccacggacagccagttcacccacttggcctggatcaacacgccaaggaagcagggtggtctgggcagcatggacattccactgctggctgacaagtcgatgaaggtggcccgcgactatggagtgctcgatgaggagactggcatccccttccgcggcctgttcatcatcgatgacaagcagaacttgcgccagatcaccgtcaacgatctgcccgtaggtcgcagtgtggaggagaccctgcgtctcgtccaggccttccagtacaccgacaagtacggcgaggtctgccccgccaactggaagcccggccagaagaccatggtggccgatcccaccaagtccaaggagtacttcgagaccacctcctaaagaggctatctgttcgctgaacggggccgctcctggcgagtgggagtggattcgaatcgcaaaccccccgttcaactaaaaccaatacatatactacattatatatcctacacattaaccctagagcgtagaagaagaagaaactgtgaggcatctttccctgcaacagcgccacccaaaaataagatgataaacacctgcagacgctaagcggaaagtgattattttttacgtatattttgtgtgcttttttttttttgtaattcaccacaataaacgattgtacggagc

SEQ ID NO: 1761 - protein, 194 aa, DROSOPHILA; identical to SEQ ID NO: 1758

SEQ ID NO: 1762 - DNA, 2734 bp, DROSOPHILA
ccgagttaaacataacttcaatagatgctatcgatcagggtgtcaccttttcgtgcagtgtacttggccaagggcgtggcagtctggcggagggggggggggggacctcgtccgcgacatcgtcgattaattcgagtcggggacatcggtggctggggcttccctccgccgcttgccccattgataaacgttgggcgctcgcgttgaatttcttgctgacaagtgtagcccggcaagaaattaatcgcgctgcttatctgtcggccggttattgggcaattttgagtgtgccttaattaatgcgactgcaattagttgggccgcagcgtgacagcgacttgtccgctggtcctgtgccaataaaccgccagatggagtgcgtcgggaggaagggattgggcagtcatcactatccccatcaccataaccatcagcagttttggtgaatttgggggcaactggtggttgccgcaagctaacctttcgcagctgtgtagcagctgaatgactcccaacaccaggtggtactggtggcttccggggagcgaaatcaaaaatcaggaatcggtgctcgcggttatcgcatcggcaacgcgcacgttttgttacttgatttatttttaatttttgatttacgaatgctagtgcgggcagtgtggtctcctctttttccgcatagaataccaaaatcttcccgttccacaacaagcctgatttagctgttttgtttgcaacttttgtaaatcttacggctataggaagcattttcaggcaaactcggacctattatcattttgttacttttggttactttccagttatatacagcaagtatatttgtttaagccataactcaccatcccgccactttggtgaagtagaaagttcgtgaagtagtccctaggtggcgctagccaagcgccaaattcaaacggagcaaccgtttgccttaagttttcaaatatttcatttacgcattattacacacccagaatcaatcatgagcaaagtcagaggaccagctttgtaccgcctggtgccctcgaaaacgctcttcatgctgtgcgacgtgcaggagaagttcaagccggccattccgctgctaagttcgctcatcgaaaacactactaaactggtgagacagcgagaagtgacaggataatggtcgggttctaatggattcacattccagctggcagccggcaaggtcttccaagtgccactgctggtcaccgagcagtatcccgagaggctgggcaagaccgtttgtgagttggacatcaagcatgcctgtgccaatatttccaagaccatgttctctatgctggtggagccggtacgtaagagtatgactgatatcttcggtggcaagcccaagacggtggtgcttttcggtctggaggtgggttatggcttgagttagggattggtttagcaaaatgaccccgcttccacatgatttagacacacgtctgtgtggagcagacggccttcgacctggtaaatgatgaaatcgatgtctggctggtggccgactgctgtgcgtcgcgtcacaatcaggatcgggacttggccttggagcgcctgcgtcacattggctgcaacatagcaacttccgagagtgtgatatttaatctgctgggggacaagaacaacaagtccttcaaggagattactcctctggtgaagaagatctccgcagacatgcagctatgccgcgtctcaaaaaattaagcctggcggcacttttcatgtctttcgctcagtaaaccatccttccagcccatgcagagtgtgtgtcaccttagaaattatgagaattatgagagaaggacccaccggtagggcggcctccctgtcctcgtcaactcataaacatctcggccaagtggacatctgaatggaggagcatatggggctacccctttttgcccaggcggcgccttataagaaccatgaagacacacagatcccatgccagaaacatcccatcctatcccatcccatcccatcgatagaaacagcagcttctgcacggcagtgctgccaatttatgcaatgactttgactcggctctttggacctggaattggctggctgtgcagttaaattttatgatgcaatcgcaacaatctccagcgcccatctagccatcttcaatcggcgctgcaggcatcccagccagcgctgcagtcatccggcggtacagcgatcgtatccgaaccaagtgatggtgacaatgtaggcaggcgtctgattgactcataacaggccacgcaaacatcgcgatcttgatcgccatttgcatgccaaggagaggatctccgccgcctccggcagcttgcaatttatttgcccagtccgggtcccatctctctaagcccctaaaccgctgcaaagcgcaacttatggcgatggcatctcggcacgcgataagtcaacaacttatccgagttccactctagggatctgatccatccaattaggtatgcccctcggctgtggctttaattctgtccatgcctaggcgggaaaagtgaattgggctaacggcagtgtgcgtaagcctttgccgcccagcgaatccataaattgctggccttgtaactggtttttatattaccggtgccaacgaagctcacatttgggatattaataaattcggttttcttttttcagccgcacgatgcttgctggcaaagagatgataaatctgtgaaattgcctgcgcggt

SEQ ID NO: 1763 - DNA, 615 bp, DROSOPHILA
atgagcaaagtcagaggaccagctttgtaccgcctggtgccctcgaaaacgctcttcatgctgtgcgacgtgcaggagaagttcaagccggccattccgctgctaagttcgctcatcgaaaacactactaaactgctggcagccggcaaggtcttccaagtgccactgctggtcaccgagcagtatcccgagaggctgggcaagaccgtttgtgagttggacatcaagcatgcctgtgccaatatttccaagaccatgttctctatgctggtggagccggtacgtaagagtatgactgatatcttcggtggcaagcccaagacggtggtgcttttcggtctggagacacacgtctgtgtggagcagacggccttcgacctggtaaatgatgaaatcgatgtctggctggtggccgactgctgtgcgtcgcgtcacaatcaggatcgggacttggccttggagcgcctgcgtcacattggctgcaacatagcaacttccgagagtgtgatatttaatctgctgggggacaagaacaacaagtccttcaaggagattactcctctggtgaagaagatctccgcagacatgcagctatgccgcgtctcaaaaaattaa

SEQ ID NO: 1764 - protein, 204 aa, DROSOPHILA
MSKVRGPALYRLVPSKTLFMLCDVQEKFKPAIPLLSSLIENTTKLLAAGKVFQVPLLVTEQYPERLGKTVCELDIKHACANISKTMFSMLVEPVRKSMTDIFGGKPKTVVLFGLETHVCVEQTAFDLVNDEIDVWLVADCCASRHNQDRDLALERLRHIGCNIATSESVIFNLLGDKNNKSFKEITPLVKKISADMQLCRVSKN

SEQ ID NO: 1765 - DNA, 3918 bp, DROSOPHILA
atgaaatcgtccaaaatcaagataatggctttactgggggtataccacaattaggtggacacgtgcatggatttccatttcccatccttctgaaggcggtactgcacccggtctgcgatttggtcgagacccaccttcaggaagtcccaacgctgcggttggaatttccaagcggtactagaagaagttgtaattatgtatatgttaatttactaaatatagatatacatataaacttcgaaactcactagcttgctggtctctcgatggattttcctctgtgatccagaaggaactgatcgtgctttgccttgagatcatcgtagttaatcggttctccacagggacagatgtgacccctgatttgggcagccaaattctccttcgcccacaaagcatccatttcgctttggtcaagttccacggcggtggctccaatcaatctcacctgccaggcattctgatttccggccttatccttaacatctggcatatagaaggtgatgcaggccttgggattggcctgaaggttcttgaagttgcgaacgtaccgatgggtgatgtagaacacacagttatcctgggtgagtccgcggtacagaacagtgcggttgagcacaccgaattcctcgtccacggtggccaggttcatttcctgtatgaatccatcgggatgtcccttggcagcttcctgaaggatctccttaaaaaattcaacgggatcggagggaaagtcctcgattttggccaaagaggaggtcatattggtgggtccttgaagcgaaaaatattcttatacattttgaaaatgtaatacacatttaatgttaattggtaaagccccttataactgaagtaatgtactgtcattcaaatttggcgcactttgcgcgctgttaacgctaacagcactgtaacagaagcgcagtactttgcagcggttctataatcgatagccgttgatttcacgttatatttgcgaagctatcggttactatcgatacatagaaacgaaacaaattctcccaattttcggctgaaaacgaggaacaccaactcgcgattctggggcggcagaacgggaaatcccgccgaggagcagcatgacctccattctggacatgaaggccggtccgcccgactactgggcggagatcagcaacttctttctgccgctgaaatacctgatcaccaacgaccgcttcgattcgatggtgcgggacatagacctctattacctgatcaacggggtcttttggatattcgtggcgttgtcttgcggctactacgccttccagcggctcttccaggtgggtccagcacgtggcaaatcctttcaatcgcagcaccctcgacgcggcgcctccaattgcacttttcttttgaggggttgctcggccaatttgccgtttataaataaacagagcggacacggtgccggattcgcgcattccgggggtggacggggtgccaaccgagtggggcgctaaaaatactgttaccaaccctttgaaaagcttcaaaacacaacgaaatgcggcactttttgtattgttttggcttgcaactaagctgtaaatgattattatttaaatatgttgtctcttgtaaaatcaatataaggcgaagatagtattgattttactcccgacagtcattgtttaagggattcagatgtacttccttccccattcggttggcacttcgctcctggctttggtgatagcataagtccggtgacagtcgacccatcggcgctgaccataagccatataaaccattatctgtagtgacccaagaccaatgctcgactaattgctcctctcccttttcagttctttctgaagtcgtcgagcatgaagcactttcagcggaggctgttcgcccgcgtcatttggaacatcgccttctatgcggccagctgcctgttcctgcacttctacaacgagttcatgatcctgccgcagctgatgaagaaccaaggacgctactcgctcttctactcctcggagaacctgatcttctatcgatctcatcaggcggaaaagtttcagttctactcgatcttcattatcacgttctacctgcatggggcgtggttggacttcaaggacgctgacttcctggaggtgggctccaagggactctacctgctgtccctcgtcgccatcgatgtttacaggcaagtcgagacacgtttggtccctaccattctagcctggagccatttaagctcgaaaatattaaatactctttatttttaggtacgaaaactactttgtgggcctgaatctaacggtgggtctgtacagcatactcaccgaggtgctagccctgttggtcctgcccagcaccaattcacaccggatcatctaccaggttttcctcggtctgcgcatcatggtgtgggcgtatgtgtttgtcaacctactgccctttaagtacttcatacccacgctgttcgccaagaactttaagctttccctgaatgtgcccatttggttgtggtacggcctctccatttggaactcgccggtgctgcaatacttctaccatcagatatatcacacagcgccgtcggattgttcgggcgagggatcggcggctaagtgcatcctggtcaaggacaccagtgagttccggcactacaagacactgaagaaggcctatttggaggtaaagctggcacacattagaaccacgtccaattcgctgccctccgaaaccagttcggcctcggccaaaacctttcaggccataaaatgtaagcttcctgcactaaccgatgttgaatatctgattaacaatcattttccctggcaggcgtcatgatgcttaagcgcaaattgaagcgaattcgcgagggacgtggccatgagccggaggatgacaacgatgaccaggccattgatacctaatcgcgtcctaccgcacggacgcagcacacttttacacagtagaaaaccacatttccttaaaccaaaccaaaaaagacacaagttcagcttaggctaataactcacaaagttgaaactagcgctctctctctctctctcactcaggctgatttcggtttatgcgtgttagctagaacgcgatcagcgcgaacagtgcgttttggccaacattcagatcgtaatcaaaaaataggaatatttaacacttgaaaatttgtaaatttgtcaacgtttttgttgtaaagactttaaaaatatcagttggtagcttttaatcaaaaattatttaaatatctcaacgattcaaatatacgcgttaagaacataacaactaaaggttgtcaaaattaaaacatgaatataaacgataaatcaaacgtgcagataatctcaaaggctatatacgcaaaaatcgaaaagtgaggcttacaaaattaatctcctagaagtatttaaaataatgttatatatctttaaaacgtcgaattcgactgttgccaaacgcactgttctaatagtacttattcgataataaaccacagtgcgtttcgatgcgagcaatacaacaattgacgcactgttgtcactagttaacaattatttataaaaactctagatcaatattaaatgtaatatctaccaatcacgatttagacagcacgcataaaccaagcggctgaaagaccttagcaaatttagttagtatcgctcgatttttggcgccaacggagatcgtcgctgatgatatatatacatatagttactatatctctataccaactctctctctctctctctccctcgcacacacgatcgcagtttctctctcgtttagatttgtaagtcgccttcaacttattgttgttgtttattcgctgtgacttaatgacatattgaaatattgtaatgtgttgttttttttttcgttcttttaattgaaatatactatatatgggctaaa

SEQ ID NO: 1766 - DNA, 1168 bp, DROSOPHILA
atacatagaaacgaaacaaattctcccaattttcggctgaaaacgaggaacaccaactcgcgattctggggcggcagaacgggaaatcccgccgaggagcagcatgacctccattctggacatgaaggccggtccgcccgactactgggcggagatcagcaacttctttctgccgctgaaatacctgatcaccaacgaccgcttcgattcgatggtgcgggacatagacctctattacctgatcaacggggtcttttggatattcgtggcgttgtcttgcggctactacgccttccagcggctcttccagttctttctgaagtcgtcgagcatgaagcactttcagcggaggctgttcgcccgcgtcatttggaacatcgccttctatgcggccagctgcctgttcctgcacttctacaacgagttcatgatcctgccgcagctgatgaagaaccaaggacgctactcgctcttctactcctcggagaacctgatcttctatcgatctcatcaggcggaaaagtttcagttctactcgatcttcattatcacgttctacctgcatggggcgtggtacgaaaactactttgtgggcctgaatctaacggtgggtctgtacagcatactcaccgaggtgctagccctgttggtcctgcccagcaccaattcacaccggatcatctaccaggttttcctcggtctgcgcatcatggtgtgggcgtatgtgtttgtcaacctactgccctttaagtacttcatacccacgctgttcgccaagaactttaagctttccctgaatgtgcccatttggttgtggtacggcctctccatttggaactcgccggtgctgcaatacttctaccatcagatatatcacacagcgccgtcggattgttcgggcgagggatcggcggctaagtgcatcctggtcaaggacaccagtgagttccggcactacaagacactgaagaaggcctatttggaggtaaagctggcacacattagaaccacgtccaattcgctgccctccgaaaccagttcggcctcggccaaaacctttcaggccataaaatgcgtcatgatgcttaagcgcaaattgaagcgaattcgcgagggacgtggccatgagccggaggatgacaacgatgaccaggccattgatacctaa

SEQ ID NO: 1767 - protein, 354 aa, DROSOPHILA
MTSILDMKAGPPDYWAEISNFFLPLKYLITNDRFDSMVRDIDLYYLINGVFWIFVALSCGYYAFQRLFQFFLKSSSMKHFQRRLFARVIWNIAFYAASCLFLHFYNEFMILPQLMKNQGRYSLFYSSENLIFYRSHQAEKFQFYSIFIITFYLHGAWYENYFVGLNLTVGLYSILTEVLALLVLPSTNSHRIIYQVFLGLRIMVWAYVFVNLLPFKYFIPTLFAKNFKLSLNVPIWLWYGLSIWNSPVLQYFYHQIYHTAPSDCSGEGSAAKCILVKDTSEFRHYKTLKKAYLEVKLAHIRTTSNSLPSETSSASAKTFQAIKCVMMLKRKLKRIREGRGHEPEDDNDDQAIDT

SEQ ID NO: 1768 - DNA, 6659 bp, DROSOPHILA
ctattgctacctacatccattgtagatcacccgctgaaccaatgtggccgaaccccgattctgccactgctcatttgccgcagagtcagcttccatggcccagcttccgattcttgatgccaaccaacaatccagcagccggcagcaaattgcctgcaaagtgttgcaataataaaaacccatgcttggaggcgtgtcccaacacaaagctgcgatacacgacacacgagggtgatgcgataccaaacagggccagttcccagtttccacttcccagttgccagtgcgagtccctttccctggggtggttttcctcctgttggcctttcggccgggaacaattaggcattcggtggtgaagaggggcgagttacaggggagttgcaataaacaagagagtcgggaggcagccaataagtcgctaatgcaattaaaaactcacacaaagcagagggagctgctaatgctaataagtcacgagggaagagtcctgcgcccggcgcccgggatgccagtcagcccaaaaaggaggcgtgacacgtgaaacacctggagtgattgctgttcccgtcgtctaccctctctttcgctcgcaggacactcggcgatcctgtatcctgacgctcatttcgtgacaatttggtgcgttaaattggaaaaattagtcacagataagacgacccgaactcgaagtgaatgcaacgctcgattttccgacactcgactagactcgactccaaacggccactttgggccgtgctaaatcgcacaaattggcagtttaattgttccaattgacatcgaggcgagatttgtgccccggttgcctggagtggcctcgacttccggctcctggatgggcgtgtttctgggccgccaggatttatgtgccatcatgtggtggtcagtggcacaaagcatacatcacatatatgtatgtctatatgggtactcagatctgctagaaatccactaaatggttaaagtaatacaattcgacttgaatttgatttttcgtttgtttatttacataaagaaaactcggcttgcagacgaactgcctccataggtatgtacacttgaacgcttcaggagcccaactccatcaatagatgctcctggcgagggagaggggcgtggatacccccaggccgactcccacgccaacgcccacgcccacgcccaatcccactggtcctccggatggcgatgaggcgttggtggaaccgctgaacttctcgaagcctccgatcgcctccgccgagagcttcttgcgcagatccggcttcggtccgctgaggcacatcttctccagctgctggtgctgcgaccggacggcgaagcggttcacgtgcacgggaatgggcaccacgatcttggtgccactagtggtcccgttgcgacccagtccgtgcgaggtgagtccagccttaacccttttccacttggcgcgtcgattttggaaccatattttaacctatttcaaacggattatcatcagcttcgggtgttttcctttcatttaacaactaaacctacctgaacttcgcttaactttagactggtggctatttgactgcgctccgtgagactgagatacttcttggcgtggaactcccgctcgagttccagcagctgctccgaagtgaaggctgtgcgccggcgacgggacttggagtttgagctggagccattcccctgcgagtccttgccgcccattccaccgccttcgtgccgggactgagcgccttcatcatcgctgcaatcctcgctatccgaattggtataggctgaaacagtaggagatatggcatgagtttatgtcaaaaaggcaatgaatgaacaagaagaatcacaatcagcaattatccataaaatatataggtattcccaaactacaactcatctgcaagacatgagtataagaaagcgatctacttttggcatcacacggtattacaaggatcgttacatctaatccacaagcattcctaccccacttcacctttgtcttatgaaattaccgtgatctcaatataatttgttaatggtttacaatatttgttaaaaatgtttaaatattcaagtagtagtactaagtagtaagtagtactaagtactaagcccaagtactataaccttgaacaacaaaaatcaaagggatcaaatcaaaatcatccaatctcttaagattatatgtttcaacctatactttatgcttgtttatttatctgcaatcaaccctattgtttaaataaacagcatatattacctatcagcagtaatagtattttgagcaggaaaaagataagttagacgcaaccactttcactatgttcaccccaaacgttttcacaaacaacgaattgcgcgctaaaaatttaattttcgcgaaaagtcgcaaattaaccctatatgctccaaatagggaattaatcactttacaacatagactcacacaattacttaacaaatttcaacaatttgtttaaactctatttaaagttgaaatttcgttttgaaagttcaaagaggacataactttgtaaaaacgcaaattgttaggtttatacgcacaaattgaacaacatattagtaatatgtatagtagtatgtatagtacatagtagacacctgaaaaatggctattcatttcaaatttgatgggttttggccttgaaatttatcccaaaagcggttcacattcctcaatgtgcaagccattaaaatatgaattttattccgaataaataacaagagatatacatttaactacattttgaacggatccatttaagaaaatcgaactttgaaatggacttaactaaacttaaagtgtatcaagagtttaagttaagaccaaacactgacttcactttttctttggattatattgttatttttccaaattccattcccttttgtattgtatctttcctgagatactgagatacatcttcggttgagtgcaatcccatcgttcagagtcactctaacacattgtgccgagcaatgccgcctcggtccagcccacatcctggctgattctgtccggactcaagacaagtcgcttggagcagccccattaatggggccctaacgagttcggacttctggtgcaaatggcccgtgccacaaattgtggcaaacatatttatttataactggatacatgtgtctgaaggctgcccttcatgcagaaggcatggaatgctcgaaacataatctgcttgttttgggtggactcaagttgagcgtgccagccaagtgtcaagtgccaagtgcccgatgagtcctcccaattccgctacagctcccactccagcttccacttctcttaattttgagtacatggttaagcggtttttaacacttacacgcttcaaaagtgcccgctgtcactgatttatctgcccatttggacgcctgccaccctgtcgccagtcacccacatagccacccccatgtcagccacccccacccacaaagcacaccatttgcgcccacttgcgctcagttatgaatatattagtcgcaaatttgttgcgctctttgctgcttcgctggcaaattgattgcggcacggatggctcagtttccagtttccagacaggcagcgggggatccggatgattacgttgatgggagaacgcagtgccattccattcgagtgtccaaatcgccaaatcgctacgattgtcaaaacgtcagcattccgtttccagtcactccgctttgtggctttgtggtcgacgggacgacgagtggcgtttctggatcccgaagtcggagttgtgaaaacttttcactccgtgattgacaccgaacactgggtcttaatgcactctatgctaatttgattatgacgtggcaggctcaatttaaattaccgtgacaacgccgctcgacaaaatgagccaccgcaaaactggacacgattcgaaggggtaaattatgagtactaagctcaagaaatatttgtatttgcttttgattttaaagagtttctcatttcgctgaacgcatttaagaagaatgaggaacacaacaggactacatttgcatatcgctctaaataatattaaaacatactttttaaacgcaacaacgaatgttagccatcataaaaagtgtatataaatattttaatatcatattatttagataaatcctaaggattgtcgaacgtctaaccaattggccaatttgtaccgcaatttatttccttaacccttaattggtaattattaattgataattaaaactaacgtaaagtgataattaaaactaacgtaagaaattcgatgcccaacaaattttagtcggtgtaattactaatcaccaaagcaaacgaataaaagtttagcaagtatttgaaaaacatacactcttttcaaagtgatgagctatttagtgatatcttaataagttgagcaaaatttaacgatatgcattaaacaatagctttatatttatgcaaaaatgctaactattactattgtgtcttctgcaaactataaactttatagtataaaggacttaatagttgtaaccatggctaaaatggctgcaaaatgtatccgtaaatcttaaaacaattgccgacaagttctaagataaagatcaaccaagaactatatcgaattccccaaacatctcattagtataaccacatccctgaaagattgattgcatggtacccacctccattgcggctcttgtccatctcgccgttgtagttcctgggcgacatggtcaggctaatgtcactgcaggagtcgccgctgcactcgaagtcctcgtccatgcccacatccagggccggttccatgggactgtggctgccggacttggctggcgaggagtgggcctgtgggggcgtcggctcctggagctgcgccatgccgggattcgcttgatcctcgtgcatcctgccggcggcggccatgtgctgcagtcgagcgtggacactcagactgtgcacgtagtcctggttcataagctcggccaatcgccggtagctgagatccgtgggcgcaactccggcggcggcgggattgaagggcaggaaacgcgtatccagcggatgcggcaaggtgggtggaagctgtttctccaaggcatgtgttggtggatgtggtggtggtggttgtggctgtgcctgtgcctgtggttgctgtgcagcaggatgaccagctggactggagggcaggtagcagccgccggcaattaaatgcgttaatctctcgtgattctgagcgaagtagccgtgcagccagggattataaagcggaaactgggtgagtcccagggccgaactggctaccatggcgcgggcactcagctcctgctcctgctctgcctcctgctcctggtcccgctcctcgggcggcgatggtggtgtggcagtggcaggcgtttggttggcgatcagactctcgatcgagaagggcttgggaaagggcttgctggccagcctggtagtgggcgattccatggtgccgatctctccgttttgcagcaaggccggtcgttccatattgcccactcaaaagcacactttcagggcgatcgaaactaacttctttcttctaatttctcaacgcgtttctgttcccgagcagacacgacgcagtgaaccgttcagagatctgcgagcgactgtccaagtgcagcagacatcacgtacgcgtacggcacccaagtcgaagcccagaagcccagaggcgccgagcaaccaccaccacggatggtctggctcctcctccatttcaatatggcgcatgacaaacagctggtgtctctgtctggcgcgcgctcccattggccagctgctaattgccgggtggtgcggacagcgaaccagtttccggcaatggagcagcaccactaccacctccaccaccgcccgcgttcccgctccgtaattgcgttctgctcgaatcgctcggtaatcagacatcgccggactggcgaagagaacgccctgccattaatgccccatcttcgccagctccttggccattggggagtactcccgccggcggaggacggaggatggaggatggtgttctcgcgaggcatattagtgaccaatttaaattcaaatgtcagttgccagtgggtgtgactgctgggcatcattagcagacactccagtgtgctcaacgatttgtatctgcaacttaggtgcatatctattagtctacggatatctggttttaattatctaaacataccagtaaacagctctgtacaactattaattttaattggtggtgtttgaggtatttagttggttcttaagcgcactaatatagattttaagagagtttaattgaaagtgacatccgtaacaggcagaattattcaaaggaatactcgtatttcttggatggtagcaatcgctgataatttaatgacccctaatttattgcaaggattaatattaacaatgattttttgtaggcctgatatgccaaattaaatattttatataactcgttttaaaggtaaacaggcataaatacctccaacaagtgttattacatagggtatatatacatacataggttatacaaaagtacgtttatagtatccacaaaatacagacaacaatccattgcagtcgtgacccccaccgtccccaagaagcagat

SEQ ID NO: 1769 - DNA, 1683 bp, DROSOPHILA
gctcgcagatctctgaacggttcactgcgtcgtgtctgctcgggaacagaaacgcgttgagaaattagaagaaagaagttagtttcgatcgccctgaaagtgtgcttttgagtgggcaatatggaacgaccggccttgctgcaaaacggagagatcggcaccatggaatcgcccactaccaggctggccagcaagccctttcccaagcccttctcgatcgagagtctgatcgccaaccaaacgcctgccactgccacaccaccatcgccgcccgaggagcgggaccaggagcaggaggcagagcaggagcaggagctgagtgcccgcgccatggtagccagttcggccctgggactcacccagtttccgctttataatccctggctgcacggctacttcgctcagaatcacgagagattaacgcatttaattgccggcggctgctacctgccctccagtccagctggtcatcctgctgcacagcaaccacaggcacaggcacagccacaaccaccaccaccacatccaccaacacatgccttggagaaacagcttccacccaccttgccgcatccgctggatacgcgtttcctgcccttcaatcccgccgccgccggagttgcgcccacggatctcagctaccggcgattggccgagcttatgaaccaggactacgtgcacagtctgagtgtccacgctcgactgcagcacatggccgccgccggcaggatgcacgaggatcaagcgaatcccggcatggcgcagctccaggagccgacgcccccacaggcccactcctcgccagccaagtccggcagccacagtcccatggaaccggccctggatgtgggcatggacgaggacttcgagtgcagcggcgactcctgcagtgacattagcctgaccatgtcgcccaggaactacaacggcgagatggacaagagccgcaatggagcctataccaattcggatagcgaggattgcagcgatgatgaaggcgctcagtcccggcacgaaggcggtggaatgggcggcaaggactcgcaggggaatggctccagctcaaactccaagtcccgtcgccggcgcacagccttcacttcggagcagctgctggaactcgagcgggagttccacgccaagaagtatctcagtctcacggagcgcagtcaaatagccaccagtctaaagttaagcgaagttcaggttaaaatatggttccaaaatcgacgcgccaagtggaaaagggttaaggctggactcacctcgcacggactgggtcgcaacgggaccactagtggcaccaagatcgtggtgcccattcccgtgcacgtgaaccgcttcgccgtccggtcgcagcaccagcagctggagaagatgtgcctcagcggaccgaagccggatctgcgcaagaagctctcggcggaggcgatcggaggcttcgagaagttcagcggttccaccaacgcctcatcgccatccggaggaccagtgggattgggcgtgggcgtgggcgttggcgtgggagtcggcctgggggtatccacgcccctctccctcgccaggagcatctattgatggagttgggctcctgaagcgttcaagtgtacatacctatggaggcagttcgtctgcaagccgagttttctttatgtaaataaacaaacgaaaaatcaaattcaa

SEQ ID NO: 1770 - protein, 485 aa, DROSOPHILA
MERPALLQNGEIGTMESPTTRLASKPFPKPFSIESLIANQTPATATPPSPPEERDQEQEAEQEQELSARAMVASSALGLTQFPLYNPWLHGYFAQNHERLTHLIAGGCYLPSSPAGHPAAQQPQAQAQPQPPPPHPPTHALEKQLPPTLPHPLDTRFLPFNPAAAGVAPTDLSYRRLAELMNQDYVHSLSVHARLQHMAAAGRMHEDQANPGMAQLQEPTPPQAHSSPAKSGSHSPMEPALDVGMDEDFECSGDSCSDISLTMSPRNYNGEMDKSRNGAYTNSDSEDCSDDEGAQSRHEGGGMGGKDSQGNGSSSNSKSRRRRTAFTSEQLLELEREFHAKKYLSLTERSQIATSLKLSEVQVKIWFQNRRAKWKRVKAGLTSHGLGRNGTTSGTKIVVPIPVHVNRFAVRSQHQQLEKMCLSGPKPDLRKKLSAEAIGGFEKFSGSTNASSPSGGPVGLGVGVGVGVGVGLGVSTPLSLARSIY

SEQ ID NO: 1771 - DNA, 10739 bp, DROSOPHILA
ctcaataaattcgtccccctccatataataacccccccccccccacagagaacaaaaccaaaaaacaaaaaaaaaaaaggtatcgagcaacttcacaaaagaccaccacacaacccagccatctcttcgatccgaatggttcgctagtatagccacagtacaactatggtacacattggtttttaggccttaagactttggtagattttaattcagaaaatgaaaagataaaaagaacaagccaccagcgcaactacaactacaacacacaaagagtgaggcatccgatgaacaatggatgtcaaaggtaaatttattgtatgtccgcgaacctaaattatttatccacttggtttttaccctaaatctgtcgcaacacaaaacatgtcaagagaaaagtgaaaaaaaggtactatatgcgattgtttggcgtaagtgcaagtagttacataagtcgtgaaatgagaatcaataaattgaacctaatttaaaaccgaaaatatacacaatgggtgtttttaatgggaatgtcgggattttcagcttttcttaaaaacaaattacaaaaggatacccattgcccaaattgaaattaacgcagcgctggcttaacaataataattatttatttattttcaaagtttcttcttgtctataacaattagtaatgacttgaacgcacacacatcatatgattttcgtgatcgattcgcgggggataagcacatgcagggctatatatatttatgtgtagataaatataaatatacacaatgcaaataactttcgtttagaacaatatcagaattttcaattatgcgccgaccaaaagatggtaaactacttttggttctaacaaaaattattgtcaaatctccgccaggagttttcgttcaattaagaatcaaagactacatggttaagtgggttaattgctaactggaaacgttatcgtggcgataaaacctgcgcgggttgggttcacaaatcatagggttttaaaaatgtttttatatatttctcatatatatctatatatgcatataaagaagagcttagaagcattcagctatgacacagtaacaaagaggaaaaaaaaaaaacaattagggtaatttaaatttttaatcctaagccggaggattgacacttaacacagggatcgaggacggggaagttggcagctgatctacttgtacttcttcatgaactcggcgtggaacacacggaacttctccatcatcagcttcagcttgtccgtttgcgggaggatcgtgcttcggaaatgccacgtgccgggcttctgaccaaatccactgccaggaacaatgcaaatgcctgggagaaaattaaacaataaattgagagactaacaaacgaggtcagcaaagaaaactcaccgctcgtctcgagcagctcaaatgcgtagaaaacatcgggggccatgcccttggccttggccgcctcgatcgccttgggcgggatctcgatctgtggaaagacgtacatggcgccctgtacggggttaaccttgtagccttcgaagctgttcagtgccttgtggacgagctcggcccgttcttttagagcggccagaatgccatcgcgctccttcttgtacagatcgtatgatggctctccgggctgcggtggattgaccagggcactcacggccacctggccagcggtggtgctgcaaagcgccgccgttatcgacttggtcagcatggccttgaccttgggatcaagattgagaacctccatgtaaccgccgcgaatgccgcactcgcccagatagcccttcgaggtggacaggaaactgaccatttccagattacgataggggtcgcccatttcgtaggccaccttcttgaacgaccagaacttggagttcttgtcgtagacattgtcctggtacacctcatcggccagcaccagcaccttgttatcgtgtgcgaacttaatgatctcctcgatgttctcgcgggtcagtacctgtccggtgggattgcccggattgatcacgaccagggcacgcggattgcagaccttcttcgcctcatcgtaggaccgttgcagctccttcctgtccaggctccaaccggtctcctcctccagatagtaatccaccttggtcatgccgtattcggagatggtggccgagtacagtgggtactgcggaatgggcaccatgacaccaggcgccttgcatcccacctcggcgctgaaaaaagaaacgtaaaggtaagcttcaaatgtatttagaattccttagtaaatgctcagtagtatttcataaacaaagtgtttgaataatactactgagcaataaacaataataatatttatctatctggctgccacataagttgtcaacccaaaaaatggcacaattttgggccatatctctggcaaatctctggttttaactgataagtctcgacagaagaagcgccacatcatggacaataaaaatgttggccctggcgacatacttgatcatggagagaatgctcttgatgccgggagaggcaccgccggttagatagatgtcctgccaattggaggcgatgccgccatcccttttctcgatgtactgagcaacctggcgacgcaccacctccagaccggcggagtcggtgtacgagcccaccgattgaccctggcagccgttcaaaatggcacaggcgcgcttcttgacgtcctcgggataatcgggtgaatccagcagacgtgtctcgaaggtcagcgccaacagctgataagtaaaatatacaatacatttaatgaaatcatatcataaatgaaggggccaaaactcacctgtcgcaggaaggtcaagggctgctggcccatcgcatggcaatcaccgatgttggcacggatcacctggtcgaatggcttcttgacaccctgcaatcaaattcaatcggaacggaattacaaattagccatataaaataactcattgtttgctcgctggccaaatgaaagtgtaatcgctgcaggctggcggatcaaatgggcatttaatttgatttgtggctttcgccatgcaaattacactcaagtggattgccaagctaaattgaagaccagccagagtacagagtaatcgattaagtatcaaattcaatcaaatatttatcagtaatgagccattgtggattcagcaaatggtattctctttcaaatagacgcctgctagaaataactatcaaatgaccatcattatagttacttaacaatgtgaactagtttacattcagtagcaaatcaatggtgcaatctgttacgatctttataatccagcacactttggggaatcccaaattaaagtttctaaacgaattaaagtcattgtagacacaggcaaccagtagtttagtttcccgcacgaatagaggtcacaataatcggctgtggaaattgtcagctgaacaaaacacacaatttgcagggcacatgctagttgcactcgttcatggaagacaacatctcatcgtctcgggttccatttaaccacgctcaaatggccaatttaccacataatgtcacggaggttcgaggagctgcgatgatattgtgtgttttttttttttttttgagaggcgaaacaatgcaagttgcgccatgtaagcgaactgcagcgctgccattgacgtcactcggcagtggatgtgttttgcctgacaatgtgataattggaaaattaaggaattctgggctgtggaaaaatcatccagtgctcgagtttggttactaagagtataaaatcgtcaagttctcaccgtgcaaacgtgtgtcaccttatcgaattcagttaattatttattatttattttttttttttttaatttcgaaaattactgataaaagtgttgccgagtcgcggcaactgaactggcttgtgtttgtagttcgtgtggaaatatgtatagaaatgggtcctctatcgcatcgcaaatcgaacagtgctggtgaaaaaaaatgatatgccaaagtagtttcgaatatttcaaaaccacaaaaccgcagagatagtgttaagaaatcaattaatagcccatctaaactcagttagaaattgctagttaagtttttagcatcgttttggaaatggctactaattaactgaccagcgctgttcgcacctaaagaatattgcttgcatattcctttctacccttcacttcgcacttgaaatcgttgtaaacaaactttttgtgctaagtggcaatataattgataactacatatatatgcacaacatatatactcgtgcaggcaggtaagagtcgtataatcatataggcgctgtataaaaggcgttagcaactcaaacattatcgccaatacgaatcgaaggaaagtataataatatgttggcaaatgttaatgccaaaaggaagtcaaagtaaacagagggaaatgggcatgattaggaattagaaatgattattacacgggcacagaattgttaataatcctatatcgtagtgaacaggacgaagtgaagtacataaatgccagtgataagaatgcctgctgctgacagatgatgagtttcttttggaccattgccaaatccgtatgttgaatctgtgggcaagtggaggaatttgataaaacgcagaatgaacagcacagcagattcagtcgtgcggataaggaaatcaaatcgcagcgggaaaactggtgggggaaatcaactggcagcggcattaaaaacgcaaacacagaatgtgaaaagtcagcggggctcacaatggatttaactatatgtatatacatatgtatatctttaaatattcatcacatatttgtgtacatatgtacatatagtatcgttgcgggtcacaaaagttcgaagagaattttgcaaaacaaatgaaggaaaaaaaaaatggaaagcaagaagtgcagagagaaagcatcgtgtgtatacaacatgttttccccacagactcatgcgcatgttcggcctttgttatgatttttcactttcccagtgataagaaaaggtccacggaatcagaatccgaatcagaatcacgcccacgctcgcccacaatttccgcacttatgtaagccaagttgaaggtcgttcagtgaacccgcatcgcatcgcgtcgttcgctcttcatctaaatactttatttaattgatccaagaagcacaatttagaataattacaaacattaactggcaattaagagcatgactcgttatggaaaacggcgaagaaacgccgttttttttgttttttttttttagatgagaaaaccggttaatttgggccaactgcctgtggaaaaatcattcacatgccgagcagtacttaaattaattagtttattgacttgttgtttgctctaacccaaaaagtgtaatttccccttagcccaaagttcacttataaagatatatattccgttttagataagtctcgatatttttatagcggtctgattacaatttcaagtcttatctgaacttttggattacttctgatagctttattgttgcccaaaaattgtttgtgtttagttgaagtaaataaaattccgagctctatttttggcaaattttaatgggtttagttcaagtggttcaaacactactctaaattcttgatgtgtaataaaaaacaaacaattgttttgatcaactttgtgctctttggtaaacatttttcgctcaaaactgaaattaaacatatggcattttactttcgtaagctttttatgctcgtggaataagaaatgggtttggaaactggttttttttttattcgacaagcttattgtttttgcaaaaatgtgttttttgcaaaacaaaaccttatcgcattgaataaacaaaagctaaagttttctatgtttgtttgttgaaactttatacattcgatagattttttattggattgctagctgaattggtactcccctggctggttcttatcacacttccattcttatcaatccaaattacttcatttcgtgggcgtattttccaacaggtgtccttgagaaaggggtgaccacgattgccagccgaaggtgaatgattcagcgctgcgtggccgctccattcaagcgcgaataaaaaaatgaaaagggcggcaaaaaacaaacacagacgcgcctcacacttgatacatacatacatacataaacgtgcatgtgtatataagtagatatacatagagacatagcgtgcttagatattaaaatgcgggctttgaattgccattaaattgccattgaatagagggaagggtaggggggtgtgtgcaaaacactagttaatggcgtcgcactttgccgctttgtttgcccgattacttgtggatcaatttcccatggcattaactaacactcaccttttccagttccttctcgatttccccagcacgaatcaccagaggaccgcgaacggcatattccatggcaataaagttgggatttatgttatccagtgtgagcgctttcgacgacgacggcattttgtggctggttgaaaaggaactgagaaaaaaaaagaaggggatggatattcacttcagcaatcaacaatcacttcttgttcgatatataacgtgttttaaatgtgttttaaaatatattgtttttgttatgcggctttttcagcgaacgaaactaaccggcggacgtctaacggttgaatgaaatcgccgcttgttccatggcgctgcgacgtcgctgctgccgtcaccgttgctgttgccgttgatttcgccgcacgtcgattggcattgttgctgttgttgtgcaggaacgatttccagcggcgaataacgtactgttgctgctggcgctggtgctgctgcaatgcggccgaaactgtggcggcagcaggtttaattagcattcgactcattatttctgcaacgagaagagcgtctcagtaagtaaattactcaaaatacaaaaaaaaggaaagagacagaccgcgctttaatcgcaagaatttagcaccatgagaacagcggaaagaagaagaagcagcgaaatgaagggtgtgtgcgtgtataagagtccggctcacaattataagagcggcgaattgaaaggctcagctgttatcactacaccgaaagcaattagtttcgaagcagggaatcatttaaataactttgtagctaggaaaacttaagcaactatagatatttcgatgtgaaatatatatcatattatattaagcatttttatatggtattgttagcacgcgctcaatataatattcaagtacctaaatacattttcttcactgtgcatttttgtatcttatcaaagacaaggcgtggtatcatttactttttcagagcttatcaatgtgattgcttgtggttcgatactttattgcctttctgtttatcaagaagctaaagtgtaaatatttacgacctttggaaactttgcaattaaattcgccgtgcatttatcctagactcaaacccaattgcactcgccgcaaggcgcgcatttcaaaactgcaatcgagcatttcttatcagagttttggggctttgcacaagcaactgcaaagctgaaaaatatatattttatttgaggaggaatatatatttttggaaaatataaaaacggttaccggctgaataaaatgaatggccataaagcctaatctcaagaacatttattgcttgaccatccagaaaatttaattaaaaatgggaccgtttagaatctacttgtgtgtgctgctatatatttcactatatttcttatcttggtggaactttttttttagaggcagttaacggatttgtgggccatttacccaggcattatgtatacatatgtatgatttaatagctatatttctccattaaatccactggcagggcatccattggtgggggccactatcagttgagcgtacttttgactttgagccaaatcggcgcagcttatcagtgacgtcccattcgcagcttacgattccctgtctttcaattgaatatatgtatatagcttttctgatttctgcactttgaaacgccaattgcgtaatgcaaaaaatgagcaaacgaacaaagaatcttttagaaacatgacaatgaccaaagatcgacattacctccaaaatactatacttttcgcactcaaaaatcagcatcaatcagccgcagattgtttgctttctttttagcgacagcgaatttatttgtttttaaattaaaaatgtactaaatgccggtcccgaaaaatacacaaatgtatgctattttatatacgcacatatgtatctttggaatatatgaatgtatgtgtatatatataggtatattgtttagacgagacaaactgaaacttgttggcaataactttttggaaaaccggttgcggttttgatggcattgatatagacgaaagggttaagaattaggggaaaggggtaagaatttgggaatgagaaaacatcgatacagtgatctctgcttaattaagacaaattcaatacgatgccgatatatagatatagatagatataaaataatatatccaatagaatttttatatgataaccatctaaagcagctgtgcatagaacttttgcgtattaatttaagaaacattacctccaaatatttattttaaataaatttttcaaattttaacatttttttttttttgagacaacttttgttagtcactgtttatctgcgatatatatatatgcagcgtatcgcttttgtttgtgattgttttgacaacaaaactggcttatgcaacgaactgttaaaaaaaaatctgaaacagaaaattatgtgaactggctgcactttgcttcaaagaccccgctcccccctgcactttcaccccccgcattggggggattatcagacaaaccaactggataagatagtaacgataaggaatccaattagaacacggccattcggatttactaaaatcacaacttttgccaaacgttagtaaattatattaaattatattgtaactccgattgacacgtagagcgcaacgaacaacagcaacacaaaaagaagcagaaataacgggtaaagggggtgttttgatgtgctaattgggttgctaaacagctgttgacgccgcacaaattgagcacaaaaaaaaaaacaataacacggcacgcaattcaattagggaaacgcacgcagaacgataaacaaaatcagggtactattgtgtattagatttttttttgggcgcacaaatcactttcactgtcacttcctcgctgctcccaattagaatttctcggccactgtgtttatatatatgtacatatatgcacatgcatatatacatatatacgtcggcagttcaagagcaaaaaatcgatttttcgctgcactttttagtcgtttcaccttgatgggcgcaagtgggcgtggcgattatctaacggcgtttgttgtgatcccaagaacttgcataaacttattaataaacgcgatatgtctgtatataaaatacctaataaaaacgtgtgtgcttgcttggctgcgtgtgtgtgcgcgtacgtgtgtgtgtgtgtgcgaatatgtgcggcgtgcgagctccaatcagaatcgtatcaaaaattcaaagctctttggccgctagacgcaattaaggaactgacaacaagaactgaaaccgcaccgagatggaaaatgaagtgctggcagtatttaccgactatatgtttttcttgcgggcaaaagtcacgatgaagcgggcagcgattaagttttaaaaatatcacgtctgcagccctcgcagccaaactttcgatagacggcgatagatcgatagaccagcgatttgcaccaacactggaaagctcagagcattcaaaaacaaactaatgtgttttataaatagctctttttaaatatcgattaattgcgatcttaactaactttcgtttatttctattaattatgaacttacttctgtttttaaacatctttgctctttgcttgtttttcgtgtaaggctttaaattcacttaaacaattttgctggctttgtgcgcatcttcatatatcactgaaattgattgttataggagtgtcccattgaattagttttgtgtcgattcaatcctggcccgaaaatgtatgaacaagctatgccctacattttacccatagtctacttaggtttgtttatatagtattcttttcaagttcgttatgatagctcttagaaaataagatttctgtgaatatctcctccgtataaaagaatttttatcaatagtttggtaagcttttttttctcttctacaaaaccttttcgcatgttttatttcactcgaaacttattgctattcaaaaaaatgggttttctaacgctagaattatgtacagagtgcatttggaaaaaatgatgggtagtaagccctagaaagccatggctacgtgctgatgcccatgatggattcgatggagaaactcagcttgggcttcttgccactgccggtggaggcagtggtgactgcgggcgtggtcatcgctggatttgtgggcgggatcgttagcggtatcgtcggcggcatcgggtgataaatgtgctgctcctgatgaacgggtgcgcaggcggcggcggcggcggcaacggtggcaaagtacaaagcgttaccgcccagcgtcgcctccatgacatggttcagttccggatcggcgaatgcccgccgtttgcgcatgcgctccatcaatg

SEQ ID NO: 1772 - DNA, 2237 bp, DROSOPHILA
cttttgcccgcaagaaaaacatatagtcggtaaatactgccagcacttcattttccatctcggtgcggtttcagttcttgttgtcagttccttaattgcgtctagcggccaaagagctttgaatttttgatacgattctgattggagctcgcacgccgcacatattcgcacacacacacacacgtacgcgcacacacacgcagccaagcaagcacacacgtttttattaggtattttatatacagacatatcgcgtttattaataagtttatgcaagttcttgggatcacaacaaacgccgttagataatcgccacgcccacttgcgcccatcaagaaataatgagtcgaatgctaattaaacctgctgccgccacagtttcggccgcattgcagcagcaccagcgccagcagcaacagtacgttattcgccgctggaaatcgttcctgcacaacaacagcaacaatgccaatcgacgtgcggcgaaatcaacggcaacagcaacggtgacggcagcagcgacgtcgcagcgccatggaacaagcggcgatttcattcaaccgttagacgtccgccgttccttttcaaccagccacaaaatgccgtcgtcgtcgaaagcgctcacactggataacataaatcccaactttattgccatggaatatgccgttcgcggtcctctggtgattcgtgctggggaaatcgagaaggaactggaaaagggtgtcaagaagccattcgaccaggtgatccgtgccaacatcggtgattgccatgcgatgggccagcagcccttgaccttcctgcgacagctgttggcgctgaccttcgagacacgtctgctggattcacccgattatcccgaggacgtcaagaagcgcgcctgtgccattttgaacggctgccagggtcaatcggtgggctcgtacaccgactccgccggtctggaggtggtgcgtcgccaggttgctcagtacatcgagaaaagggatggcggcatcgcctccaattggcaggacatctatctaaccggcggtgcctctcccggcatcaagagcattctctccatgatcaacgccgaggtgggatgcaaggcgcctggtgtcatggtgcccattccgcagtacccactgtactcggccaccatctccgaatacggcatgaccaaggtggattactatctggaggaggagaccggttggagcctggacaggaaggagctgcaacggtcctacgatgaggcgaagaaggtctgcaatccgcgtgccctggtcgtgatcaatccgggcaatcccaccggacaggtactgacccgcgagaacatcgaggagatcattaagttcgcacacgataacaaggtgctggtgctggccgatgaggtgtaccaggacaatgtctacgacaagaactccaagttctggtcgttcaagaaggtggcctacgaaatgggcgacccctatcgtaatctggaaatggtcagtttcctgtccacctcgaagggctatctgggcgagtgcggcattcgcggcggttacatggaggttctcaatcttgatcccaaggtcaaggccatgctgaccaagtcgataacggcggcgctttgcagcaccaccgctggccaggtggccgtgagtgccctggtcaatccaccgcagcccggagagccatcatacgatctgtacaagaaggagcgcgatggcattctggccgctctaaaagaacgggccgagctcgtccacaaggcactgaacagcttcgaaggctacaaggttaaccccgtacagggcgccatgtacgtctttccacagatcgagatcccgcccaaggcgatcgaggcggccaaggccaagggcatggcccccgatgttttctacgcatttgagctgctcgagacgagcggcatttgcattgttcctggcagtggatttggtcagaagcccggcacgtggcatttccgaagcacgatcctcccgcaaacggacaagctgaagctgatgatggagaagttccgtgtgttccacgccgagttcatgaagaagtacaagtagatcagctgccaacttccccgtcctcgatccctgtgttaagtgtcaatcctccggcttaggattaaaaatttaaattaccctaattgttttttttttttcctctttgttactgtgtcatagctgaatgcttctaagctcttctttatatgcatatatagatatatatgagaaatatataaaaacattttt

SEQ ID NO: 1773 - protein, 482 aa, DROSOPHILA
MPSSSKALTLDNINPNFIAMEYAVRGPLVIRAGEIEKELEKGVKKPFDQVIRANIGDCHAMGQQPLTFLRQLLALTFETRLLDSPDYPEDVKKRACAILNGCQGQSVGSYTDSAGLEVVRRQVAQYIEKRDGGIASNWQDIYLTGGASPGIKSILSMINAEVGCKAPGVMVPIPQYPLYSATISEYGMTKVDYYLEEETGWSLDRKELQRSYDEAKKVCNPRALVVINPGNPTGQVLTRENIEEIIKFAHDNKVLVLADEVYQDNVYDKNSKFWSFKKVAYEMGDPYRNLEMVSFLSTSKGYLGECGIRGGYMEVLNLDPKVKAMLTKSITAALCSTTAGQVAVSALVNPPQPGEPSYDLYKKERDGILAALKERAELVHKALNSFEGYKVNPVQGAMYVFPQIEIPPKAIEAAKAKGMAPDVFYAFELLETSGICIVPGSGFGQKPGTWHFRSTILPQTDKLKLMMEKFRVFHAEFMKKYK

SEQ ID NO: 1774 - DNA, 15200 bp, DROSOPHILA
acgggtatctgatagtcgggagagtcgactatagcgttgtctcttgcttttaacttatttcccttagaatgttttttaatataacaataacatttccgagaatttctaaggcaggctcaggtatttgtaataattttttggacttcgatttggccaaaatcttatgattgaaatgtttgctatcggaatcttaattaaacagtgaacagctggctaagctcttttcacatattttctggaagcgtccgcctcttcacagttttatttcccattttcgcaattattttctttactgcactttaaccatttatgtgataaaattaaaacgcataatttacaaagaaccctatcgccccccttaaattaatgattgaattcttctataatttataagttttttttactctcctatttcgttttactaactgtatggcaaacttcctgatagctttttgcgaccttattatcaaccctttgccaaatcgaaaattttgcttgtaaaatctgagttggggtcagaaatcaattttttttaaataactaaggggcagagtgatcttgtgatgatgtggcataaacatcaatagtccaatgagtaaactattttatcctaagtaaataagatctgctttgatataaaaaaggcacttcggccaaagtgcacattttacaaatcgaaaaaattttataaattcgaaaaccggaccaccgaccttgcgatttcaaatcgaaatcctaaaattcttagaattcgattaccggagcatgcgcgtataataaaatcctttataataatgcaacagcagcactggttgcgtaaatggaattttgatatggtaggaaaacgatataaaaagtttatacctatcgaactatttttggtaataagccgtctgaacattctatgtaaatacatataacactgtctatatatatcaattcttaataattggtcaacatcttagtaatatttatttctgttaactaagataaacttttcttgattcctgtcctttttattgtgcttttaaaatagtgataagctataaatacagtaaaaatatgaaacgaaatttattgtaggcttaaaggaatataaatatgcatttatatatcatatactaattgcgtgaattttacatacctaaaaaatctttttatttgtatgaaaactttttttttaatatttaggccattatattaaattatgacgcttggtgatgtacgagttgagaacaaaatacaaacaagaagtgaaacctgtgctatcaatggaatggctttagacaacaagaatggaatcataaaacaggtaatatttatgcgggttactactattctatgttgtcaaaaatacatttatggggttaaatttagtgatgtacgtatatgtatgtacatacattcgtatatgggcgtttccagtaaattaatactcattgccaaaataattggcagatgccatgtatgtatatgtatatgaatgtattaatttttacatttgtatagtatactcctatgcatattcacatactgagtaaacgaaaaataattatacccattaatcgtaccattttataatacatatgtatacaaatatttatgatttagataataagccgagtcgatctggacatgtccgtataatgagctgtaatctcgggaactagcattccaagcaagcatatttgattcttggaacgtacatacataagtacatacacctctatttcgtgcattttctattgaattttagatttcttatttgggacatcgatcagttttaaaactgtattttcttagtttgcatactagattcattgaaaagtatgtaagaggtacaaataagcgtttccggccatacatataaagaatatatattcttgatcagaataaatagccagagtcgatcttttcctgtccatccgtttgtccgtatgaacgtatcaatctcaggaactataaaatctggactgttgaggctaagcatgcagattccacagccgcatcgcaagtttgtttccaaaattgccacgccctctaacgcccacaaaccgggcaaaaactgtcaaccccacacttttataaaatattttgatatattttcatatatttattggttttgaaaatttctatcgatttgccaaaaaactttttgccacgcccactctaacgccctaaagccgccaaaccggaaatgcctgtcaatgaattgagttttgaagtagttcatctgatttattataatcaacatttggaaaaatctgtcacggaattgtcagaaatgttttctgcatcgcggagaacaatttataacgtaattaatcgcgtaattaattataacgtcagattggaatcaaactgtggaacaggacgtaaaagtaaaatttaagtctcagtctaataagtctaagatagcttaagtactttgtgcaaagaatttcttgacagtgtcaaatctacgcaaacttggattcagttgtttttctcgttcagtgacagaaaatataacttattttcattgtccaaacaatttcttgacaaactgtacatcgatatcccggaaaattatgaaaattatgaaattttcagtagttgagtaacgggtatctgatagtcgggaaactcgactatagcactttctcttgttattacctcgctaagtgtttccagtcggaagtcgaattattccggaacacaatgtttcataagtatttcttttgccggggatgatactctcatactcaggaagactgctattgagtgcttttaaagagtacacaaagaatattaataacaaaagtttaataaatattttcttttatattttatttaactacaagcctacatctacacaatatcatatataacagtgatgggaataaataatatagaaatgttaaacatataactattaatatactattaatattatgaagatgcagatatgaacatggaagccttccatttaattcttttaccaagctttactgttggaaaaggaaatttcttcgatgttctgtgaaaaaagaaagacgctgtaatacttatgtttttcctcgatacgttctcgaacttccgactgaatttatctttgatatccgaaatttttaaaggaaaaaagatatattaatttccatattagtgtactttattgacattaccaaatttcatccccatataaaaatcgaatgcaggtattgcattgaaaagtatgaattgaagtatgaaaagtattgaaaagtatgaaaagcatttgaaaataacaacagatatacctgttactcagctagtggaagtgagaacgcgaaatttcatattttttctgcgtggcaaaatgtttttttagttaatggctaaaaattttcaagactatttagattatgaaaaagatcaaaatatttttcaaaagggttttcgtgacaggtttgagaggtttgtgatcgttatagcaaaaataaagcaaaaattgtttcgccaaatgaatacaaatttacaagactaataaaaatatgaaaacatatctaaacatttttcagaagtgtgggcgtggcagttttagtcggtttgtggtcgttagagaggctgaatgttttttggcatatcgatagaaatttacacaaccaatacaaaaatcaaaaaacattttttttgaggtttttgggcgttagaattggcgtggcaaaaagttgtttggaaaatcgatagaaatgcttaatctcaacctactatctttaatagtacctgagatctcgacgttcatacggacggaaagacagacagggcttttgattctgataaaaaatatatatacttcatatagttggaaacactccattctgtttgttttatacttttgaacgaatcatctctttttctacgagtaacgggtgtaaaaagcagtcgaggctaatatgtatttcatttcgttaacctatatagatttcaaatatccgtttcctatacatacagctgcggttaaaataatagcactactgcaggtcgaaagttgatttcctaaaaaaaattattaaatgtcggcaaggcaagaaggagccttttaagccggtgacggaactgaagaacgagcttcagatagctgaaagcgtggaaactgttggcaaacgcttaggacaaaacaaccttaatgcgtgcagcccaagaaaagtcccgcttttgactgttaagcatatggcaaagcgaatcgaatatgccaagatttccaaggactggcctgtggagaagtggcacaacattttgtggtcagatgagaccaaaattgtcttgtttggtgggaaaggcttctggtcttatgttcggcgtccaccacgaactgaatataatcctcgcttcacctttaaggcggtaaagtacgggggatcgaacataatggtatgggcgtgcttttcatactatggagtaggtccgatccattagattcaaagcatcatggatcagcacatttacacagatatcctggaaaatgtgatgctgccatatgccagggatgaaatgccgttggtttggacatttcaacaggataacgactcaaaacacacgagcaagaaagcttgaaagtggttagagcagaaatcgacccgaggaacgaactggcctgctcagtcacccgacttgaatccaatcgaaaacctttgggcggacgtgaaaaaaaggtttctgaagccaaacccaataataacgatgatctttggggtctggtcaaggatccatggagcaaaattcctcaataacggcgccaggacttggtggactccatgcgaggacgatgcgcggctgtcattgccaacaaaggtcacgcaaccaaatattaagattctttaaacatagttcttaagatataatccatttgttgaattattttttttatttttttggttagttttagcaaactacgagaagcagtgctattattgttaccgcctgaatttgaaggttttttttgtttaaccaattatttttaaaatatccattaaatctgttactaatttttttatttcgattgaaaatcattttagtatttaagtttagtgagtaaaatgatgaaaaagtgtcagaaaatagagaaacgctgggacaaacacgaaatgtgcttatggtgctattattgttaccgcaactgtaaatctattctattctatctaaaatcctttcctaactgccaaatgatcatacaagatatgaatcagataaaattgtcttaccttaatatcacgatggacgacaccttgttcatgcacatacaatcaaccgcttcttgtatctgtcttgtcctggagcctggagccagctctagagccaccagcccgaaaaaaaccgtgtgcaagaaaatcgtatggcgttacggatcttgttattaaattcaacttgatttagaactaacttagtttttcattttaatgtgttaattagggcctaatactttgttgtatagcctttttagccagcacagccttacacctgcgtgagttcaccaggtcctggcaacgtttggggggaattttcaaccatgcatcctgcacaacttgccaaagctgagccttagatgtcctggagttcttcgacacatactgttttatgctcccccacatggtttcaatcgggtttaaatcgacgatggtgctggtcaccacggcattacctctattatattttggggaaaccaattcttagacgatttgcttgtgtgtttcggatcattattctgttgtccattttaagggcatgttccattgagcatatgacagaaagacatcactaagtatattttcatatgcgttttggtctataataccataagtcatatgttttggactcataccattgtaaaaaaaggcccataccaggactttaggtccactatgattgaaagtcttgagtgggtgttttgggtggtactccaaatagcactatttttgaccaatcagtccaaaggatatttctccatttggagactggccagtttaggtaggttttagcgaagcttaactgtgccttaatatgccttgggctaagtagtggaatcttttcttggactcctcgcactttaattttgatgcaatagttgtcttcgaattgtaacgtcactgattcccaagttcagctcagactttatgtgcctaagggatgcaaaaggattgactttgctgtaacgaactatgcgtccatcgtctatatccatggttttacgtatggtagcacggttttcgggattccattcttatttaatggcattggataccgttcaacatttggtacaacattcaagggttttttgaatgccctttcatgttattccttccttagcttaagaattaacaatcttttctgccctctacccactaaaatctatttttttttatttttattgcccatttaaaaatgcgaattaacttaaccaaacacacggctattcctatgaacagcctaaaagttgtgaattttcgcaagaatgtaaataaaaaaggataacatgaaaagctaacgggattttcttcctatctacacattccattttacaaaaataggtggaataaagagtcgatcccgaaaatggacatggaaatataccgttgtatttctagtttctcttgcatttaaaaaaattgtttgttttgttagttttcttgccaatattctgttcagcgatttgctgtttcaaaatgggaataatatttcagtatgtttttttttgctcttattaattattaattacattttcagaatgacgcaaccatttcgttcttacgtgctgctcgcagcggagacattaaaaaggtgatggattttttggactgtggagaaatatcagacataaatagctgcaatgcagtaagtatgtaattgataaatactaataaataaatattagccaccaagaattggatgtgttcgtggccaaaatcttattgagatatcagtccaaatgtaatgttcaagaaacgacaaaaacgacaaattttgcacttcaatgtaaacttactttcacggtttttcgtgaaccacataattttatcttaatcttgattttcaattctcaaggaatcacgtaaaaacgcgacacgtgaggatttattgtatttaactacgggccaccaatgtgtctcagcaacagatttttgcgtcgtatcattaaatttggaacaaagccgagtaaatttatattagttactatagttttttttttattttagaacggtcttaatgcacttcatttagctgcaaaggacggatatgtggacatatgctgcgagttgctaagaaggggcataaagatcgataatgccacaaaaaagggaaacacagccttgcacattgcgtctttggcggggcagcatgatgtcatcaatcagctaattttatataatgctaatgtgaacgtgcagtctcttaatggtttcaccccgctttatatggcagcacaagaaaaccacgacaattgttgtcgaaccctattggccaatggggcaaatccgtcattatctacagaagatggcttcacaccacttgcggtagcaatgcagcagggacacgacaaaattgtagctgtcttacttgaaaatgacgtgcgtgggaaggttcgcctaccagctcttcatattgctgcgaaaaaaaatgatgtaaatgcagctaagttattacttcaacatgatcccaatgctgacatcgtttccaaatcaggattcacccctttgcacatagcagctcattatgggaacgtggacattgccactttgcttttgaacaacaaagcagatgtaaactatgtagccaaacataacataactcccttacatgtggcatgtaaatggggaaagttatcactttgcactttattactgtgccgaggagcaaaaatagatgcggcgactcgtgatggtcttacaccacttcactgtgcgtctcgctccggtcatgtagaagttattaagcatttgttgcagcaaaacgcgccgatactgacaaaaacgaagaatggtctgtctgcgctccacatggctgcacagggtgagcacgacgaagcagctcatttattgttggacaacaaggctccagtagatgaagttactgtggattacttaacagctcttcacgttgctgctcactgtggtcatgttaaagtagctaagcttttacttgattacaaggcaaatccaaatgcccgcgcgctcaacggtttcactcctcttcatattgcgtgcaagaaaaatcgtattaagatggttgaactacttattaagcacggagctaacattggcgcaaccacggaatctggcttaacacctttacatgtagctagttttatgggtaggtacaaatattaaatttgttatgttatcctccagtcgattcttattaagttaatacgtttcctcaagtacattttttgataagcatttcgaacttttaatctcactttaataagttaatcataaggatttagtcatatagacttttcccttaaaataaaaaagctcaggaaaatgtgttaatagcatataggaatttttattaaaaaatataaaaataataatattggtaacaataataataataataaatggtagctaatactatactattataaaattttaaattgcgaaaaagggagaatatagggtattgggtataaaaattatataaaatttcaatctttcaggatgtataaatattgtaatatatttactacaacatgaggctagtgcggatttaccaacaatacgcggagaaacaccacttcacttggcagctcgtgctaatcaggtattgctttaagtatatagcataaaatatattaataaatttatttattttaggcggatattattcgaattttacttcgcagcgcaaaagtggatgctattgcccgtgaaggccaaacgccacttcatgtagcttctcgattaggaaatattaatataattatgttattactgcagcatggagcagagataaatgctcaatctaatgacaaatattcggcgctgcatattgctgcaaaagaaggacaagagaatatagtccaagtgttactggaaaatggtgcggaaaataatgctgttaccaaaaaagggtttactccactgcatttagcttgcaaatacggaaagcagaatgtggttcaaatattactacaaaatggagcttctattgattttcaggggaaaaatgatgtgaccccattacacgtggccacgcactacaataatccctcaatagtagaactccttttaaaaaatgggtcatcgccaaatttatgtgcccgaaatggtcaatgtgctattcacatagcttgcaaaaaaaattatctggaaattgcgatgcagctgttgcaacacggtgcagacgttaatattattagcaagagtggcttctctccgttacatttggcggctcaagggggaaacgttgatatggtccaactacttctagagtatggagttattagcgccgctgcaaaaaatggcctaacaccattacatgtggctgcccaggagggccatgttcttgtatcacagattttactggagcacggtgctaacatttcagagcgcactaggaatggttatactccccttcatatggctgcccattatggtcacctcgatcttgtcaagttttttattgagaacgacgctgacattgagatgtcttctaatatcgggtataccccgcttcatcaagccgctcagcaaggtcacattatgattattaatcttttattacgccataaagcgaatccaaatgctttaacaaaagtaagtattttattttattttatttcatcctaagaaagtcatatagaattattattaaagctattgtaatatttggaactttttttttaacatttccaagcctgttctaaaaaatggtcaaaaataatggtcataattaatagttttgtggtgatcgccgaaaagctacgcaactcccgtagtatttcgtttcgctgttgctaccgctctcactgtgaagaaagctttagagccatagctgcagaacgaaaaagaaagtgctatgctctgaccgtcgtttgtttgtttcacttgtttcacttcagaatgaaatcgccttgcatgcttttttgcaaagaaaacgtgagatgattattaatgattgtttacttagcattttaaaggtgaacgattcaatgaacgagtcagcgaaacaaccaataataaacacaaatataacacgaatccagaaaagagaaaaaattttccttacgaatctaaaagaaaaaaagccatacaaatcggacgccaggaagtcgagtcgttagagtccttatattagtcaacaactttgttttgtttatatagattgtgtcatatccatataaatatattgtatattatcgtgctttttcattacaaattcaatacaaatccttaatttaggacgggaacacagctctccacattgcaagtaaccttggatacgtaactgtaatggaatccctcaaaattgtcacttcaacatccgttattaattcaaatattggtgcgattgaagaaaaactcaaggtaatgactccagagcttatgcaagaaaccttactttccgattccgatgacgaatcttgtgatgatcttttggatcataaccattacaaatacatggcaactgatgatttaaaagccaactacggccaggatcagaagaacttcgatactacaaacaccgaccacgatcttactgatgtttcagtactaaataagaaaggtaaattttccttatctaacacggcactgataaaaatttagtacttaaagcactaattaatagcagacattagaataataagacgcataacggccatacattggttttgcactattcagacccttttttggtgacgtccgaaattgatctctccccgctcgcgtaaacttgcgtaaatttaaaaatagaatttgcttgcttgttaatgttaatatatttgcttgatagtgttaacgtgtgcgtgcttgtgctagaagattttcagaccgaaatcaatttggatccaagaaacgaagttacatacatattttgttgtaaaatgatctactaaaatattttttacaaataaatgccttgatattttttttaaagaagcgatttaaattaattaactaccgtttacataaatatgtttataactaataacaagtaaaatgtcactgacgacatagtttaaccctggactgtaaccagtatcttttacagactttaaattatgttcatcattattttaacttataaattaaataaagttgcaatctgtaattgatattataacttttgaaattgtaaattttaaaaaatatattccattaatttatgtataaaataaataaaattatgccacctgtttattgcaaaatttctttctggagacacgacataaggccatatgtaagcacctaagaatcgttaccttctctaatttttcacatgttgcaagctgaatactcgaatgactctaatgaatttgaccactatagtgcccacaaaccgcccaaaacgtcaacactttaggaaaatgttttgattttatcttcgtttaatttgtttggcttgccaatgcgttcgtattctctctagctcattaacggtcatataatagtcggggaactcgactatagcattctaccttgttttgatatataactaataacttattttattcattcaagaaatactacccaatgaaatgagctgtattgaattgactgaaatcgggcacaaacccgataacgttgttattgcccgatcccaagttcatttagggtaagcttttacctggaatttttagggataaacgcatataatctataccctttattaggtttctggtgtcgttcttggtagatgcacgtggcggatccatgcgcggatatcggcacaatggtgtgcgcattatcgtacctccaaaggcctgcgctgaaccaacacgaataacatgtcgatatgttaagccgcaaagggtagtcaaccctccgcctttaatggagggtgaagcacttgtgagtcgcattttggaaatgtcacctgttgacggaatgtttttaaggtaaactggggagttcttttgctaaactaataattaattattttgtcttgaagtccaataactttagaagttccacactatggcacccttagaaaaaacgagcgcgaaattattatactccggtccgacaatggagaaagttggcgtgagcataacttatataaagacataataggtgaagatataaaccaaacggaggaatttcattcggatcgcatcgttcggatcgttactcaaaatgttccgcacttttttgctgttgtttcgcgagttcgtcaggaagtgcacgttattggacctgatggtggaaccgttttctctacagcagtgccccaggtcaaagctatatttccgcctcatgctttaactaaaaaaattcgagtcggtcttcaggctcagtcagtagacctggttgaatgttctaaactgctcggtcaaggggtcgctgtctcacccgtagtaactgtggagccacgccgtcgaaaatttcacaaagctattacattaagcattccagctccaaaagcatgtacaaatagtatggttaatgcatgttatggcaatggaaattcaagttcgcctactcttcgacttttgtgttccattagtggtggtcaaacccgagcaacatgggaggatgttactggatcaacaccgttgtcatttgttagagacagtgtaacatttaccactactgtttctgcccggttttggctaatagattgccgtaatatcatagacgcaggacgaatggccacagaactttatagtcatttggccaaagttcctttttatgtcaagtttgtaatatttgcaaaacgaatttcccaaacggaagcaaaattttcagtattttgcatgactgatgataaagaggataagacccttgagcaacaagaatattttaaagaagttgccaaaagcagggatatcgaagtattgcaaaatcaaattgtatatcttgaattcgctggtaacattgttcccattttaaagaaaggcgaacagctgtataccaagtttcaacctttttgcgaaaaccggctttcctttagtgctcacattaaagatcaagaatttccacatggtcgcatctgctttatgacctacccgatggtaggaccagatgaagtgcccctgaagccgctttgtactctgaacatttcagtggattttaaaactataacaaaccatctcgaaagagataacctgcatagcttgaacgattgtataaatgcgcatggaaaattaaaccacaatgaaaatattgtatttggagtaaaggaacaacaggtgaagaaaattgatattactaaagcttgtataatgtcaagtgacatcaaactaattcatgaggctgatgtaatattagacgacatatgtagccacttaggaagtgactggcctttgcttgcaaatgtattgggtgtttcccaagccgatatcgatcttgttaaaacagaatttttgttaaacgacagcgtaaagcagagcatggcaatgttacagctatggctagaacatggaggcatattgacgggcaatgtactagctgaagccctctacaaaatcggccgctcagatatagtggagaaaagctttaaaaatgcagagtttggcactcatcaaccggaaaaagttttgccgactgccggaattgaaaaagatggcgattatgaacagtaatttacaaagtctacaggtccttagcaagatatttttaaaaacgcagatggtaagtttagtattgataaaatatatgtactgcaacgcaggtgtcactaaaaggagtaaattgatactaatgcaatacttaacatttgaccattacgttagaaagaagaacaaattataatacttgaaaaccaggtaattaaagtgtataacgacatgaaatcattaaaataatattattttgttttagagaaatgtcgatttacctgagtaatcgatgagtaatcgagcggtattcatcatgaaatagttgccgatatcttaaataatttacctaaagtcgatttattaagttttctaaaaatttaacattttcttgacaatcagaactattattcaatgtattactttgcaatttataataaaacaatattaacagtgttataatttagagtttaaaatcgtactaattaaataaattgttgaatcatttatagctttgaacttcatttaattaaggaggattaaagtggcttgaatttatagtcagatataccatcagaaatatgactgatgtttgcagtcatctgatgtgaacctttttgttccatcatttaaggttcacttaaaaaattacatcaaatacacgacattcttcttcatagaactaaattttcattatttgccacttcattacgtaaaagttttccttaaagttttctcaattaaagcaactgccggcaaggggtagattttaataagcttaaaggtcccacggtagggcaagctaaggaataaaaggaataaaacataagaatgtttcagaatatttctacccgttaccactacatttactacatcgaattcccctgacagatctaaatttattttacgtacgcaacatcgtgcgtcacacatcgagcagcaaaggatctgaaacagagggaggaggagtgtagagtgatattaacaaagaaaatgcagctcgacaaataacgagcgtcaaataggtattccaacgggcacaattgttcacatggaaattctaattctaattggcaaagttcatcagtcgggcattgactcccaaaataggggaaatagtaaaatattatcctagtcctctagtccgataaaaaaagaagtcgctaaggaagtccattgaagaaggacctacattttcaacctccaacgcagtccaggaatggctgcatgcagtcgaaaatggactgccaaatggaatgtggccattaactcctcgaagtcagcctgtgtaacttttaccctgcggcccggaacttgcacagatctgacttttgatggaaaccccgtcaacaatgtcacatcgcactgctacctaggagttcatctagatcggagactgacctggagggccccatcacgtcggtcaaattcaagtcactggcgaaactaaaaaagctcgact

SEQ ID NO: 1775 - DNA, 5235 bp, DROSOPHILA
ttgattcctgtcctttttattgtgcttttaaaatagtgataagctataaatacagtaaaaatatgaaacgaaatttattgtaggcttaaaggaatataaatatgcatttatatatcatatactaattgcgtgaattttacatacctaaaaaatctttttatttgtatgaaaactttttttttaatatttaggccattatattaaattatgacgcttggtgatgtacgagttgagaacaaaatacaaacaagaagtgaaacctgtgctatcaatggaatggctttagacaacaagaatggaatcataaaacagaatgacgcaaccatttcgttcttacgtgctgctcgcagcggagacattaaaaaggtgatggattttttggactgtggagaaatatcagacataaatagctgcaatgcaaacggtcttaatgcacttcatttagctgcaaaggacggatatgtggacatatgctgcgagttgctaagaaggggcataaagatcgataatgccacaaaaaagggaaacacagccttgcacattgcgtctttggcggggcagcatgatgtcatcaatcagctaattttatataatgctaatgtgaacgtgcagtctcttaatggtttcaccccgctttatatggcagcacaagaaaaccacgacaattgttgtcgaaccctattggccaatggggcaaatccgtcattatctacagaagatggcttcacaccacttgcggtagcaatgcagcagggacacgacaaaattgtagctgtcttacttgaaaatgacgtgcgtgggaaggttcgcctaccagctcttcatattgctgcgaaaaaaaatgatgtaaatgcagctaagttattacttcaacatgatcccaatgctgacatcgtttccaaatcaggattcacccctttgcacatagcagctcattatgggaacgtggacattgccactttgcttttgaacaacaaagcagatgtaaactatgtagccaaacataacataactcccttacatgtggcatgtaaatggggaaagttatcactttgcactttattactgtgccgaggagcaaaaatagatgcggcgactcgtgatggtcttacaccacttcactgtgcgtctcgctccggtcatgtagaagttattaagcatttgttgcagcaaaacgcgccgatactgacaaaaacgaagaatggtctgtctgcgctccacatggctgcacagggtgagcacgacgaagcagctcatttattgttggacaacaaggctccagtagatgaagttactgtggattacttaacagctcttcacgttgctgctcactgtggtcatgttaaagtagctaagcttttacttgattacaaggcaaatccaaatgcccgcgcgctcaacggtttcactcctcttcatattgcgtgcaagaaaaatcgtattaagatggttgaactacttattaagcacggagctaacattggcgcaaccacggaatctggcttaacacctttacatgtagctagttttatgggatgtataaatattgtaatatatttactacaacatgaggctagtgcggatttaccaacaatacgcggagaaacaccacttcacttggcagctcgtgctaatcaggcggatattattcgaattttacttcgcagcgcaaaagtggatgctattgcccgtgaaggccaaacgccacttcatgtagcttctcgattaggaaatattaatataattatgttattactgcagcatggagcagagataaatgctcaatctaatgacaaatattcggcgctgcatattgctgcaaaagaaggacaagagaatatagtccaagtgttactggaaaatggtgcggaaaataatgctgttaccaaaaaagggtttactccactgcatttagcttgcaaatacggaaagcagaatgtggttcaaatattactacaaaatggagcttctattgattttcaggggaaaaatgatgtgaccccattacacgtggccacgcactacaataatccctcaatagtagaactccttttaaaaaatgggtcatcgccaaatttatgtgcccgaaatggtcaatgtgctattcacatagcttgcaaaaaaaattatctggaaattgcgatgcagctgttgcaacacggtgcagacgttaatattattagcaagagtggcttctctccgttacatttggcggctcaagggggaaacgttgatatggtccaactacttctagagtatggagttattagcgccgctgcaaaaaatggcctaacaccattacatgtggctgcccaggagggccatgttcttgtatcacagattttactggagcacggtgctaacatttcagagcgcactaggaatggttatactccccttcatatggctgcccattatggtcacctcgatcttgtcaagttttttattgagaacgacgctgacattgagatgtcttctaatatcgggtataccccgcttcatcaagccgctcagcaaggtcacattatgattattaatcttttattacgccataaagcgaatccaaatgctttaacaaaagacgggaacacagctctccacattgcaagtaaccttggatacgtaactgtaatggaatccctcaaaattgtcacttcaacatccgttattaattcaaatattggtgcgattgaagaaaaactcaaggtaatgactccagagcttatgcaagaaaccttactttccgattccgatgacgaatcttgtgatgatcttttggatcataaccattacaaatacatggcaactgatgatttaaaagccaactacggccaggatcagaagaacttcgatactacaaacaccgaccacgatcttactgatgtttcagtactaaataagaaagaaatactacccaatgaaatgagctgtattgaattgactgaaatcgggcacaaacccgataacgttgttattgcccgatcccaagttcatttagggtttctggtgtcgttcttggtagatgcacgtggcggatccatgcgcggatatcggcacaatggtgtgcgcattatcgtacctccaaaggcctgcgctgaaccaacacgaataacatgtcgatatgttaagccgcaaagggtagtcaaccctccgcctttaatggagggtgaagcacttgtgagtcgcattttggaaatgtcacctgttgacggaatgtttttaagtccaataactttagaagttccacactatggcacccttagaaaaaacgagcgcgaaattattatactccggtccgacaatggagaaagttggcgtgagcataacttatataaagacataataggtgaagatataaaccaaacggaggaatttcattcggatcgcatcgttcggatcgttactcaaaatgttccgcacttttttgctgttgtttcgcgagttcgtcaggaagtgcacgttattggacctgatggtggaaccgttttctctacagcagtgccccaggtcaaagctatatttccgcctcatgctttaactaaaaaaattcgagtcggtcttcaggctcagtcagtagacctggttgaatgttctaaactgctcggtcaaggggtcgctgtctcacccgtagtaactgtggagccacgccgtcgaaaatttcacaaagctattacattaagcattccagctccaaaagcatgtacaaatagtatggttaatgcatgttatggcaatggaaattcaagttcgcctactcttcgacttttgtgttccattagtggtggtcaaacccgagcaacatgggaggatgttactggatcaacaccgttgtcatttgttagagacagtgtaacatttaccactactgtttctgcccggttttggctaatagattgccgtaatatcatagacgcaggacgaatggccacagaactttatagtcatttggccaaagttcctttttatgtcaagtttgtaatatttgcaaaacgaatttcccaaacggaagcaaaattttcagtattttgcatgactgatgataaagaggataagacccttgagcaacaagaatattttaaagaagttgccaaaagcagggatatcgaagtattgcaaaatcaaattgtatatcttgaattcgctggtaacattgttcccattttaaagaaaggcgaacagctgtataccaagtttcaacctttttgcgaaaaccggctttcctttagtgctcacattaaagatcaagaatttccacatggtcgcatctgctttatgacctacccgatggtaggaccagatgaagtgcccctgaagccgctttgtactctgaacatttcagtggattttaaaactataacaaaccatctcgaaagagataacctgcatagcttgaacgattgtataaatgcgcatggaaaattaaaccacaatgaaaatattgtatttggagtaaaggaacaacaggtgaagaaaattgatattactaaagcttgtataatgtcaagtgacatcaaactaattcatgaggctgatgtaatattagacgacatatgtagccacttaggaagtgactggcctttgcttgcaaatgtattgggtgtttcccaagccgatatcgatcttgttaaaacagaatttttgttaaacgacagcgtaaagcagagcatggcaatgttacagctatggctagaacatggaggcatattgacgggcaatgtactagctgaagccctctacaaaatcggccgctcagatatagtggagaaaagctttaaaaatgcagagtttggcactcatcaaccggaaaaagttttgccgactgccggaattgaaaaagatggcgattatgaacagtaatttacaaagtctacaggtccttagcaagatatttttaaaaacgcagatggtaagtttagtattgataaaatatatgtactgcaacgcaggtgtcactaaaaggagtaaattgatactaatgcaatacttaacatttgaccattacgttagaaagaagaacaaattataatacttgaaaaccagaaatgtcgatttacctgagtaatcgatgagtaatcgagcggtattcatcatgaaatagttgccgatatcttaaataatttacctaaagtcgatttattaagttttctaaaaatttaacattttcttgacaatcagaactattattcaatgtattactttgcaatttataataaaacaatattaacagtgttataa

SEQ ID NO: 1776 - protein, 1549 aa, DROSOPHILA
MTLGDVRVENKIQTRSETCAINGMALDNKNGIIKQNDATISFLRAARSGDIKKVMDFLDCGEISDINSCNANGLNALHLAAKDGYVDICCELLRRGIKIDNATKKGNTALHIASLAGQHDVINQLILYNANVNVQSLNGFTPLYMAAQENHDNCCRTLLANGANPSLSTEDGFTPLAVAMQQGHDKIVAVLLENDVRGKVRLPALHIAAKKNDVNAAKLLLQHDPNADIVSKSGFTPLHIAAHYGNVDIATLLLNNKADVNYVAKHNITPLHVACKWGKLSLCTLLLCRGAKIDAATRDGLTPLHCASRSGHVEVIKHLLQQNAPILTKTKNGLSALHMAAQGEHDEAAHLLLDNKAPVDEVTVDYLTALHVAAHCGHVKVAKLLLDYKANPNARALNGFTPLHIACKKNRIKMVELLIKHGANIGATTESGLTPLHVASFMGCINIVIYLLQHEASADLPTIRGETPLHLAARANQADIIRILLRSAKVDAIAREGQTPLHVASRLGNINIIMLLLQHGAEINAQSNDKYSALHIAAKEGQENIVQVLLENGAENNAVTKKGFTPLHLACKYGKQNVVQILLQNGASIDFQGKNDVTPLHVATHYNNPSIVELLLKNGSSPNLCARNGQCAIHIACKKNYLEIAMQLLQHGADVNIISKSGFSPLHLAAQGGNVDMVQLLLEYGVISAAAKNGLTPLHVAAQEGHVLVSQILLEHGANISERTRNGYTPLHMAAHYGHLDLVKFFIENDADIEMSSNIGYTPLHQAAQQGHIMIINLLLRHKANPNALTKDGNTALHIASNLGYVTVMESLKIVTSTSVINSNIGAIEEKLKVMTPELMQETLLSDSDDESCDDLLDHNHYKYMATDDLKANYGQDQKNFDTTNTDHDLTDVSVLNKKEILPNEMSCIELTEIGHKPDNVVIARSQVHLGFLVSFLVDARGGSMRGYRHNGVRIIVPPKACAEPTRITCRYVKPQRVVNPPPLMEGEALVSRILEMSPVDGMFLSPITLEVPHYGTLRKNEREIIILRSDNGESWREHNLYKDIIGEDINQTEEFHSDRIVRIVTQNVPHFFAVVSRVRQEVHVIGPDGGTVFSTAVPQVKAIFPPHALTKKIRVGLQAQSVDLVECSKLLGQGVAVSPVVTVEPRRRKFHKAITLSIPAPKACTNSMVNACYGNGNSSSPTLRLLCSISGGQTRATWEDVTGSTPLSFVRDSVTFTTTVSARFWLIDCRNIIDAGRMATELYSHLAKVPFYVKFVIFAKRISQTEAKFSVFCMTDDKEDKTLEQQEYFKEVAKSRDIEVLQNQIVYLEFAGNIVPILKKGEQLYTKFQPFCENRLSFSAHIKDQEFPHGRICFMTYPMVGPDEVPLKPLCTLNISVDFKTITNHLERDNLHSLNDCINAHGKLNHNENIVFGVKEQQVKKIDITKACIMSSDIKLIHEADVILDDICSHLGSDWPLLANVLGVSQADIDLVKTEFLLNDSVKQSMAMLQLWLEHGGILTGNVLAEALYKIGRSDIVEKSFKNAEFGTHQPEKVLPTAGIEKDGDYEQ

SEQ ID NO: 1777 - DNA, 2995 bp, DROSOPHILA
ctagccattgtatttagcttaaattttatcttatcgataagtgtgtgaaagtctttggcttttcttaagataaacaatgggtcatacgtggggatattgcttattggcggtgactgttgtttcattgcacatatgtacatacttttagagcgcacaaaaaacggggaatttgcaaattaaaaaaaaaaaacaaaacaaaactgatttgttgcgctcattacacacaaccacacacacacacacgcgcgttcagtgcgaattggggggtggatatgcaattgcaattgtgtgggttgtttaatagttcagtttatttggttatttgttgtgccaagcactaaataatacaaagaatttgggcgagaattgcacataaacacacatttaaaaaaatcaacaacaagtagcacaaaaatgaaaagtaacaccaaaacgtaggtccgttatgtgggcgctgattgcacgggtggtcgtgtgggagcgagagggcgctagcaataggcgaaggccaaattgttattgatgttattgttgttgtcactgatccttcttctctgcttgtctctccctctagtcaccacatctttatgcgctccacttcttttggcgacccccttttgttgttgcattttttatgaatgaatctcttgcttttttagaccattttttaagtgttacactcacacacacaagcacagcacttttgcgcactcacttcgacaaattgttactcgctttgttgttggtttttgtttttatgttaatttttacttactcctgcgcctgtgctaaaaactgaatctaaattacagtgcataaacaaacggaacgggaaaataaataaattatcacacgcaaaacacacacacgcgtctcccaaaaggaaaacaacaaaaacaataaagtgctatcgccaatcggcttagacacggcctatcgatagtgagtgttcgataaccgtttgatgctgtggacagcccatgtggaaagtgtcatcgctaagtagccagctgtttgtgaaatgtttgtttttcaagcaaaattaagcatttttaagagaaattaaacagttttacagttaaataaattgaacatttaagatgcccaaggttcgccgcagtcgcaaaccaccgccagacggttgggagctgatcgaaccaactctcgaggaactggagcaaaaaatgcgcgaaggtaaggacaagcgtggcggcttctgtgataatgaaaactttactataatcctatacgtatattattaaccttcttaaacagccgaaacggaaccgcacgagggcaaacgcattacggaatccctttggcccattttcaagatccaccaccagaagacacgatacatctacgatctattctatcgccggaaagccatcagccgggaattgtacgactactgtctgaaggagaagattgccgatggcaatctgattgccaagtggaagaagtctggatacgagaacctatgctgcctgcgctgcattcaaacgagggacaccaatttcggcacgaactgcatatgccgggtgcccaaatgcaaactggaagagggtcggatcgttgagtgtgtccactgcggttgtcgcggctgctccggttagattccatgtggacgcattattggcatctttattcgacacaaataatcctcataatacatagttcagtaggttcaactttagatttcgcctgatttcttcatagtatgtaaatacatttaaatacaagccacaattatggttaatggcatgctaaacatctaaatagatgctgcaataaaccgattatgtaaacgacaaggcatcgttgggaaatgcgttccgatttgtttaaaaaaaaatgtagaaatggtatgagcagacatttttgtattagaatgtatagaaaagatagaaattaacttgtagtttaatcaaataaataaagattataatttatgaaaatgtttaaaagcatttaataaattaaatttcctacatatgtcgaagtggagttttgaatattaacttaaatatattcctttttttataatctagccatctcaatatgtgagttgtgaaaatttctgtagtaaaatatgcaatttacgtacgtccttctaatgatttcacagcttttctttaaacgatatatactatacatacatatattttaatttaatgccttggacaatttattgctgcgctgacataattcaaactcaatgtcgttttcggggatgtggcggagtctccttcatgtgcgtccatttatcgtcgccttgctcctcgattttcagtactctttctaagggtatagtgtttctttattgtccgaaaatggaagccctagttcaacatttgagtatatagaaataagagtatatacatatttccttgagtcatccaattcagctagagtattccggccatcggcattcccaacttattctcaagctgaaaactgtcaggcttcaagtgttcctgcggggtttggtttggttttgggtggccaattgggatttggtcgaaaatgattataaatggttttttaattatacttgtctgcatattttctcatttgccaaacaaacgcggcgctgtcgattttattgttcacatggcaaatggttaatgccgaatggaaaatggtaaaatgcgaaaaatggaaaaattattgcccgtctgccgctgacagcttgcccccatctggctgaaatgggggatttcgaattaaaactgctttcggtcactaaaaatactcaattgttttgccaattacccagcggagttatttatgccagttatgtaattcgagtggcacacatgtgcagcgttgtaaattgaaatacatgaaaatggagcaagtggaaagtatattttgggtacttgcagtgttataacattttactgctttttgttcaacaattaattggttatttaattagcataagttgctgcttgcgtcatattgttctataatattgctagttaaatattac

SEQ ID NO: 1778 - DNA, 914 bp, DROSOPHILA
aagtagccagctgtttgtgaaatgtttgtttttcaagcaaaattaagcatttttaagagaaattaaacagttttacagttaaataaattgaacatttaagatgcccaaggttcgccgcagtcgcaaaccaccgccagacggttgggagctgatcgaaccaactctcgaggaactggagcaaaaaatgcgcgaagccgaaacggaaccgcacgagggcaaacgcattacggaatccctttggcccattttcaagatccaccaccagaagacacgatacatctacgatctattctatcgccggaaagccatcagccgggaattgtacgactactgtctgaaggagaagattgccgatggcaatctgattgccaagtggaagaagtctggatacgagaacctatgctgcctgcgctgcattcaaacgagggacaccaatttcggcacgaactgcatatgccgggtgcccaaatgcaaactggaagagggtcggatcgttgagtgtgtccactgcggttgtcgcggctgctccggttagattccatgtggacgcattattggcatctttattcgacacaaataatcctcataatacatagttcagtaggttcaactttagatttcgcctgatttcttcatagtatgtaaatacatttaaatacaagccacaattatggttaatggcatgctaaacatctaaatagatgctgcaataaaccgattatgtaaacgacaaggcatcgttgggaaatgcgttccgatttgtttaaaaaaaaatgtagaaatggtatgagcagacatttttgtattagaatgtatagaaaagatagaaattaacttgtagtttaatcaaataaataaagattataatttatgaaaatgtttaaaagcatttaataaattaaatttcctacata

SEQ ID NO: 1779 - protein, 144 aa, DROSOPHILA
MPKVRRSRKPPPDGWELIEPTLEELEQKMREAETEPHEGKRITESLWPIFKIHHQKTRYIYDLFYRRKAISRELYDYCLKEKIADGNLIAKWKKSGYENLCCLRCIQTRDTNFGTNCICRVPKCKLEEGRIVECVHCGCRGCSG

SEQ ID NO: 1780 - DNA, 8652 bp, DROSOPHILA
aaattgccatcggcgctgaaaagttcatcagtttataatacattggcttacataacatggtaagcgaattaatcacgagtgttaacaaacacctttggcatcggttagtacaataaatattattaaatattaaacatgcagatattcagtatattattctaaagtaagcgaattagttatatcccataaactcacttgttgtagagaacgatgtccggacgccagatgtgatcggagggcacgtgaagcatctcgacgccgccatactccttgggctcccacttgagcttgtagtcgtaccaggactgctccacccacagattggtggtcattatctggttcttcagattgacatcgatcagttgcgatagcttcagcttgatgcgaacggtgagcgcgtccgtcacattgaccaccggtcgtaccagtttgttgtagttgctcagcaaatcgtcgtacaatcgtttcgcatccggattcgctgtgctgcctgcggataagaaaaaaaaaaaaaaaacgtggaagcaaaaggataaaaagcggataaggatttaagtcgttgtcgttggataaatgccgttaaagtgggtcatcaaatggccgaggagctgtgtacgtatgtatataagtatgtacatagatgttggtgagtgcattcggagtggaaactttaccgattcgaactcaaatcaccctgggctatttcaactattctagcttattaaacattctcgatttccacacctattgtgtgtgaatgcacagaaatgccagcattatgaattgcatatgctatactactttatagtaggggccaacgtgtcgtatgcgtaatatttttctttgaattctttgtgcatctaatcacctttttgcttgcagttatagctaacaatttcacgaataaatcgcacaaaatcatcagcgaattcaatccgccgcttctctgtcagtcaaagcgtagttaagtggagtcctgcgtctaaattgattaaggtagcgatggggggggggggtatctgccgacatcctggccacgtctgcggcgtaaatgtgcgaaaattgcaggtgccccttaatgatgcaggaaatgagttaatgcgccgtcaatgccagcgacaccagcaacaacggcaacaacgtggcaccaccaacagcaaagagcaaatggccaaagcgctggcaggacaacaggatctgggtcagaggtcgggcgggcagaggagctcgcccagcgacagcgttcagcgaggcgggtggccaatggctcagtcaagcgttggcctccattgttgctgctcctccaccgcttcgctccactaactccagccgctgcactgggcgaaaagcggaagcaccgcttctatatatataagtattagcttctagctctaactctttgctatatccatattaccatttagtataataagctttcattaacttctcgcagtgtagtttgacatgcaaagcaaggagcgcggagcatcagcatcagcatcagcagcagagcctgattggcatcctcgcctgggggcgacagccatccgcccgcggggttggcttagtctggctcggatcagccagcagtctgcagctgatttcgaatcgcaatgaaagggagccggagacggaaatggatacacattcattcatctatctatgcttgtgtaacagtgtgagtgggactataagcagatagggcagctgtaaaatgtcgccaatgtcattatgcgagacttgcgctaatcagcttatcattactatataacatcggggcataaaaatgcctccatctctggggctctaagcgcattaaaatagttaccgactgcgtattgaaatggagatgttgtccaaagtcgcagacaaagcgaaaataaatcaattaaaagatttcccattcacattatccgctctgcatgatgttttgcattcatacgtactgtactgtatacatacatacatatgtattgtatatactccaatcgtttttccgagggcaagcaaagccaaggtcccggacgaaaagctaattagctgagcgacccagccagattagccggtcacaatggtcaatgcgaagggcggtggtcggtggacggggggcgtggctatcggcatatatcattaatttaatgtcccgcacattaattgactttgtccgatgggaggcgacgacgatgggcagcagcacaatgaccataatgcgagcatatataatgcctgtatgctctatgtctaccaggaatttgcgaaatgagaaaggggaaatgggcaaaggtggaatggggcaaggtggagtgggaagaggggaattggaagaggggaatcggcatcgaacaatgttaatggcatacagctaatcccgaatcgttatgctgccaggcaggcatcattgtggcagatttaggatttaggtgcttccaatttcgttcgcttgacaacaaaacgaataaaacgaatatataaactatcaatttaatctgtgatgccttaattgaacgtcagctaatatgaaattataatggcaaaataatgcagtcgaacatcacaaatcaagcaaaacaggaaactttgcctgcggtaatgcaaaaatttattattattgtactagcttctaagaagtattaaatgtgtaactaagtatttatctttctatctatacaatataatgattaaatggatattttaatccagagaaagcctttctagagcggaatatcgtattacctttgacctatttcattgacctatttcatttttgcgacaaccagatccagtgacattaccatctggtgtactcacttttggccacctattgcggctggcctaaacatcttaaacgagccttgaggccgttaaatggcgtcaagtaatttgggcaagcacatggctgctggattctgaattccgagtacactcataaaaagatggccacaacttttgcggaatttatccgaagatttagaagtttggctacaaaatgtaatcttctaataaaatagttgttttactttgaaatataaaccttgagctgattaaatatttattttagttcttaaagaaagtttccgaaagagttggcaagtttctttgttaatttttcaagagtgtacactcacccatttatttggcaaggtgtgagacttttatgcgacacagtgtgtgggtgtgcgagtgtgccagtgtgtgtgtgtgcatacacatacacatacagtcgtatatggattgtggctcgcgtgggaagcgttaagttaaacggacctttgcggcaaccgcttttgttgggctcgacttgggcctgtcatacgcggcgtatgctttatattgcccaagcacaggctgcttttccctgtgtgggtgttaatcgactgccgctgtgtgtgtgtgtttgtgtgtttgtgtgtgtgtgagtttgtgtgtatgacaatcacattaaggtagccaaaaaagcacattttatgattgctttgcgtgttttttccccgcacttgtaaatgtgtttattgtcaaaagcacacacagaaatgaacacacataaacaagtgttcatggctatggctgcactgaaagaaaattgcactaagcaattatattctgtgcattgcaaaaccaaatgtaactatgtttatatttaaaaaacacataccaacctaaatcagtttaaaacgactattatgtactaacttgaatgtattaacttgaaatattttggtcagtgccgaaacatttgtaactaaatttgtttggtatttagccagccgtgttttgtgtcctcaaatataaaactgaagttactttgttgtttggcctttcgcttgcagttaattgataagaccggtggcaattaaatttccattcgaatggctcgacttcatttcgaatactatgtgctattcggtttttggaatttggcatttggaattcaaagcgaagtaatcggagtgggctaaatcggagactctgcactgacctcgactttctaattaaagcaccgagtgcttgttggctgccaaccaaatgcaattttcctgtacgagtattttgcacccccattgttattcgcactttcagtggaccagcattttgccgaccgtgtttctggctcctaaataattatttctagtttactctgctcccttcagttgttgtttcaacaccaacaacaaacattttggggctttgcaaatgtgccatgaacttctgattagtttactccccgaaccttttgttccttacatttctgtggcgacaatattaatgaataagagagcacaaggacagtggcgtttcgcagctgtaagtcgttcggttgtgagcaaatccctaaatgagttgaccaactaatttgggggattgctgcaaatgcgttgtaaattgagctcaataatacacaaaccaaaagggcagaggaaatattgtatgtatatatgcacatcctaacgcaatcattaattcataaatacaattgatgtggtagttttgttagtgaaaagttaaacacctatagttcccattcgtcgaactggaaaatctatgaaagtaaggccgacaaatggtagtttaaatttaacaggaaaatacattttccagtgggcatttcctttcgctgttcattcattcacaataattgcgtgtaaatttgcagcgctcaaccaaaaccaacttcaacaaagaataagcgaataaaccaagcagcgttttcatgataatttcagctctttcttgggctattgaagccgccctgcttttccgcttttccgggacgaaaaccaccccctccccccctttcgtttttccttcagttttcccctcgtctttgccatcggccttgtctgccaatgccaaacgttttgttgtttagttccattggaatttatggcgttgtttacacaaaaattgcattcgccttttgcagttgagtaagcaaaaaaaaaaaaaaaaaaaaaaatgccagaaatagaaaaagggagcagaaaaaagcgaggcgaagttgaaaaagaattgaaggaaaagcggaaaaacaggtgaacattgtgggtggcattgcagctgctacgaacggagttttcctgcggaatatataaatatatttgagtgaaattctctgcggcacatcgaggaaactttcccccatgacagccacttgcgaaattccccagttatcagaggcttctctttcccttgccacgccccttttggcagtggctaattaaaggcgtcggttaagctggataattagagagatagagtgagagagaaagagagcgccaagccaacgcggcgtatacttgatgaagtttgtaaaacttcatcttaaactccttgcttaagcccctaaatatatttcacaaaataaaaaacatattatttactacctcttaaacgcacgagacatcaaaaatgttgaaaagttttcccttgcattcgacattttatttttattgtttctgccagttttcctttgattcaactatgcaaaaatgataaactggacagattcacgtccgatctgatcgtgtttatcggatggttgcactttgcggtgaaatcagagcaaaaaaaaaaagcagcgagcagtccgactttttgggggcaactgcaaagtgcagctgcagtcgagggccaacggggcgtatgaataataaaacattcgctcgcagaaaaaggaggtttgcagagggttaagggtcgctgccaaacaatgtgaatgaccaatgtgggaatttcgaatgtgggtgacaaactggccgcgttttgttaaccccgcaatcgcgagtggatttcccatctcaccaccaacttcaccccttttggccagcggcatttgcaggtggcacgcacattgggcaaacaaacgaaaaccttccacatattccaccaataaaagcgggcaacaaaaaattgcgaaaagaatgaaacagattgcagatgaaaatacgcaggaaaaaaggggaaaagcgaagcagacagccactgtgtaaatataatatgaataattttgttagtcgcgtccccatttttttataccatttttatacctcttactagtagggtgaaaggatacactagattcgttcaaaagtatgtaacacgcagaaggaagcgttttcgaccattaaaagaatatagtacatatattcttgatcagaatccatatcggagtcgatctagacatgtccatctgtccgtacgaacgtcgagaattttttttataattttttaaattgttaatcattttataccccaatatctattgatatcccagaaaaataatgaaatttcgcgttcgcattcatactagctcacgctagggtatctgatagtcgggaaactcgactatagcattctctcttttttttatgttggggggaggccagagcaagtgacccacgaagatggcacagcataaaacggtttaaggagaaaaaaaaacaaactaaatgaaagtgctgaccaagtcgcatgtgtgtgcttttgcgtattccagaaggcatctcgctttttggtaaggatggcaaaataaatggttatatttaaattcaagcacagagcttaattaaaatatttgccaaaagagggaattttttcagttacgttttagtgcgccacagccattttataatgtttctatcttggctttaagtttaaaccaaagctcaaaagacgagtgtagatgttaatttttttgttatatgcaaaatgtccaacgaatttatatccattttcagcggacgcatggattgtttgcacccatttttccgatggcttttacccacttttccattgccccccccccccccactgcacttgcctgcattccgtgtggaatttggggcatcctgtttgatatattctcggtgatatgaccaattacatggccatcaaatgcaaacgaatgcaatcattcactaactgacaccctgtgccagttgccccaccatatccgcttccatttctccacattctacactttcccactttccacgccattttccatgctttgccttcgccagtcatcgtcatatccttgctggtcctgtcaggggcgtaaacgctgcgtccgaagcttaaatggcaatatttttgccaagtgtcaggcgatgcccatcaactagccaacacacacgtacgcacacacacacacacaaacacccaatacatcgcagccatttggaaataccgaatttcattcgttttgtaggtgttgcaacctgatgaattgagcgtagagcacgtgcatgatccccatcatcattttttatggccatgcgtcaaaaaacgaacaggaattaccagtagccccctgcaatctagcctttaataccatctggcaatggcaatgtgtcaaaacgaatcgggacttccctacgatggccaagtgccgaaaaaaacaaaaataaaaaagaacaacgatccaaagtagtcgcagttgcgggggcagatcggatttcgttggtgtaaggaacttgggaaagcggcggaaacaggaagtaggaaatgtcgacgacacgcacactcgaaacgagaagcgggaaaatgggaaaatgggaaaactggagtgtagaggggggggcactgctgctaacgcatttctaacgagcaaagccagtcaacagcactttaaatggcaaatgctctcttggtgaaatcatcatatatttaattatttgcatttggcaagtggtaaataaaactatttactaactcttacaagtaatacgaaaatattatattatgtttatatttttagcataagcaaaagtatttgggctcatagcaagtgtatgcgaatgctgaaatccggtgttctttggctttatcgaatttggtgggagtcggccacgccctatttgctttgcccatccacgaaaccagaatgtttctccgtgtgtgtgagtttttttggcatcattggcacgcgaagagcatgaaacatttttagcatttatgtatgtgtgctaacctaaactttggcccacctccactttcgttttcacatttctaactcacttggctggaaggcaaacgaaagctgattactttggcacaatggaatgccatagcgggcataaaggacgaaaggacctcaaatgggttacaaaactaatgtttaagaaatgcgacgactctctcaaaagattttctcaattagagccttcaacattccgttaacaatacttatgcgttagaagctttatatatctatgcgtacaaaatgcacagagtttgcggaattagctgtattatccacacagttttacaaaaagttcaactcatttgtccttttgttttgaaagctatattggttgtcaaaatattggcaaaactttcgcttcactttgcttgtaactaagctgtgctaatattttcgaagttagtttttaatgaggtctcatttgcccatggtgtccgcatactggctccattctttgtgatataataatccgattgcatccacttcaatgcggcaacggcaactttgggaaaaggcgggtgcatgtgtgctatgtcaaaagtttacagagctcatttgggttcactggggattacaagtgcggacagacatttaagtgtgttaaatgtacaatttaatgtttgtaaacaatggaacagatgtacaaattgcacgaatcgtacataatttaa

SEQ ID NO: 1781 - DNA, 689 bp, DROSOPHILA
cgatggggggggggggtatctgccgacatcctggccacgtctgcggcgtaaatgtgcgaaaattgcaggtgccccttaatgatgcaggaaatgagttaatgcgccgtcaatgccagcgacaccagcaacaacggcaacaacgtggcaccaccaacagcaaagagcaaatggccaaagcgctggcaggacaacaggatctgggtcagagttgttgtttcaacaccaacaacaaacattttggggctttgcaaatgtgccatgaacttctgattagtttactccccgaaccttttgttccttacatttctgtggcgacaatattaatgaataagagagcacaaggacagtggcgtttcgcagctcctttaataccatctggcaatggcaatgtgtcaaaacgaatcgggacttccctacgatggccaagtgccgaaaaaaacaaaaataaaaaagaacaacgatccaaagtagtcgcagttgcgggggcagatcggatttcgttggtgaacttgggaaagcggcggaaacaggaagtaggaaatgtcgacgacacgcacactcgaaacgagaagcgggaaaatgggaaaatgggaaaactggagtgtagaggggggggcactgctgctaacgcatttctaacgagcaaagccagtcaacagcactttaaatggcaaatgctctcttggtga

SEQ ID NO: 1782 - protein, 228 aa, DROSOPHILA
MGGGGICRHPGHVCGVNVRKLQVPLNDAGNELMRRQCQRHQQQRQQRGTTNSKEQMAKALAGQQDLGQSCCFNTNNKHFGALQMCHELLISLLPEPFVPYISVATILMNKRAQGQWRFAAPLIPSGNGNVSKRIGTSLRWPSAEKNKNKKEQRSKVVAVAGADRISLVNLGKRRKQEVGNVDDTHTRNEKRENGKMGKLECRGGGTAANAFLTSKASQQHFKWQMLSW

SEQ ID NO: 1783 - DNA, 7491 bp, DROSOPHILA
ccctggagtcctggcttatcttgtgattcacttcgaccagatcctcctcatacataattggaaaatcatcgtccggatttcccttcgccttcggcttggtcgttttcatcgactgcttaacgaattccgtaagtgtcttaaccgccctcgtcaagttttcgatttctgcgcgctgcgacaggacttgggaattgagttctaagtgggttaggtaatgtaatatgatccggtgttataagatatgtatgtcacaaacataccatctatctttgttagcagcatggcattggctgcgatatgactattctcggtggcgaggcaaagtctcttgatttcaggcattgcttcgttaatttttagcattaaagtgaatacatatgtatatttagtttatgaattgaggaaagtccctaatggaagcgattcgcttcgctacacagttaagctccaaatggaattcctcgctgtttcatcattgccttcgctaggcgacgaatgggaaagtaagggcacgggcaaaaactccctcttgctcatcacatatgagtaactggtgaatcagtgatgacgacgtctgattagcggcggaactgtacagtagtacagagaacatggtgaaagccagaatatcgcatgacaaccaatcgcataagccacaggataaataatactaattgtttataataatcacaatgtttttaacgaatttagttggtgatgcgtcctgtcagttgagtaggtgggaatagcatggactttccccaaataacaaatgctaagttgggtttttttaaaattgatttaatacattttttttatgttacagttaaatttgaaactatatttaacaagcaatttggatgtcatcgatattttgtaataggaccattcacttagcggagtcatcaaccttggcgaatctagcgagcacatccacctctcgcttatcaggtctatcgataacatcgctcatcaatcgattcgtgaaccagctctatcgcgaaacggtcgcgtgttcgcacgcaaattgcaatataaatccacagaaattgacagggaacgttgctaaagggcgaaaaacaatcgtgccgcgattgaggcctgcgatctgcacaggaaatgcacaattgcgaagcgcaatttgataaattcggtaatgttcgattctcgaaagaaccagtcgtgtgcgtctgtatgtgcttcaaatgtcactctgtgtgcgggtgtgtggggagtgcataaaaggcatagaggcagcaaggagtgaaagagagagctccatcggcagcgcaacgaaagtgagcgagaagcagaaattgttagtgcttataaggatatgtgagaagggagagtgagacagtaagaaagaacggaagaagcagcagcgacgccgaccgacaacaactgtaattttccattaatttttgggcgggttttgtgctgcacaataatacaactggcataatataacttggcttattttttataaccaacatgtgtattttgttcacgttttgctgcgtgtgtaggtgtgagtatatgtatgtgtgataaacttgaaatacaacgcaatcgcaacgagaaccaaaacttgtcaaggtaaaacggctaaaaaaaaagaagaaacgaattgtgtgtgaaaaattccaactgaattacgcgagaaatcatgtgaagagcagttcgatacgcatgtgtgtgcgtgtgatagaatacgaggatgagagcgggcgtgcgtttggagtagtctgcttaattgattttcgcttaattactgcagcggttgcataaattaaatgtttacatttgccccggacagtgctgtaaagagagagagcccttcgaagccaggtggcaacaccgaggcccgtctatcgatatccactgcaattaattactccgactaatttcagcctctgtatgttttttgccggttaaaacaataaatcgctctctctttctgcctttcttcaatatcacttcgccccgctctctcacttgctctccttgggtcgttagccaacactggcgaacattaagaaagtgttaatttgcctaaaatgtacaagtacatgtgcgcgatggcctgctgtaaatgtgtgtgggtgtacgggagttttcctctgtcaaatgcaactaagtttttttttaccgaaaattcagccagcaaatgaaaatcgtatcgggtaaaatatgcattaggtgtaggtgtgtgcgcatttagcggtttctctgcccatctttcttctcccttttttcttattgtattatattttttttgcataatcgaagccgcctttcggtacatgtgcatgtgtgctgtcccgctcccactcccacccccatactacggccacctgtacgcccttgcacactcacacacaaacgcacacacccaacagagtcacacgcacgctgcacaaaactagagtagctatcagtgtattggtgcgagatataatatcacttgggaagtcatttatttgcgggtctcggagtctcgtgagctgtttttccttctgtttttttttttcgaattgcttgttgtttttattgcattttgatttgcttttcgtatgtgaaaaacctttttgttgtggcccatttttgttttttttttttctagcgcgtgtgtgtatgtgtgatttttcgcgctctgaaaaacaattttcgactggcgcctttaaacgcttcagctgcaattggtttgcaaaaaggagtgaataagagcgctcgcttgaaagtggtgggagggaggggatgtgtgagagagcggggcatttctatttgtagaaaaagagcgcataatttgtaatagtttgccatttacgctttccattttgtgtaaaatgcatgcaaaccccttttaaagagcaaaaataacaagagcagcaccaacaactactgttactattgtttcctttccttcaatctcaaccccattcctttgtttatttatctccccgagttaacctaaaacctgtacatcaataacagtattttgatatcagtatttatttgatttatcaaattacttgaagttgacttaggattattataaacaatgagtcccaaactggttaaagcctcgaaatacaactgctgtagattatatcgaaatgtatatggttgtacttagtgaacaaatggagggtatttgttcttccagaactttcctaatataagccaatctctctctcttcgcaaaactgcgaacattggcatatttattgagtgataagttaataatattaatcaaattaggtgttctgccttgtttcacattaattgttaacaaataagattgacaagtctacctactataccagaatataccgaaattaaaatggcaatgactttagtgtaatattgtgatcataactgagaattctattgttttgaaccgttaaacgtatgtagaggtagtagaataggatacgcataactcctactccggtaactaattaacatttttcgtgacactctttacagcacttgaatgctgacagcattcaaagaggtttagtcccggcagcgactttaattaatttttccctgtggagcacaaagatcacatcggatctatatagagtcacgtctatatattcagaccaccaggacgcagaggatagaggtgaaaggacgaagcgaaggagagacgcgcgcccccctcgtttcccgcccagccaacagccgtgtgaacccgtcttgaatggatccatttgttggctggtttcagaaggaacaggagggaccatcgctgtgcacatggttaaagatttgggagacgaatgcccaagagatgggcgcattgcttaatcaacagctacagcaggcgacgacgatcaacgggagcacgagcagcagcagcagcagcagcaatagtggtaacaacaacaacaacaacaacaataacatcatcaataacactatcaccaacacgaccaataacactggtaacaattcatcggccaaaccctacttatcgcgaccctacagctcgctaaatcgggtgctcaatttccgagcggattccctggagatcctgcagcagcaacaacaacagcagcagctcaacgggaccactcagcgcaacagcaccaacatcaataccacaagcggcggcagcactagctcgtcggcagattccaccacgaatcgggacaataactcacccgccaatagcagttcaaccaacggacccggagcaggaacgggaacgtcaacaggagcaggaggtaccggtacaaatagtccggcgacgacagcgtcaagcacagctgcgaccacgactggtccagccactagtatgagcgacaccagcaacaacccgccacaatcaacgaccacgcccgccagccgcacgaacagcatctactacaatccatcgcggaagaaacgaccggagaacaaggctggcggagcccactactatatgaacaaccatatggagatgatcgccaagtacaagggcgaaccgtggcgcaagccggactatccgtatggcgagggcgttatcgggctgcacgaggagatcgagcatttctatcagtacgtcctgcccacgccctgcgaacacgccatccgcaacgaggtggtcaagcgtatcgaggccgttgtccattccatctggccacaggcagtagtcgagatctttggctcctttcgcactggcctctttttgcccacctccgacatagatctcgttgtgttaggtgagtgaagggacggtactagctttttaagtggcccccacatgcattgactttttatttatgcattggctttattatcttatcctaatctcttcaatttactttcaggtttgtgggagaagctgccgctgagaacgctggagttcgagctagtgagccgtggtatcgccgaggcttgtacggtgcgtgttctggacaaggcatcagtgcccatcatcaagctgacggaccgggaaacgcaagtgaaggtagacatatcgttcaacatgcagagtggtgttcagtcggcggagctgattaagaagtttaagcgcgactatccagtgctggagaagctagtgcttgtgctgaagcagttcttactacttcgcgatctcaacgaggtgttcacgggcggcatctcctcctactcgctgatccttatgtgcatcagcttcctgcagatgcatccgcgcggtatctaccacgatacagccaatctgggggtgcttctcctcgagttcttcgaactttatggacgtcgcttcaactacatgaagatcggcatctccataaagaacggtggccgctacatgcccaaggatgagctgcagcgtgacatggtcgatggccatcgaccctcgctcctgtgcatcgaggatccgctgacgccaggcaatgatatcggtcgaagcagctacggcgtcttccaggtgcaacaggcattcaagtgcgcctaccgcgtgctcgcccttgccgtcagtccgctcaaccttctcggcatcgatccgcgcgtcaactcgatactgggtaagtgatagtcacgctctattagttaattaaacgaaaaaatacaaatattttaatgcaatccaacagttcacagtacaaaattgcacatagctaagcaatgtttactgctggacacgttgataacaacaattttgttatatgcgcgtatatacactagtttcgtggaatcgatgtggatttgtaatggtctcctttgttcgctaatgcaggtcgaatcattcacatcaccgacgacgtgatcgattatcgcgaatggatccgcgagaacttcgaacatctggtggtggtggatcgtatctcgccgctgcccactgccgctcccactgcgtacgccaccgccaatggggcgccaaaatatgtgattatgccctcgggcgccgttgtccagcagctgtaccatcatccggtgcaggtgcccaccgctcacgggcacagccatgcgcacagccacagtcacgggcacgcgcatcctggcgcccatctgtgccagccgtatgtgaccgggaccactgtatctgctgtaacgacgactacaacgatggcggtggtgaccgtgggcgtgtcagccggcggagtccaacagcagcaacagcaacagaatgcgacggcccatacccactcgcaacagcagacacagaaccaatcgcagtcgcgccatagacgcggcagcacctcgtcgggcgatgactccgaggatagcaaggacggcgatgttgtcgagacgacgtcgagtgctcaggaggtcgttgacatcgcgctatcgacgccaaatggcctggccaacatgtccatgcccatgccagtgcatgctgtcggaatgcctgcgtcgaacagttggagcggtaatggcaatggaaacggaaacagcagctcatccacgggctcgtcggtaatgcacacaatcccccgccttgacacatgatgattggtggtggccggctgcctaatgcccaggcatcaggtggtcggctatgctcctatgctggccgcagttgagtcccggttgtatctgaaaccgaaagcccaaacaaaatttcatccaaagaccatgggagcaactgcagccagcatgactagaagcaacagcagcagcaagcacacatatataacctcttcaccaccaaaacagccggaaatcgcacacatcgctgcccaggaaatggaccccgagcttgaggatcaacagcaacaacagcagcaccaagagacttctggaggtaatggcttcatccgaccgggtgacgtcggcaccggttccaacaggggaggcggtgacggcagtggcggccgcaattacaaccagcggaacaaccacaactccagcggctactaccaccagcagtactacgtgccaccgccgatgcaacagcagctgagcaagtccaactcctcctccaactatcaccagcaacaccatcacagccacagccatggcaatcatagtcaccgacaacagcatcaccaccagcagcagcaccaccaccagcagcggccgcagcatctgcgtgtgggcggcggcaatcgataccagaaatcgttgggcggatcgcccatcatcagtgctggcaatgcgtcgaacagcagcagtaattgcagcaacagcagcagcagcagcggcagcaacaacagccgactgccgccgctaaggggcacgctggtcaactcatcgtcagcaatatcaatcatttccatatcctcagaatcatccattgctagcagcagctccagttcgtcaagatccggtcaggatcagcagcgtgacgagcgataggaataggatgtaggaagatattgtgtatgtctatgacacagagagaaagagagtgcgacacagagggacagagaatgagagagaaagagatagttacggtgttagcaatatttatgggttacatttctttctcaggttaattgtaaactacgctgcatttttctaataaatatcattgacccccccgcccccccgcctctacctaatccgaaa

SEQ ID NO: 1784 - DNA, 3553 bp, DROSOPHILA
cgaaacggtcgcgtgttcgcacgcaaattgcaatataaatccacagaaattgacagggaacgttgctaaagggcgaaaaacaatcgtgccgcgattgaggcctgcgatctgcacaggaaatgcacaattgcgaagcgcaatttgataaattcgcacttgaatgctgacagcattcaaagaggtttagtcccggcagcgactttaattaatttttccctgtggagcacaaagatcacatcggatctatatagagtcacgtctatatattcagaccaccaggacgcagaggatagaggtgaaaggacgaagcgaaggagagacgcgcgcccccctcgtttcccgcccagccaacagccgtgtgaacccgtcttgaatggatccatttgttggctggtttcagaaggaacaggagggaccatcgctgtgcacatggttaaagatttgggagacgaatgcccaagagatgggcgcattgcttaatcaacagctacagcaggcgacgacgatcaacgggagcacgagcagcagcagcagcagcagcaatagtggtaacaacaacaacaacaacaacaataacatcatcaataacactatcaccaacacgaccaataacactggtaacaattcatcggccaaaccctacttatcgcgaccctacagctcgctaaatcgggtgctcaatttccgagcggattccctggagatcctgcagcagcaacaacaacagcagcagctcaacgggaccactcagcgcaacagcaccaacatcaataccacaagcggcggcagcactagctcgtcggcagattccaccacgaatcgggacaataactcacccgccaatagcagttcaaccaacggacccggagcaggaacgggaacgtcaacaggagcaggaggtaccggtacaaatagtccggcgacgacagcgtcaagcacagctgcgaccacgactggtccagccactagtatgagcgacaccagcaacaacccgccacaatcaacgaccacgcccgccagccgcacgaacagcatctactacaatccatcgcggaagaaacgaccggagaacaaggctggcggagcccactactatatgaacaaccatatggagatgatcgccaagtacaagggcgaaccgtggcgcaagccggactatccgtatggcgagggcgttatcgggctgcacgaggagatcgagcatttctatcagtacgtcctgcccacgccctgcgaacacgccatccgcaacgaggtggtcaagcgtatcgaggccgttgtccattccatctggccacaggcagtagtcgagatctttggctcctttcgcactggcctctttttgcccacctccgacatagatctcgttgtgttaggtttgtgggagaagctgccgctgagaacgctggagttcgagctagtgagccgtggtatcgccgaggcttgtacggtgcgtgttctggacaaggcatcagtgcccatcatcaagctgacggaccgggaaacgcaagtgaaggtagacatatcgttcaacatgcagagtggtgttcagtcggcggagctgattaagaagtttaagcgcgactatccagtgctggagaagctagtgcttgtgctgaagcagttcttactacttcgcgatctcaacgaggtgttcacgggcggcatctcctcctactcgctgatccttatgtgcatcagcttcctgcagatgcatccgcgcggtatctaccacgatacagccaatctgggggtgcttctcctcgagttcttcgaactttatggacgtcgcttcaactacatgaagatcggcatctccataaagaacggtggccgctacatgcccaaggatgagctgcagcgtgacatggtcgatggccatcgaccctcgctcctgtgcatcgaggatccgctgacgccaggcaatgatatcggtcgaagcagctacggcgtcttccaggtgcaacaggcattcaagtgcgcctaccgcgtgctcgcccttgccgtcagtccgctcaaccttctcggcatcgatccgcgcgtcaactcgatactgggtcgaatcattcacatcaccgacgacgtgatcgattatcgcgaatggatccgcgagaacttcgaacatctggtggtggtggatcgtatctcgccgctgcccactgccgctcccactgcgtacgccaccgccaatggggcgccaaaatatgtgattatgccctcgggcgccgttgtccagcagctgtaccatcatccggtgcaggtgcccaccgctcacgggcacagccatgcgcacagccacagtcacgggcacgcgcatcctggcgcccatctgtgccagccgtatgtgaccgggaccactgtatctgctgtaacgacgactacaacgatggcggtggtgaccgtgggcgtgtcagccggcggagtccaacagcagcaacagcaacagaatgcgacggcccatacccactcgcaacagcagacacagaaccaatcgcagtcgcgccatagacgcggcagcacctcgtcgggcgatgactccgaggatagcaaggacggcgatgttgtcgagacgacgtcgagtgctcaggaggtcgttgacatcgcgctatcgacgccaaatggcctggccaacatgtccatgcccatgccagtgcatgctgtcggaatgcctgcgtcgaacagttggagcggtaatggcaatggaaacggaaacagcagctcatccacgggctcgtcgcatcaggtggtcggctatgctcctatgctggccgcagttgagtcccggttgtatctgaaaccgaaagcccaaacaaaatttcatccaaagaccatgggagcaactgcagccagcatgactagaagcaacagcagcagcaagcacacatatataacctcttcaccaccaaaacagccggaaatcgcacacatcgctgcccaggaaatggaccccgagcttgaggatcaacagcaacaacagcagcaccaagagacttctggaggtaatggcttcatccgaccgggtgacgtcggcaccggttccaacaggggaggcggtgacggcagtggcggccgcaattacaaccagcggaacaaccacaactccagcggctactaccaccagcagtactacgtgccaccgccgatgcaacagcagctgagcaagtccaactcctcctccaactatcaccagcaacaccatcacagccacagccatggcaatcatagtcaccgacaacagcatcaccaccagcagcagcaccaccaccagcagcggccgcagcatctgcgtgtgggcggcggcaatcgataccagaaatcgttgggcggatcgcccatcatcagtgctggcaatgcgtcgaacagcagcagtaattgcagcaacagcagcagcagcagcggcagcaacaacagccgactgccgccgctaaggggcacgctggtcaactcatcgtcagcaatatcaatcatttccatatcctcagaatcatccattgctagcagcagctccagttcgtcaagatccggtcaggatcagcagcgtgacgagcgatag

SEQ ID NO: 1785 - protein, 1059 aa, DROSOPHILA
MDPFVGWFQKEQEGPSLCTWLKIWETNAQEMGALLNQQLQQATTINGSTSSSSSSSNSGNNNNNNNNNIINNTITNTTNNTGNNSSAKPYLSRPYSSLNRVLNFRADSLEILQQQQQQQQLNGTTQRNSTNINTTSGGSTSSSADSTTNRDNNSPANSSSTNGPGAGTGTSTGAGGTGTNSPATTASSTAATTTGPATSMSDTSNNPPQSTTTPASRTNSIYYNPSRKKRPENKAGGAHYYMNNHMEMIAKYKGEPWRKPDYPYGEGVIGLHEEIEHFYQYVLPTPCEHAIRNEVVKRIEAVVHSIWPQAVVEIFGSFRTGLFLPTSDIDLVVLGLWEKLPLRTLEFELVSRGIAEACTVRVLDKASVPIIKLTDRETQVKVDISFNMQSGVQSAELIKKFKRDYPVLEKLVLVLKQFLLLRDLNEVFTGGISSYSLILMCISFLQMHPRGIYHDTANLGVLLLEFFELYGRRFNYMKIGISIKNGGRYMPKDELQRDMVDGHRPSLLCIEDPLTPGNDIGRSSYGVFQVQQAFKCAYRVLALAVSPLNLLGIDPRVNSILGRIIHITDDVIDYREWIRENFEHLVVVDRISPLPTAAPTAYATANGAPKYVIMPSGAVVQQLYHHPVQVPTAHGHSHAHSHSHGHAHPGAHLCQPYVTGTTVSAVTTTTTMAVVTVGVSAGGVQQQQQQQNATAHTHSQQQTQNQSQSRHRRGSTSSGDDSEDSKDGDVVETTSSAQEVVDIALSTPNGLANMSMPMPVHAVGMPASNSWSGNGNGNGNSSSSTGSSHQVVGYAPMLAAVESRLYLKPKAQTKFHPKTMGATAASMTRSNSSSKHTYITSSPPKQPEIAHIAAQEMDPELEDQQQQQQHQETSGGNGFIRPGDVGTGSNRGGGDGSGGRNYNQRNNHNSSGYYHQQYYVPPPMQQQLSKSNSSSNYHQQHHHSHSHGNHSHRQQHHHQQQHHHQQRPQHLRVGGGNRYQKSLGGSPIISAGNASNSSSNCSNSSSSSGSNNSRLPPLRGTLVNSSSAISIISISSESSIASSSSSSSRSGQDQQRDER

SEQ ID NO: 1786 - DNA, 2626 bp, DROSOPHILA
agcataagttgctgcttgcgtcatattgttctataatattgctagttaaatattacattacatcagccagagatagcaactatttatggattttgagtttggtccaccaaactctattacatattattctcagccaaagggatttctggtttaaccctttgaggcctgctaagcaggtcgctgaacccctcatcgtttcgagggctgttaaattaattaatagactaaatgcggtcggttcggctggttaatcccacgacaacaagccgcaacttgtttgccaccacgtcgaaagtggctccttgaaatggctacctgatgcgggaaacccacttccagatgggttgatccggaatggacaaatagcaactttagcaggtagcaatggcaatcgatattggtgtctcttatcgcataatgccgcctgatcccacccgcttgacatgctcgtatttgcccaagcaggttgattttccacatagcccaacatttgttgactcatttcggctgctagataaggcgcgaatcggcaaatggatggtgatagacgaacagcccagcttgaccttgggattattgtggatttaatgacgcccttatcagttgcattgaatcgtatctcttggcttagaatatcttttatattatggggagtatttgcataccgacatacatatgtatgtaggtagccattgaagaaacccacatattggttcgcacctgatccttttgtttttaaatttgaccaattatcaggtagactcagtgcgtctgctaccctaatccctttgtttacatatctgcgattcgttggccaatccggatgcaggtaggcggtgtccagcaaggcgacaagattgaggaaaacaagatcataaatcccagtgaccgccattcatgaaggtagaacccgcgaataacccatccagtgtccaatggcaagctacctgcggaaatggtataaaacggggctgacatattgcctaaggcagcattagcacacgaaatctcgacgagagcagtcacagaccacgtcacacatcgaaaaaaatcaccatggaacggagtcatctttacttgcccactctgagctacgcggccatgggtcacgtatacgcaccgtatcgcggaagcagttcacccgcactatcgacagcatcgtcaacatcatcgaagccggagcagatcgaggagctggtgtcccagcagctgcatcatctcaaaatgcactacgccgacgaggagcaacgctacgtagaccagatgctcctggagaatcccattgttgtggagcgccgtgcaccgccgccgctgaaaacggagcttgctatggattgccgcggatcgggttccggatcaggttccggttctggttcggatgtcaaggatgcccagcgtcagagggccgagtcgtgccgcaaatcccgctacaacaacaagatcaagaaggccaagctgcgcttccggcacaaattcgtcagcgggcagctgaagaagagcgccgtcatgttggacacgatgcgggatgtgattgcccaggcggagaggcagctgctcgagcggggatatcccgccgccacactcgagcggatgcgggccactttcggcctggaaatggagcagtgatatcatagtgtagctatgtgtcgcaggaacggatccctgactagtccagcattagccataccactttttttttttgttgactatatctagtatttatctaagcatattattaaatttttaaataaaattaagaatcatattgaaaacgaatgctttcttattcaaatatttgttataggttcacacgatcatatggagtcaaggataacttgttaatttcactttacaagaatttcccataatttggatgcatttattctgcatttaacgcatcggcagtcttggggtttccttcgcctggccgaaggtaatcccatcggaattgggccaatgcaatgcacccatttcgacttgcttaagttcagttcatttgatccgacatgattgcacttcgctttccccgtttcacgtttttccccctttccattctttttttccctttttttttttggcttgcgaacaatttgcgttgccaaaagcagcaaatgcaatggaagtaatggccttaagagcaggtttctgtaagagattgtggctaaatttagtggggctactactgcaaatagcaccccactttctggttggtgttttcatttaagaactgcgaactgaacttggaagctttactaaatgcttgccaagggtatatactatgtatatatatatacaatataattttaataactacatatattttttaagtaatttctcataatatcttgatgtctgcgtaatgagaaggataaatatagatacttctgattgttttttaccccaaaaagttattctatttcacgccgtatcttttcaactctttaggtatcagttagtcgttactactgttcacagatattttttaatagcacaacattaagaatgaatggaggagcaaataataggaatgtaaaaacgagagtataaaacgcatttcgccacaatggccaatcgaatttcaagctgatgctcgctcaaaaatttcattttcacgtgccaggttaca

SEQ ID NO: 1787 - DNA, 626 bp, DROSOPHILA
cacgaaatctcgacgagagcagtcacagaccacgtcacacatcgaaaaaaatcaccatggaacggagtcatctttacttgcccactctgagctacgcggccatgggtcacgtatacgcaccgtatcgcggaagcagttcacccgcactatcgacagcatcgtcaacatcatcgaagccggagcagatcgaggagctggtgtcccagcagctgcatcatctcaaaatgcactacgccgacgaggagcaacgctacgtagaccagatgctcctggagaatcccattgttgtggagcgccgtgcaccgccgccgctgaaaacggagcttgctatggattgccgcggatcgggttccggatcaggttccggttctggttcggatgtcaaggatgcccagcgtcagagggccgagtcgtgccgcaaatcccgctacaacaacaagatcaagaaggccaagctgcgcttccggcacaaattcgtcagcgggcagctgaagaagagcgccgtcatgttggacacgatgcgggatgtgattgcccaggcggagaggcagctgctcgagcggggatatcccgccgccacactcgagcggatgcgggccactttcggcctggaaatggagcagtga

SEQ ID NO: 1788 - protein, 189 aa, DROSOPHILA
MERSHLYLPTLSYAAMGHVYAPYRGSSSPALSTASSTSSKPEQIEELVSQQLHHLKMHYADEEQRYVDQMLLENPIVVERRAPPPLKTELAMDCRGSGSGSGSGSGSDVKDAQRQRAESCRKSRYNNKIKKAKLRFRHKFVSGQLKKSAVMLDTMRDVIAQAERQLLERGYPAATLERMRATFGLEMEQ

SEQ ID NO: 1789 - DNA, 10609 bp, DROSOPHILA
actttttaaaccctgataaatggggaaatatttatatagaagggcggaaatacggcgattttccatacctttttcgagatgcgatttagcgaaaatccagtttgggtcggcacattaagatatccagccaaaacaggtatttcaacatccattctgtgcaccactcctccacctctcctctccttcttcccactctccttcgtctcctgctctctttccctctccttcgccgatctagctcacacaatgcgcctccgattccgaattgttgttgttgttgttgttgctggagttgggctatgcgatttctggagttttccttcaattcatccgtttttctgtgctttacgatagcttcgcggtcgcatttagttgatcacttcatagtaaacatcacatcatatcgcacagcgaatacggagattcgaatttcgaaaagcgcagccgcagcacaaaaaaaaatcaccaaaaagcgagcacagaggcaagtcgactttatttatttatgcgctgcacggttgcatgcagctgctgcaatcgtcatcgataactaatggcgatcgataacttatggttttttggtaacaaagcggttgaattatttcttaggtctaaaataataaattaatatcatatttttataatcttggtatgttttcctctcctagcgcgcaattttaatttctcataattgcgttgttggagttatcaacatttcgatcaatacgaaaaacttgttatattatttttttgatattttatattattttgaatgcaaatatatatatatatatatctatgtgaaatattaagttacaaatttatggtgaaaatattttctgtgagcaaatattttaatcgcgtgtgtttaaaaaaatagctatgaataaaaataaatcaaacagtctggcagcaaagtggcgtgcgatatttcagcgttgccatcttcgaatgccaagtgccatcactattatcaaatagcattgtttcacccatctggtaacatcgcaaatcgtattgtgcaaaaaggaaatataatttagccaaaacaaaagccaaataaggaacatggcccacgaccgcgaggtgctgcgaatgatctgggagggccagataggcatatgcttccaggcggatcgggacgagatcgtgggcattaagccggagcctttctatctgatgatatcgcgactcagctacttgcctttggtgactgacaaggtaaacaaaggcttcaaatggaaatggccataccaattataagatcccaatgactgtcgtacatatcctggcaggttcgcaagtacttctcacgctatataagcgccgaacaccaggatggagctgtgtggttcgacttcaatggaacgcccctgcgacttcactatccaattggtggggtttacattaacgagatgatgatatcatagcatgcccatttgatactaatgatggtactgtcttgaatcctggttaggtgtcctatacgatctgctgcatccggaggaggacagcacgccctggtgcctcaccattcacttctccaagttccccgaggacatgctcgtcaagctcaactccaagtatttattaaagaaatcgccataccagtttgtgtaccccacagtcgtgtttgcgaaatcttatctttaacacgtcgtaacttgggattgcaatcatatatagttttcccttttcgagtctcaatgaacaatcaccgtggatgtcgaagtaataacagggtaaacaattgcccatcaagcaaatcccgtgttataagagaaaatgtcatataaaagttggaccaaatatgaattaacaacttcgcacaaagataaacgtaccacaatagggtttttaatacgtttcaaatatttgaaaatagcatagttacctcgactagggtacacaaactgttggttccaactgaatttttactgatgatccgcaactcttagggagctacttgaatcgcactacatgtcctgcctgaaggaggcagatgtgcttaagcaccgcggcctggtcatatccgctatgcaaaagaaggaccacaatcagctttggctgggattggtcaacgaaaagttcgatcagttctgggccgtcaatcggaggctaatggaaccgtatggcgatttggagtccttcaaaaacattcccctgcgaatctatacagacgatgtgagtggaaaagccgaattagatccgttcagcttaaattgatggattttccacttgcttttattttatctccattattgataggacttcacgtacacccagaaactgatttcaccgatcagcgtgggcggacaaaagaagagtttggccgatttaatggccgaattatcgacacctgtgcgcagagcgggtgagttgggatttacgtttttagcctttggattcggctatcaattaccgcaggcactctaaaaaactgaataccaaaactcaaagtcgtctctaaaagaaaatgaaaacgagaaaaacccattgtctgcgcagacgcagcgtctcttggaaattagggaaaaggtgccagtcagtctggcatggccaagtgcatgtctatctgtatctctttcagatgacgacccacccgtctgacttatttatttttctattgaataacacaaacgagccgagccgagccgaaccgaaaaatccgccctgagcggcactctccggcaatcattcttcaattcatcaatgtcccatctgaacaaaaagccgaaaaaaaaatacaaatacaaatacaaataggaatagaagatataataggagattctactatatactctcggtctgaaaacaatgcccccggggtggaaaagcgacccggagcggatcggaacggatcgcaggtcttttttggtcatctcgcttgcccccaaaaatgtgccctatttccctctagctcgtcacattttcctttttggccattcagaccgagtgcgtggaaaacaaacgaatgaaaaattctttgtcctgccgtctgaaaatttgtcgacaatgaaaatgtgcgtgtggattttcgggagagcaagaaaatcagccagcgattgaacgaaaaacaacatccgaaaaaccataagcgatttaaacgaaaacaacatgggcaatagtttgaaatttaacagccattttggaagaattaagtcgggagtgcagcaaatctatatatatttgaaccattttatgagcaagattgaatagaaaaacaagttttcagcgataatagtagaaatctaaacacctatgtataaatatatgcagttttatgggtacattacaataaacaacagacttgcaacatatgcatgcgcagcacctgcaacattagtacacttgatactagaaacagcaacaattataccaacagagagtgcaactgatgccaagaaatgtgccgttttaatgtaaacctaaagcaacttgctcaagcaagcaagcaacaataaattagtcatcaatagaagctgcagcataagctatgcaacctgcaatattgacggaaaacccccagtggcagatacatataacaaatgtaagcgtcatataagctgcagcaactgcaacaaaacatgcaacctgcaacctgcgacagcagcagcaactgttagaaaatgccacacatcgctgttgacctgcggcgccggcgacagcaagagcacgaaccagagcgggacagagagatcagagagagagagagagagagagagatgacgagtcgcggccagacagagatgggacgaattcgatgtgttgctcaccggcagcaacttgcaacgcgcacacacactgcaaaacctcccactccagtggcttaggtgcaataatagcattgggaattccaaagatggacaaaggcggaactaaatacctgcggctgggatttacgaattatattgtgagggttttttttttcgggaaccacttggatggatagctagtgcctatagagagtttctgctttccattcagagcgagagatccctcctgtgcgttgtgcgtccatatgtttcgggcaggttgggtatttcccaggtgtcccgatctccatgcatttcgtttcgtgtcctttggctgagagccctatgctgcaccatgcaccctagtgcgctggccgaggtgtgaaatctttatttgcatgcttatgaacggccttctctgaccagctagctcgatgatcctaaggaatttcccattcgaaaggtgagagatttccgaagatctcaaacaattgccgatggatgtcgatcaacacgtattttcccaaaggtcattcggcactcgcatcggtgcgttgcatgctgtccttggcacaggattccgattcggattcggcaaggaatcctcggctcctttcagccgcacgcctggcttaagtgggccattcaaggcaatcctctgacaatttggttttagctcgactaggtggattttcaactgttaggatctttcggatcagtttagagtgttgcgtgatttggggggattttgctcggataatttggacaggttgtgctaatcaatgtgcgatttctagggtatgcgactcagtaatattgtatattattagattagatccgcatatgccgtataattctgatttaccccaccccatatatccatccattttatccccccaactccaatccaagattctttcgcatttatggagtacacaaatcgaaattgaaatcaaacagaaatgcattcaaaacatgatcaatttgtttctccggtttttttcatgaaacttggatcgtattatgtacatgtatggggtaaaaaacaaaaaaaaagcagaggacggcggaggcaaagagcatggtgataaaggggaggaggggaggggtagatggtttggataacgattgcacgtatttgtggtgcgtgcattttcatagaaaatcgtatttaaattgaaatgaaattcaaatatacaatgcagtcgagtctctgagtcttccgtcggaacgtggaaggttcaaagtagatgcgattccaagaaatcaaaaacaaaaaaaaaaaaaacaaaaaagtgaaagaaaaaaacgagagaagaagcggcagaggaagaatctaagacgcgtcaaaaataaaagaaacgcatttcttttggctttgcctcttggctcctgctccctctatctccattcctctcgttctttctgcccgtctcgctcgcactcgtttagctccttgtgcattggcattcgcttcatttgttgttgctgctttcatgatttgccgccggcagcgacgccgactgcgctgcctcggccggaaagcagaaagaataaatgcaagtggctttcagtgttgccaagttttaaagtttacaaaaagaaatcgtttacggggttaaaaaaaatgtacaaatttaaacaatgtccaaaccattcctcaattttttttttaaatgttcatcttccaaaactttaatctgtttggaaatgcataagccaacaaatattctgcattgcacacaatgtcctttatatgaattcgtataagcattatatgtatatttttttttctgtgtaaaaatagctagatgcagcgtgaaacaagctaaaactggctgagctactttggagtgagtgcatgtgtgcgtgtgtgtgcttgtatttgtgtagggtgctctcgaatgtgtgaaaaggaagttctgagatatcacctccgcttatttgtatttacaccttcgccggcacctcgatcccctgcccctcatctcctccaactcctactccgtgactctcctcttctcccccgcctgctgcatatatatttttttttttttcttgctgcattcaacaaaactccggtgaaaacggcggcgcacggaaatcgcacctcaatgtttatcactttttgcccctctctgttgctccctagccaaacagccaaacgccccatccccgttttgcgatctccctcttgctcgctctttcatcggcgcatttgcttagtcccatttcgacacatttttcgtttgcatttcgtcaatcagacaaacaatacaaatacaaatgccaacctgcaaaatgcaacctggacaatgcccatgtatgtatgcgtctgtataaatgtatccatgcatgtgtgcagcaggtgtgtgtgtgtttttctgtgtttgtgtttgtgcgacaattggcggtgccacgccccgctttttgggtgggctgcagctgtgtgcgagtgtttgcctgttgatcttcacagcatcattatttaaactcacctttttttttttttttaacacccggtgatcatcaatcatacttcatttgaatgataccccccaaacgtaaaagaaacttcaataacatacgaccgcttcaaaagtaacccttataaggttaaaatcaattctcgtatccatgttaccgaaaatcttaacaaggtttaacagtttgttctttaaccactaatccattggatagagctgtaaagttatgtctataatttccatcaccgaagttaaaacactgttgccatgccaaaaaaaaaaaaaaaaaaaaaaaaaatcacttgaaaagcacccgattcttgcatttcctgccacgccccctttgtccatccacttaaaaattccactttctggtttgtttgtttgtttctttttgtctggttgatcggccattatcgggtgcaatctacagtcttcaattcacaattcaactgcaccgtcaacgaaatccgatttaatttcttttcgctaaacatccgcaaccccccgactgccacccctttgatcgtaattccctcactttgtagctggatgaaaataaaccgaaattaaaattgaaattatggggcgcacaaaaagaaagaattgaccgacagcaagacagacaaaaaaaaaaaacacaagcaaaaacaattgattagcacttttcgatttcgcactcttcaatggcgtcactgaactgcaaaaaaaaaaaaacaaaaacaaaaaagctgacttttccaagtgcgcgaaacgtttggaatcgtggaacggagatagagttttatgtatgtatgtacatacatatatattttttgtattttactgctatttaatggctttatggaacacaatctattaagtgattataatgattggggcgccttatcagatcgatggagcttttggttatttttagacatgagctatgcgcgatgtcgttcgttttccaccacacctccgcttctgcccattcgtacgtactttccacgttgacgataataaaaatgggatcaataaattttcagactgtttggcgccactctcgctcccgctccctcctctctttctcgccgctgtctcgctcactctttctgcgggggacctgcacaaacacacatatcccatatcgtcgagatcagaggtgtatatatacatgcatacatacttacatatataatgcttgtctgcgggcctgtcccccatttaatagtctatatcgttcgggtcggtttcctattcaagatttatgatctctttggcgctttggaggtgttttttggttttatggtttcgtcggatgcatcgccgattggacgacaccttgggagatattacgtttaattgctttacggttttttttttttttttgatcaagatttggttttagtagggttaaggcgatttataacaccgaagagtcaattcaaaaaacgagaaatttcacatttaacaattcaaaatcgtaatgcttcagcattagctctccgtttttttttttttttaaattcccaagtaatgactatattattagccttcgtattattatattacttactaggtatgactattgtcattaaacatttttatttgaaaatgattgtgaattttaatcactcatttactttttaccactcggtcaacaggcgaactttggaacaatctaatagatttacttcccccgtttccactttaagcgattaatatttattgctttgctttattacttttaactagtgcctggccttaaatatacaaatttatttatttttagcttgtaattctattaactttaaaactaaaatatagccctggcgttaaattgattggtcacacaatccagcattttagctttgtgatcatttcgttgaattctttgcatatcttaatgccaatatcgtagggaaagcatatgcatacatacatacttgccacctgaatatgcccctgtatcaccaatcaattcgcttcccatatttccactcgaggcaattgttgtatgccgttcatttattatttttggggtagcgccattcgcttggtcattaaactcgtgactttcccaaccgcaacggatcgaaatggaatggaacggtgtgtcgtatgtgtagtataatatcgcgggttctatgaagctatagagcctacttgaactcgcgtccgttgcacaaatcttatcgccaccgcctcccaccgcctgtaatcaggcattatcagctcatccacttacacacattccacatctgcccagtatacatgtgtacatacatacatacataaaagtacatataagttgatatatatatgtacatatgtatatataacgctagttctaaccaccggtcgattggcaatcgagaattggcaatcggcaatctataattacactttatacgctaaaattaaaaatgacgaaatttgtcacaattggtagcccgaaaaataagaatagcaaaacacacttgtagtgtagataaggtactaaactttgatttccaagtcagtacaatttcccatcttttggttcgattgccataatctttatagcccgcaaattgatcatgatcagatgcgcgctgtttatgcggcaaatcgaagcgactgagatacggccttatcagtctaaagtaatcgctagctgatctcattcattataatatagatacttgcatatgtaggcttcacatgagcgctgtctcattaatgaaatataaaatattgattggtgatcttttacataatggttaagtacgcatttagcaaattgaaagtacgggtcatcatcaaaaatgtgtatttcttaaaaaatcgttgactaatatatgcgtgattattttttgacatagaacatgtttagtcattgtattcctggactgaatgaagcgatacaatcctttgtattttcaataaacgcatttaaatttatgtttaaataactccctttggaagtcttagcattgatcgataatagaaatttgctcggacgaccaaatttgttgtttatctaaaaaaccaaaatagaaatactaaggcaatttacaaattaaattagccgcattaaagactaccaagttgatccgtggaaaaataaataaaatatatataaaatgagaagcttacttcaagcttttaattacggaaagtgaggacgcttgagttacgtttgtattgtttttagagtgccaatttgttgggttccagagatatggtgttgctatagtactactccaataatccttaatattccagttggatgtcgcacgcacggcattgatctacacgaggagacccaactgcaatggatgtccgagcatctgagctatcccgacaactttttgcatttatcggtggactacaaggatgtttagccttatccctatatgtatatagccctatgttttgcccagttcgcgtgcgtgtatatttatgtttgtgttcgtgtcaatgtgtgcttgtgagagtgtgtgcagttctatttttcgattccagcaaatcccagggcgatcctctgcgatcgatttacatacatatatacggatccatgtatatatccaaatatatgtctagttaagctaatctgtatgctatatttatgatatatgccagcatttaaaagaagcgagcagcgcaaaccaaacgattaatgaaactacccactaactaataatgccaacatacagttaaacttaactttttttttttttttggatcataatctgccgactttagttgcgaaaaacttgattgaaattaaagcacagttttattacgtttatgtaattatttgatacactaaaatgacatcacgccacactaatgattaatggaaactattttatatcgacccaatcaaaaatatatatatatacgaaagttataaaagaattgcatttttcaaaaagggggttggtttgtcatcaaactctatatattcgcgaatggatcggaagatctgttcatggctgtgttaatcgatcaacctcctataatttgtaagcctccggaaattggtcaagctccacaaaaaaaaaataataataaaaagaaaaaaagagcggaaaagaaccgagggcgaggttatcaatttcgtttgcgatttatccgcctgtcaagatagtgcctggaattgaaaattgggtctggagtggtggtgctatatctgtttgctttatatatatatacatatttttttttttttttgttatttctttgcaaccagacgggaccttacacaatatgtttttggccaaccccgaaatcggagatcttcagtgcgtctcctttatttgaagagcatcgatttgacactgtcagttgaacattaataacaacatggtctggtcctgatctataattagttaacgcttt

SEQ ID NO: 1790 - DNA, 989 bp, DROSOPHILA
taacatcgcaaatcgtattgtgcaaaaaggaaatataatttagccaaaacaaaagccaaataaggaacatggcccacgaccgcgaggtgctgcgaatgatctgggagggccagataggcatatgcttccaggcggatcgggacgagatcgtgggcattaagccggagcctttctatctgatgatatcgcgactcagctacttgcctttggtgactgacaaggttcgcaagtacttctcacgctatataagcgccgaacaccaggatggagctgtgtggttcgacttcaatggaacgcccctgcgacttcactatccaattggtgtcctatacgatctgctgcatccggaggaggacagcacgccctggtgcctcaccattcacttctccaagttccccgaggacatgctcgtcaagctcaactccaaggagctacttgaatcgcactacatgtcctgcctgaaggaggcagatgtgcttaagcaccgcggcctggtcatatccgctatgcaaaagaaggaccacaatcagctttggctgggattggtcaacgaaaagttcgatcagttctgggccgtcaatcggaggctaatggaaccgtatggcgatttggagtccttcaaaaacattcccctgcgaatctatacagacgatgtgagacttcacgtacacccagaaactgatttcaccgatcagcgtgggcggacaaaagaagagtttggccgatttaatggccgaattatcgacacctgtgcgcagagcgggtcattcggcactcgcatcggtgcgttgcatgctgtccttggcacaggattccgattcggattcggcaaggaatcctcggctcctttcagccgcacgcctggcttaattggatgtcgcacgcacggcattgatctacacgaggagacccaactgcaatggatgtccgagcatctgagctatcccgacaactttttgcatttatcggtggactacaaggatgtttag

SEQ ID NO: 1791 - protein, 306 aa, DROSOPHILA
MAHDREVLRMIWEGQIGICFQADRDEIVGIKPEPFYLMISRLSYLPLVTDKVRKYFSRYISAEHQDGAVWFDFNGTPLRLHYPIGVLYDLLHPEEDSTPWCLTIHFSKFPEDMLVKLNSKELLESHYMSCLKEADVLKHRGLVISAMQKKDHNQLWLGLVNEKFDQFWAVNRRLMEPYGDLESFKNIPLRIYTDDVRLHVHPETDFTDQRGRTKEEFGRFNGRIIDTCAQSGSFGTRIGALHAVLGTGFRFGFGKESSAPFSRTPGLIGCRTHGIDLHEETQLQWMSEHLSYPDNFLHLSVDYKDV

SEQ ID NO: 1792 - DNA, 11119 bp, DROSOPHILA
ctcaataaattcgtccccctccatataataacccccccccccccacagagaacaaaaccaaaaaacaaaaaaaaaaaaggtatcgagcaacttcacaaaagaccaccacacaacccagccatctcttcgatccgaatggttcgctagtatagccacagtacaactatggtacacattggtttttaggccttaagactttggtagattttaattcagaaaatgaaaagataaaaagaacaagccaccagcgcaactacaactacaacacacaaagagtgaggcatccgatgaacaatggatgtcaaaggtaaatttattgtatgtccgcgaacctaaattatttatccacttggtttttaccctaaatctgtcgcaacacaaaacatgtcaagagaaaagtgaaaaaaaggtactatatgcgattgtttggcgtaagtgcaagtagttacataagtcgtgaaatgagaatcaataaattgaacctaatttaaaaccgaaaatatacacaatgggtgtttttaatgggaatgtcgggattttcagcttttcttaaaaacaaattacaaaaggatacccattgcccaaattgaaattaacgcagcgctggcttaacaataataattatttatttattttcaaagtttcttcttgtctataacaattagtaatgacttgaacgcacacacatcatatgattttcgtgatcgattcgcgggggataagcacatgcagggctatatatatttatgtgtagataaatataaatatacacaatgcaaataactttcgtttagaacaatatcagaattttcaattatgcgccgaccaaaagatggtaaactacttttggttctaacaaaaattattgtcaaatctccgccaggagttttcgttcaattaagaatcaaagactacatggttaagtgggttaattgctaactggaaacgttatcgtggcgataaaacctgcgcgggttgggttcacaaatcatagggttttaaaaatgtttttatatatttctcatatatatctatatatgcatataaagaagagcttagaagcattcagctatgacacagtaacaaagaggaaaaaaaaaaaacaattagggtaatttaaatttttaatcctaagccggaggattgacacttaacacagggatcgaggacggggaagttggcagctgatctacttgtacttcttcatgaactcggcgtggaacacacggaacttctccatcatcagcttcagcttgtccgtttgcgggaggatcgtgcttcggaaatgccacgtgccgggcttctgaccaaatccactgccaggaacaatgcaaatgcctgggagaaaattaaacaataaattgagagactaacaaacgaggtcagcaaagaaaactcaccgctcgtctcgagcagctcaaatgcgtagaaaacatcgggggccatgcccttggccttggccgcctcgatcgccttgggcgggatctcgatctgtggaaagacgtacatggcgccctgtacggggttaaccttgtagccttcgaagctgttcagtgccttgtggacgagctcggcccgttcttttagagcggccagaatgccatcgcgctccttcttgtacagatcgtatgatggctctccgggctgcggtggattgaccagggcactcacggccacctggccagcggtggtgctgcaaagcgccgccgttatcgacttggtcagcatggccttgaccttgggatcaagattgagaacctccatgtaaccgccgcgaatgccgcactcgcccagatagcccttcgaggtggacaggaaactgaccatttccagattacgataggggtcgcccatttcgtaggccaccttcttgaacgaccagaacttggagttcttgtcgtagacattgtcctggtacacctcatcggccagcaccagcaccttgttatcgtgtgcgaacttaatgatctcctcgatgttctcgcgggtcagtacctgtccggtgggattgcccggattgatcacgaccagggcacgcggattgcagaccttcttcgcctcatcgtaggaccgttgcagctccttcctgtccaggctccaaccggtctcctcctccagatagtaatccaccttggtcatgccgtattcggagatggtggccgagtacagtgggtactgcggaatgggcaccatgacaccaggcgccttgcatcccacctcggcgctgaaaaaagaaacgtaaaggtaagcttcaaatgtatttagaattccttagtaaatgctcagtagtatttcataaacaaagtgtttgaataatactactgagcaataaacaataataatatttatctatctggctgccacataagttgtcaacccaaaaaatggcacaattttgggccatatctctggcaaatctctggttttaactgataagtctcgacagaagaagcgccacatcatggacaataaaaatgttggccctggcgacatacttgatcatggagagaatgctcttgatgccgggagaggcaccgccggttagatagatgtcctgccaattggaggcgatgccgccatcccttttctcgatgtactgagcaacctggcgacgcaccacctccagaccggcggagtcggtgtacgagcccaccgattgaccctggcagccgttcaaaatggcacaggcgcgcttcttgacgtcctcgggataatcgggtgaatccagcagacgtgtctcgaaggtcagcgccaacagctgataagtaaaatatacaatacatttaatgaaatcatatcataaatgaaggggccaaaactcacctgtcgcaggaaggtcaagggctgctggcccatcgcatggcaatcaccgatgttggcacggatcacctggtcgaatggcttcttgacaccctgcaatcaaattcaatcggaacggaattacaaattagccatataaaataactcattgtttgctcgctggccaaatgaaagtgtaatcgctgcaggctggcggatcaaatgggcatttaatttgatttgtggctttcgccatgcaaattacactcaagtggattgccaagctaaattgaagaccagccagagtacagagtaatcgattaagtatcaaattcaatcaaatatttatcagtaatgagccattgtggattcagcaaatggtattctctttcaaatagacgcctgctagaaataactatcaaatgaccatcattatagttacttaacaatgtgaactagtttacattcagtagcaaatcaatggtgcaatctgttacgatctttataatccagcacactttggggaatcccaaattaaagtttctaaacgaattaaagtcattgtagacacaggcaaccagtagtttagtttcccgcacgaatagaggtcacaataatcggctgtggaaattgtcagctgaacaaaacacacaatttgcagggcacatgctagttgcactcgttcatggaagacaacatctcatcgtctcgggttccatttaaccacgctcaaatggccaatttaccacataatgtcacggaggttcgaggagctgcgatgatattgtgtgttttttttttttttttgagaggcgaaacaatgcaagttgcgccatgtaagcgaactgcagcgctgccattgacgtcactcggcagtggatgtgttttgcctgacaatgtgataattggaaaattaaggaattctgggctgtggaaaaatcatccagtgctcgagtttggttactaagagtataaaatcgtcaagttctcaccgtgcaaacgtgtgtcaccttatcgaattcagttaattatttattatttattttttttttttttaatttcgaaaattactgataaaagtgttgccgagtcgcggcaactgaactggcttgtgtttgtagttcgtgtggaaatatgtatagaaatgggtcctctatcgcatcgcaaatcgaacagtgctggtgaaaaaaaatgatatgccaaagtagtttcgaatatttcaaaaccacaaaaccgcagagatagtgttaagaaatcaattaatagcccatctaaactcagttagaaattgctagttaagtttttagcatcgttttggaaatggctactaattaactgaccagcgctgttcgcacctaaagaatattgcttgcatattcctttctacccttcacttcgcacttgaaatcgttgtaaacaaactttttgtgctaagtggcaatataattgataactacatatatatgcacaacatatatactcgtgcaggcaggtaagagtcgtataatcatataggcgctgtataaaaggcgttagcaactcaaacattatcgccaatacgaatcgaaggaaagtataataatatgttggcaaatgttaatgccaaaaggaagtcaaagtaaacagagggaaatgggcatgattaggaattagaaatgattattacacgggcacagaattgttaataatcctatatcgtagtgaacaggacgaagtgaagtacataaatgccagtgataagaatgcctgctgctgacagatgatgagtttcttttggaccattgccaaatccgtatgttgaatctgtgggcaagtggaggaatttgataaaacgcagaatgaacagcacagcagattcagtcgtgcggataaggaaatcaaatcgcagcgggaaaactggtgggggaaatcaactggcagcggcattaaaaacgcaaacacagaatgtgaaaagtcagcggggctcacaatggatttaactatatgtatatacatatgtatatctttaaatattcatcacatatttgtgtacatatgtacatatagtatcgttgcgggtcacaaaagttcgaagagaattttgcaaaacaaatgaaggaaaaaaaaaatggaaagcaagaagtgcagagagaaagcatcgtgtgtatacaacatgttttccccacagactcatgcgcatgttcggcctttgttatgatttttcactttcccagtgataagaaaaggtccacggaatcagaatccgaatcagaatcacgcccacgctcgcccacaatttccgcacttatgtaagccaagttgaaggtcgttcagtgaacccgcatcgcatcgcgtcgttcgctcttcatctaaatactttatttaattgatccaagaagcacaatttagaataattacaaacattaactggcaattaagagcatgactcgttatggaaaacggcgaagaaacgccgttttttttgttttttttttttagatgagaaaaccggttaatttgggccaactgcctgtggaaaaatcattcacatgccgagcagtacttaaattaattagtttattgacttgttgtttgctctaacccaaaaagtgtaatttccccttagcccaaagttcacttataaagatatatattccgttttagataagtctcgatatttttatagcggtctgattacaatttcaagtcttatctgaacttttggattacttctgatagctttattgttgcccaaaaattgtttgtgtttagttgaagtaaataaaattccgagctctatttttggcaaattttaatgggtttagttcaagtggttcaaacactactctaaattcttgatgtgtaataaaaaacaaacaattgttttgatcaactttgtgctctttggtaaacatttttcgctcaaaactgaaattaaacatatggcattttactttcgtaagctttttatgctcgtggaataagaaatgggtttggaaactggttttttttttattcgacaagcttattgtttttgcaaaaatgtgttttttgcaaaacaaaaccttatcgcattgaataaacaaaagctaaagttttctatgtttgtttgttgaaactttatacattcgatagattttttattggattgctagctgaattggtactcccctggctggttcttatcacacttccattcttatcaatccaaattacttcatttcgtgggcgtattttccaacaggtgtccttgagaaaggggtgaccacgattgccagccgaaggtgaatgattcagcgctgcgtggccgctccattcaagcgcgaataaaaaaatgaaaagggcggcaaaaaacaaacacagacgcgcctcacacttgatacatacatacatacataaacgtgcatgtgtatataagtagatatacatagagacatagcgtgcttagatattaaaatgcgggctttgaattgccattaaattgccattgaatagagggaagggtaggggggtgtgtgcaaaacactagttaatggcgtcgcactttgccgctttgtttgcccgattacttgtggatcaatttcccatggcattaactaacactcaccttttccagttccttctcgatttccccagcacgaatcaccagaggaccgcgaacggcatattccatggcaataaagttgggatttatgttatccagtgtgagcgctttcgacgacgacggcattttgtggctggttgaaaaggaactgagaaaaaaaaagaaggggatggatattcacttcagcaatcaacaatcacttcttgttcgatatataacgtgttttaaatgtgttttaaaatatattgtttttgttatgcggctttttcagcgaacgaaactaaccggcggacgtctaacggttgaatgaaatcgccgcttgttccatggcgctgcgacgtcgctgctgccgtcaccgttgctgttgccgttgatttcgccgcacgtcgattggcattgttgctgttgttgtgcaggaacgatttccagcggcgaataacgtactgttgctgctggcgctggtgctgctgcaatgcggccgaaactgtggcggcagcaggtttaattagcattcgactcattatttctgcaacgagaagagcgtctcagtaagtaaattactcaaaatacaaaaaaaaggaaagagacagaccgcgctttaatcgcaagaatttagcaccatgagaacagcggaaagaagaagaagcagcgaaatgaagggtgtgtgcgtgtataagagtccggctcacaattataagagcggcgaattgaaaggctcagctgttatcactacaccgaaagcaattagtttcgaagcagggaatcatttaaataactttgtagctaggaaaacttaagcaactatagatatttcgatgtgaaatatatatcatattatattaagcatttttatatggtattgttagcacgcgctcaatataatattcaagtacctaaatacattttcttcactgtgcatttttgtatcttatcaaagacaaggcgtggtatcatttactttttcagagcttatcaatgtgattgcttgtggttcgatactttattgcctttctgtttatcaagaagctaaagtgtaaatatttacgacctttggaaactttgcaattaaattcgccgtgcatttatcctagactcaaacccaattgcactcgccgcaaggcgcgcatttcaaaactgcaatcgagcatttcttatcagagttttggggctttgcacaagcaactgcaaagctgaaaaatatatattttatttgaggaggaatatatatttttggaaaatataaaaacggttaccggctgaataaaatgaatggccataaagcctaatctcaagaacatttattgcttgaccatccagaaaatttaattaaaaatgggaccgtttagaatctacttgtgtgtgctgctatatatttcactatatttcttatcttggtggaactttttttttagaggcagttaacggatttgtgggccatttacccaggcattatgtatacatatgtatgatttaatagctatatttctccattaaatccactggcagggcatccattggtgggggccactatcagttgagcgtacttttgactttgagccaaatcggcgcagcttatcagtgacgtcccattcgcagcttacgattccctgtctttcaattgaatatatgtatatagcttttctgatttctgcactttgaaacgccaattgcgtaatgcaaaaaatgagcaaacgaacaaagaatcttttagaaacatgacaatgaccaaagatcgacattacctccaaaatactatacttttcgcactcaaaaatcagcatcaatcagccgcagattgtttgctttctttttagcgacagcgaatttatttgtttttaaattaaaaatgtactaaatgccggtcccgaaaaatacacaaatgtatgctattttatatacgcacatatgtatctttggaatatatgaatgtatgtgtatatatataggtatattgtttagacgagacaaactgaaacttgttggcaataactttttggaaaaccggttgcggttttgatggcattgatatagacgaaagggttaagaattaggggaaaggggtaagaatttgggaatgagaaaacatcgatacagtgatctctgcttaattaagacaaattcaatacgatgccgatatatagatatagatagatataaaataatatatccaatagaatttttatatgataaccatctaaagcagctgtgcatagaacttttgcgtattaatttaagaaacattacctccaaatatttattttaaataaatttttcaaattttaacatttttttttttttgagacaacttttgttagtcactgtttatctgcgatatatatatatgcagcgtatcgcttttgtttgtgattgttttgacaacaaaactggcttatgcaacgaactgttaaaaaaaaatctgaaacagaaaattatgtgaactggctgcactttgcttcaaagaccccgctcccccctgcactttcaccccccgcattggggggattatcagacaaaccaactggataagatagtaacgataaggaatccaattagaacacggccattcggatttactaaaatcacaacttttgccaaacgttagtaaattatattaaattatattgtaactccgattgacacgtagagcgcaacgaacaacagcaacacaaaaagaagcagaaataacgggtaaagggggtgttttgatgtgctaattgggttgctaaacagctgttgacgccgcacaaattgagcacaaaaaaaaaaacaataacacggcacgcaattcaattagggaaacgcacgcagaacgataaacaaaatcagggtactattgtgtattagatttttttttgggcgcacaaatcactttcactgtcacttcctcgctgctcccaattagaatttctcggccactgtgtttatatatatgtacatatatgcacatgcatatatacatatatacgtcggcagttcaagagcaaaaaatcgatttttcgctgcactttttagtcgtttcaccttgatgggcgcaagtgggcgtggcgattatctaacggcgtttgttgtgatcccaagaacttgcataaacttattaataaacgcgatatgtctgtatataaaatacctaataaaaacgtgtgtgcttgcttggctgcgtgtgtgtgcgcgtacgtgtgtgtgtgtgtgcgaatatgtgcggcgtgcgagctccaatcagaatcgtatcaaaaattcaaagctctttggccgctagacgcaattaaggaactgacaacaagaactgaaaccgcaccgagatggaaaatgaagtgctggcagtatttaccgactatatgtttttcttgcgggcaaaagtcacgatgaagcgggcagcgattaagttttaaaaatatcacgtctgcagccctcgcagccaaactttcgatagacggcgatagatcgatagaccagcgatttgcaccaacactggaaagctcagagcattcaaaaacaaactaatgtgttttataaatagctctttttaaatatcgattaattgcgatcttaactaactttcgtttatttctattaattatgaacttacttctgtttttaaacatctttgctctttgcttgtttttcgtgtaaggctttaaattcacttaaacaattttgctggctttgtgcgcatcttcatatatcactgaaattgattgttataggagtgtcccattgaattagttttgtgtcgattcaatcctggcccgaaaatgtatgaacaagctatgccctacattttacccatagtctacttaggtttgtttatatagtattcttttcaagttcgttatgatagctcttagaaaataagatttctgtgaatatctcctccgtataaaagaatttttatcaatagtttggtaagcttttttttctcttctacaaaaccttttcgcatgttttatttcactcgaaacttattgctattcaaaaaaatgggttttctaacgctagaattatgtacagagtgcatttggaaaaaatgatgggtagtaagccctagaaagccatggctacgtgctgatgcccatgatggattcgatggagaaactcagcttgggcttcttgccactgccggtggaggcagtggtgactgcgggcgtggtcatcgctggatttgtgggcgggatcgttagcggtatcgtcggcggcatcgggtgataaatgtgctgctcctgatgaacgggtgcgcaggcggcggcggcggcggcaacggtggcaaagtacaaagcgttaccgcccagcgtcgcctccatgacatggttcagttccggatcggcgaatgcccgccgtttgcgcatgcgctccatcaatggcgagctgaacgtgggaaatcgctgtttgtattctgaaagagaacgaaccaaaaggaatggttgaaattagtgagggttttggtgggggcgttatcactacaaattgccgcgattcgttatgaatgggtattccaaattgaaacaatttattattgggtaatccgagacacgcgtcgcctgaccagacagcctggcaccgtttttttttttttgtttttttgtttcaacttcggaccggtttcgggatctccacttattcggatggaaccagatggaaaacccagaaagaagtcaattgctgttgccacatttggctctttttgtgagtcggatgggtttttccgtttttggtcgcgtctcagcttaccgaatgtgactc

SEQ ID NO: 1793 - DNA, 2052 bp, DROSOPHILA
gaatcgacacaaaactaattcaatgggacactcctataacaatcaatttcagtgatatatgaagatgcgcacaaagccagcaaaattgtttaagtgaatttaaagccttacacgaaaaacaagcaaagagcaaagatgtttaaaaacagaaaaataatgagtcgaatgctaattaaacctgctgccgccacagtttcggccgcattgcagcagcaccagcgccagcagcaacagtacgttattcgccgctggaaatcgttcctgcacaacaacagcaacaatgccaatcgacgtgcggcgaaatcaacggcaacagcaacggtgacggcagcagcgacgtcgcagcgccatggaacaagcggcgatttcattcaaccgttagacgtccgccgttccttttcaaccagccacaaaatgccgtcgtcgtcgaaagcgctcacactggataacataaatcccaactttattgccatggaatatgccgttcgcggtcctctggtgattcgtgctggggaaatcgagaaggaactggaaaagggtgtcaagaagccattcgaccaggtgatccgtgccaacatcggtgattgccatgcgatgggccagcagcccttgaccttcctgcgacagctgttggcgctgaccttcgagacacgtctgctggattcacccgattatcccgaggacgtcaagaagcgcgcctgtgccattttgaacggctgccagggtcaatcggtgggctcgtacaccgactccgccggtctggaggtggtgcgtcgccaggttgctcagtacatcgagaaaagggatggcggcatcgcctccaattggcaggacatctatctaaccggcggtgcctctcccggcatcaagagcattctctccatgatcaacgccgaggtgggatgcaaggcgcctggtgtcatggtgcccattccgcagtacccactgtactcggccaccatctccgaatacggcatgaccaaggtggattactatctggaggaggagaccggttggagcctggacaggaaggagctgcaacggtcctacgatgaggcgaagaaggtctgcaatccgcgtgccctggtcgtgatcaatccgggcaatcccaccggacaggtactgacccgcgagaacatcgaggagatcattaagttcgcacacgataacaaggtgctggtgctggccgatgaggtgtaccaggacaatgtctacgacaagaactccaagttctggtcgttcaagaaggtggcctacgaaatgggcgacccctatcgtaatctggaaatggtcagtttcctgtccacctcgaagggctatctgggcgagtgcggcattcgcggcggttacatggaggttctcaatcttgatcccaaggtcaaggccatgctgaccaagtcgataacggcggcgctttgcagcaccaccgctggccaggtggccgtgagtgccctggtcaatccaccgcagcccggagagccatcatacgatctgtacaagaaggagcgcgatggcattctggccgctctaaaagaacgggccgagctcgtccacaaggcactgaacagcttcgaaggctacaaggttaaccccgtacagggcgccatgtacgtctttccacagatcgagatcccgcccaaggcgatcgaggcggccaaggccaagggcatggcccccgatgttttctacgcatttgagctgctcgagacgagcggcatttgcattgttcctggcagtggatttggtcagaagcccggcacgtggcatttccgaagcacgatcctcccgcaaacggacaagctgaagctgatgatggagaagttccgtgtgttccacgccgagttcatgaagaagtacaagtagatcagctgccaacttccccgtcctcgatccctgtgttaagtgtcaatcctccggcttaggattaaaaatttaaattaccctaattgttttttttttttcctctttgttactgtgtcatagctgaatgcttctaagctcttctttatatgcatatatagatatatatgagaaatatataaaaacattttt

SEQ ID NO: 1794 - protein, 482 aa, DROSOPHILA; identical to SEQ ID NO: 1773

SEQ ID NO: 1795 - DNA, 2386 bp, DROSOPHILA
aatgtttgtgcggatccccatatgggcacgcatcatcggaaagaaacatctggcgcacttcgggaatgccaagttcaattgagcccctgacggccactgggtgaaatgcctccagtgcatttccaacattgctctgtaggttgcaattacgacctgcaattgattcgccctaatcgctgtaattacatctattaccgaatcaattaaacaaatgttctgcaagtgtggtgtttcgaaaatctttcccacacccaactagggaatcctataagttcaacgccagaatagaaggtatcaatccaaaatttcttcaactaaaaggaagtcaaaataatatatccttagggtcactagaaatcggatagaagttaattgataagcaaaactttgactttaatggataccttggaatgcagataataggtgcagatactttttctatacttatattttggtttcaatagattacgctatcgtaggtttggctgtgaaatttttttatgaatcatgaaaatggcaaatactatacagtgcgcatatcaaatatgtaggaaatgctgcatcccttcaaaaactattaataaaaacaggattatttataatacattgtcgttttatttgtgtaaataccataagcatcaaggtcaaaattatgaattcgtaaccaattatctcagcagatagatagctgttgtttttttttaattaaacaatatgttcttaaggagatttacttaaaatatatttgtgtgaaatatttcatttagctgcgccaatgagggttatttaattcagttttttggggatgatacatttgatctgtgtacaaaataactctaagaggaggtgaattatatatttaattgagcgtgtccgatacaatatggcatcatgttgctgctgggcacgcaaagtaattaattccaaagataatcagtggcagagtatcatgctcgcaaaggaacagcaaagtcttatccgattgtttttcgcactgcagttgccaaattgatgcccatcgacatggatataccaaaggaagcggagtcgaacgacaagttcatagtaaagtatcgccagcagtattacgatttgtccaggtttatgcacaagcatccgggaggcataaacacactcaaaggtctcaacagcggggacatgacagctcgcttcctaaaggcgccgccacattcggatgcggccatgtacttgatgagggagtacaaaatcgatccagaggactctcggaaaccaaagtcgagccaaagggaaacgttgcatcacgatgaagatgggactttgcgacaacggcccagggaaacggaggacaagaacaataaccaggtggacgatagtatggaggtaagttggatgagcggtttttaatctgtaactctagttgctggtcgactggatcgcacgttaagttggtcacaatgctatcggggcggggtaggtctgcgatccaaatctcagctaaaaaatatattattaacgtaaggcatggttgaaaggaacacgcgtgttttgcaaatccaagattccagtagctcgctcggtcagtcagtcgatggaatgctttaatgtttttgggagctatgtagcatgagttctcacaactgtcgcgacttgctggccagcacgaagacctttgccttggagtatatgcggatgtcctcctccacggtggtcagctccttgtcgatctccgccttgcggttgcgcaccctcaacgtctgtgcagtcatgggcatgtggttcagttcattaaccagctgttcgtagcctgttaagattcgttagcaagggtcaaacttatagtagtaacattaactcacgtttcttagcattagtgaggtgcgtcagtcggtcctgatcgctgagcaacacatggccacgcggacagtcgggatccagcgattccgcaagctgcttggccaccgccttctcgcgcttctgcttttccaggtaacgcggcaagcgcacctcatctcgggctgtcaaaaagtacaaattcatgactagttcaaatcaaatcaggagggaatataagatatttaaaatagagaataattatagattatatatgaaataattatcaaagatatttaattttgtcattactgtcgctgacaattggtaaacaagggataaactcacatcctagtttatgctcacgacgctttgacttagagcttatggtggtgacattggaggccgttgtgaaacgactacgggcactgagtggagcctcgtcgtctgaggcgccgtagtttgcaggttcggcctcggtcatgggcatagcctccatttcggacatgttgaagcgactctgcttcgaggagttcgaacgcgccgaaagcggcaactgttccaaatcttcctc

SEQ ID NO: 1796 - DNA, 386 bp, DROSOPHILA
ttgccaaattgatgcccatcgacatggatataccaaaggaagcggagtcgaacgacaagttcatagtaaagtatcgccagcagtattacgatttgtccaggtttatgcacaagcatccgggaggcataaacacactcaaaggtctcaacagcggggacatgacagctcgcttcctaaaggcgccgccacattcggatgcggccatgtacttgatgagggagtacaaaatcgatccagaggactctcggaaaccaaagtcgagccaaagggaaacgttgcatcacgatgaagatgggactttgcgacaacggcccagggaaacggaggacaagaacaataaccaggtggacgatagtatggaggtaagttggatgagcggtttttaa

SEQ ID NO: 1797 - protein, 124 aa, DROSOPHILA
MPIDMDIPKEAESNDKFIVKYRQQYYDLSRFMHKHPGGINTLKGLNSGDMTARFLKAPPHSDAAMYLMREYKIDPEDSRKPKSSQRETLHHDEDGTLRQRPRETEDKNNNQVDDSMEVSWMSGF

SEQ ID NO: 1798 - DNA, 2633 bp, DROSOPHILA
cgcccaatgccacacgaacctgaccaaccgcagtcaattgatcagtacccgattcacaggcgcaacaggtgagtccaacaagtgctacagacacattatgattatgcaataataatccaatcgaatgcccacaggacgcgcctatctgtttaagcgtgtggtcaacctgaccttcagcaacatccaggaacgggtcatgctcacgggtcgccacatggtgcgcgacgttatgtgcaagaattgtggagccaaacttggctggatgtacgagttcgccaccgaagagtcacaaaagtgggtaaacgcggataggcagcttgtcactagggattctgggttatacaagtagttagtagttactaacttcatgtggaagaaatatcctttgaatgaactttctgcgactgccaccacacaagacatcttactaatgctccaatttatctcttagatacaaggagggtcgcgttatcctggagtacgccctgatcacagaggcagagggctttccgtcggaggccgccaccacgagtcattgagccgattgaatatacagccggaaaacgggaaccacgcattggcgaaccttgtgtagccctaagtattgagtagatggccacaggcgatggcctctatgcattagacctagattagagatcgccgtagtcggctccggtgttcgggataccgaagaccgatatatcggttgcacatccgccacggagcacatgcgactacggccctgtcttaacgtgacttaaacgtaattgtaggcacatctagcacgtaagcagctgcggcgcccaattctaccatttaaatgtcatgaggctgaagtgctaaaacgaaaaagatgggctgctactcagctggaacatattcgaaactgatgatccacacttgtctttttcaaacaagatctctaggccgtaatcaatcagcaataaagtaccacaataatcgaatagtagataataatcgtcgggattccgtcaacgcgtttctttactcagctattttgacaaatgcaggaaaatgcatcatctcagttgtctaaactagttaagattgtttgtaacagctataacacctaaagtttgccagtcttttgagccatggccagtgcgttctcgtgggcaataacctggaactcctggaaacgctgcgagacgcgttggttcatcttcagatacttttccatgcagttcagcgagcacttctcctgtgaaatggatgggcatattgaaatcgctgatttccacatggagcttccccacgggcactcacctcggaatccttaacatcccgcgttgtaaagtcgcgtatgcaatctgtgaagcacgtctcggacagtttgttgtaggacattaggaagtcggaaaactgaaagttagaaccgaaaacatatcaaatgaaaaccacattgcatcacttggcaccgccggtccttggcatgagatggtatcttcgtgtcaactctgcttaccgtcttaatttgatccttgtccaactgatcgatggctatgttttccggtgtcttagccattttgttctgcgatattttattcaaaattgccgaaacgaaaaagggccaataataatgtgcctatataatagggacagctgggtgtgcagggttgccagatgttaaaaagccattccgtgttctcgacttatcgatatgttatcttttgaagtatgttatgtgaagtatctggttcggccgactcaaaaattaaccacatctagttttactcttaacatcgggtatatgaaattaagcaaatgtatccatacataaattaaggtatatttataataatactttaactaagtacccttaggttgtgaaacatttaatttaaactattaaatagaataaaatgatatttcaaagatcgatattcctataaaatatcgatagtcgcatatcttatggtcagcgctttacggtactgcacctcgttcacttttcaacactggagggcacgccatctttttttcctcacaaacacttttttctgctcctgctttgtgggtgtgctctttgaaaaaccaaggagaattccctcggaatagcatcaaaacaaactggaaaattgactttggacaagtccagtggtacaacaaataccaaaaatccattacagaaccggaggagcagcacctccagccacatacatattcatacataatgccacgctaccgtgaatgggatttagcctgcaaagtttacgtgggcaatctgggatcctcggcctccaaatacgagatcgagaacgcctttagcaaatacggacccttgcgcaacgtctgggtggcccgcaatccgcccggtttcgccttcgtcgagttcgaggatcgtcgcgacgctgaggatgcgacccgtggcctcgacggcacccgctgctgtggcacccgcatccgtgtcgaaatgtcatcaggccgttcacgagagggtcgcggcggtggcggtggaggcggcggtggtggaggcggatccggtggcggcggccgcggcggtggcagtggcgcccgtgctggaggcggtggaagggctggcgatggcggtggacgctataggtgagtacggcacaaaagcattacattttgcatccccagaataaaccaga

SEQ ID NO: 1799 - DNA, 465 bp, DROSOPHILA
gcacacccagctgtccctattatataggcacattattattggccctttttcgtttcggcaattttgaataaaatatcgcagaacaaaatggctaagacaccggaaaacatagccatcgatcagttggacaaggatcaaattaagacgttttccgacttcctaatgtcctacaacaaactgtccgagacgtgcttcacagattgcatacgcgactttacaacgcgggatgttaaggattccgaggagaagtgctcgctgaactgcatggaaaagtatctgaagatgaaccaacgcgtctcgcagcgtttccaggagttccaggttattgcccacgagaacgcactggccatggctcaaaagactggcaaactttaggtgttatagctgttacaaacaatcttaactagtttagacaactgagatgatgcattttcctgcatttgtcaaaatagctgagtaaagaaa

SEQ ID NO: 1800 - protein, 95 aa, DROSOPHILA
MAKTPENIAIDQLDKDQIKTFSDFLMSYNKLSETCFTDCIRDFTTRDVKDSEEKCSLNCMEKYLKMNQRVSQRFQEFQVIAHENALAMAQKTGKL

SEQ ID NO: 1801 - DNA, 8789 bp, DROSOPHILA
ttttccgagacagcaaggcagaaacacacaatttatataatttctttatcagatctgctggttgatgttaattgtatgaaaaattgtatatttccctcgaatcggatgtagtgcgtcgggtggagatggataaaatcggggaaaagtgcgacgagtgcagttcgctgtgctttcgatgattgcgcgtcaatatttaattgcattatgtgacggacaaattcgagacagcctccgctttctttgtggcgcaacttttactgagtggtggcggtgttactagtagagtggttgcataaacgctgcatcaaacgcggttgccttgactaagctgcccccacaatcagtgacctcattccgcactccccgtttttcaactcttttttaactctgccttcgattgttatcgcgcacctaattaggcgtgcgttgtagttcttacaactttggtcattagaaagctgagctgcaaggttcttggggggttctccccccaggaaaatcacggagcagctctctgggacccttctcagaatgatccatgcacctgctgctcttttatggcctgttgtggcacttcaatttggcattattcagtgcaattcaatgccgttgctgcgtgtcaggtaatcgcattagaaaatcatttgcctcgactgttataattgcattttattacttccgacaagaacgagaaacccaagagcagcggacccttggcgtgaaaagctgcagctgtggcttgaaagaaagttgtagccagtaaagagcgctcttcgcagaagagagctggcaaagagcggctgtttgtccattagctttccgtcttctaccggtttttctttttggccacaagagagttagtcgccgctgcctctgccggcgtcgcttgggccttcgatggttggcttcccagcttgaaaacgttttccgcggccttcgcagtgagcattcagtgtcaaggtgctcgaactggcggtcgctagcgctccagtgatagaagctaacaaactcgatccgattcgatcttgcccagcatctgagatctggaattccccgaagagtttcgcataagaacgtttagccaaatcacacaagacgcagttgggcgctccactttcgacagtgaggacgtcgctcgagcggtgcgcgttgtttcggttcatctaaaataagaagacataaatcaaacagcatttgttttcgagaaacaaattgaccgtgtgttttgtgcgcgtcctgtcatctgcagtgaagttccaaaaaggttttaataccttaccaagtactccagtgataaaggtaaaattgaaaacgcgttgaaatcaattgacatttaatgcctgacaaggtgtcaattgtcgagcgaacaggatgtccacatgtctatcaattaaatgaaaatggtcaatggatcattagagaaagcttgggggaatgtcaacacaaagagcatcgaggagatgtcacattagtttccaagttgcccagtttccagcgttaagataagtcctaggagctggagctggcatttgtgccatgccggaaacacggcgtacagtacccgtcaactcccaaatgtgcagaattctgcaggcaattaactttcggcctggtcaagacatcttgctcctttgtcgatccactatccactgggaatcctgctggtgtccagtgatttgggtcagccaacggttcgttgtgaccatttaatggcaattagctcgggctacgacgagtaaagacttgaatttcaaaagatcgtaagactttcgatgcccatgatagaatccaagaatcaaaatgacaaatctctgcacaacgtgctccacaattcactgcaccattagaaaatgaccctggccaaacggtgaccgaactcattaatattccagacaagtattactatcagaaatgcgttcaacagttaaagcgactgtgtttcgtgagctcggagatcatgtttatggatttgggtgcatagattagggttccaatggctttcgaattggtgcggttgatttgccgttatgttcgaggcatgaaatgaaaagttttgtccagtttttccaatgcttcttgctttttgatacaacaccacagccaagggaaactagttttgtgactcttttgatagttgagaaatttcactggccattaattgaagatttgtcgctaactttgagaaatttctgctagccacaaaaaaagaatttctatataaataactcggggtgacccacatccacatccaagcggagccaactccttctgccgatggccagcgggtgcagttttcaaattgccagccatgaaatgaagatagcagccagcagccagaatccagctgccgggccaagaagtagttgccaagtggctttcctggccaacttgcttggctccagctccatctgcggcgacctgcgcacattgcttactatacagttacactgagcagcgcttcaattgagataagctcgaatggcagttatgtcattccctggcacacttttccgaccaatcactcgccattctaattaagtagcaactagtttttggcgtattggtgtcataaaggtgctttatcggcaccttgacagcaggaaaacagcgggattagcccgaatttcgaaccagatccgaacagcagaggtctcactcagaagcgcccgatcgctcactcacttactccaacacactccataaaacgtggccaaaacaaactgtcaaatttggctgtaaatatgtgtgctaaacgaaaaactagttgctaagctggctgataaatggtcggacgtcccgatgcgagcatgcatacatataaatctccattcgatcgatccgcagcaggagcaactcggctgccaaatggcaatttatttctatgtccgtgagtttgcaactgttggatccgaggatctgtggatctgtggatctgcgtattagtttattggcccactaaggcaactgacccacaactttaaattgtgatttgagtgggccagtagctaagtagttgactagctgacagtggcttttctccagctgggaaaaaaccgggtgattagaatgtttccccccctcttatttattttatagaattccaaatccctgcgaggggcacgcgactcgctctgctgagcagtccgtgtcattgaccagcagccatggaaattgatttgcagccagacaattgcataatagttgattataaggcactcacgaagccgggactgcagtcgaattcgattagtgcggaaatcaagtcaagagcaagtagatagatacgaaaggccggctctctgtgatttaacgcatattacacgtaatgcattttccatgcagctggggctggaaaagaaccgcaaaagccactaacgatccaacataaagcattcaacagttgtgttctcctccatatcgatcgcattgcgatcggaggggcccaatcagaattccagctgaccatttcagttaacagctagtgcttcttggcttaaggtccaggtgcttttcttggatttcttggcattttcgtttttcgtcttttgttactttgtgcctggcttcctgtgcgtgcgcctggctaagtggcattattttaattcctctggccgtgcgtgtgagcagcgtttagatcagaagtgctgccgtttctaagggtcggggagcatcaaccaaattgattttgcatctatccaaaggcaattaatcagtgccttcgtgctggtgggcgttgccactgcaattgcagttgcactgctggatagcccgtattaaacccattattaaagcttaactgtaactgccggcgcaattaatcacgagataagcatgagagtgggaagacactgaaatgctaattaaaaaccaagctaccaaaacgttcattttttcttgccatttccccctccagaatacggaatacgtatacatagtctgaaatgcatctgcggtcaatgacaaagaaacgaggagtcagcatgatggcgctgctgggcttaatgctgcttttggtggacacctcggtggcggcacgcaagttgcccaagcggccggcggtgaaaccgttgaagacatttccgcgcaacaatgccacaccgattccgccaacgggagcgggatcgggagttgcgacgccgaacggaagcgagctaccaaaaccgttgagcgttgagccagcggaagcgattgccgcatcgccacctggttctataggtgattcttctggtgcttctgccgccgccccggtgccacctgccgctgcatctgctgctgctgttgcggagaccaaggccgatgatctggaccccactcccatggcaacaccttctgggagctcttcggtcgacgaggactgcgagccggatatgattggctttgagctcataacagggtaagtgtcaccgccatggagcataaatcttaattgcgggcaattagttgtctatggcccatggacccaatcaccgaaacaatcacacacacaacacgactgttttgtgcagcggggagcataaattatacccacgactgcctgttaacacatcgtaaaggtggtttcccccatttataatgccgccaaaccacccacttgggctggccccccaaaaacccagagaccccagaatttatgtgcgttactcttcgtttaatccaccatcacaggtacgtgctatcggcgccatcgaagcaattggaaacgctgcccggcaccctcatgctgaccgactgcctggaggcctgccaggccaatgaatcttgcagcgcggttaattacgagacgggcctgtgtgtcatgttccgcagcactgccgatcagttgccaggtgagtctgcgacggacaaaaaaaaaaagcaggactaagaatctaaaatggcagcatctaagcaaacatcttaaatacagtgtgcaattgagtgtgagaacctaattgtcactatatttgatgcagctctttgtcagctttgtttgcttgctaatctaagaaattttcagtattatttgcctatgaacttcagttagttagttgtagttagttagtttcttcatgtgtagctgctggttaaagagcacccagctcagcactcgatcgcccaatcacgatctttggcccgcagcttgtatgttaaatgtttcccgctaatcacatgaatgccgcccccatctggccattcctccccgcattctcgcaggttcactttcccgctcccagtatcccgtgttcaccgtttacgcgcagaaatcctgcttcggagtgcgtccctgttcgaaggcctggtgcatcgatcgcgtccagggctaccgactccctgagcgggccaaggccagccagagtgtggccacgcggcgcgactgcatcgagctgtgtctgggcgaaacggagttcacctgccggtaagtgctgctataccgttacaacagagccaccctcttgaactgaaacacccaccccgcctcctttgggtacacacctcttcattcctcctcaatgcacttcacactccacactgagcactaaacactaaacactatccaatgcacacgaacaaagagtgtacatcttatgctcgttagaagaaataaataatattcatctaataccagttgtatccattcaaaaaggaagtatattagattttaatttaatttgaatcccatttctctctcatttttttccgtgcacctgatccacctgaagatcggccaactactatgcgcactctggcctgtgcgagctctcggacatggatcgcattacgctgtcggacgaggcaaacatcgcggcctacgatggcgccgactatctggagaacaactgcgccgaggagcccagcaagctgtgcgagttcaagcgcgtagcgggtcgcattctaaagacggtggactcggtgcaccagaatgttcagacgctggacgagtgccgcgacctctgcctgacggcaccgttccggtgtcattcgtacgactacaacgaaaccggcgagctggtgtgccgcctgtcccaccacagccgggccacgctgacggatctctcggagccctacctctccatcgaggaggccgccacttacgagcagtccgcctgctacaatgtctccatcgattgccgctccggtgagatgataaccaagatcaggacctccaagctgttcgatggcaaggtgtacgccaagggagcacccaaatcttgtgctgtgaatgtaaacaactcattggagttcgacctcaagatgcggtacaacgacctggaatgcaatgtgcgtcaaagcgcgtatggcaggtatatgaacgacattgtaatccagcaccacgatatgattgtcacctcgtccgatcttgggctggccgtatcctgccagtatgatttgaccaacaagacggtggttaacaatgtggatcttggtgtgactggggagattgagtctacgctcagtgaggaaatcatcgtcgattcaccgaacgtcatcatgaagatcaccgcacgtgatggcagcgacatgaagaggatcgccgaggttggcgatccgctggctctgcgattcgagatcgtcgacgccaacagcccgtacgagatctttgtgagggaactggtggccatggacgggacggacagcgccgaaatcacactgatcgacgccaacggctgtcccacggaccagtacataatgagtgccatgcaaaagctggccaacaatcgcaaggtgctgctctcacagttcgacgccttcaagttcccctcctcggagctggtgcagttccgcgccctggtcacgccctgcataccgcgctgcgaaccggttatctgcgacaacgatgagaacggcgagctcaagtcgctgctgtcctacggtcgtcgcaagcgatcggtgctcaacggcactgatggcggtaagtaaacggttcttctcggccagctttataaccagggatggccaacccagccaccaagtgacccatgtttagggggcgagttggtggatggtggtcacaagtacaacacaccatgtgacagttgccattaactccgactgacgcggaaatctttacagttctgtggagaggagcttgcataattgtccaaaaggagatttgatacttgggtttttcttttacttattcttttttttttttgtaatcatggaaagtaaatatcacttaatttactacaaagtagtaagccagtaaagaagtttagtggtaaattttagataccaagaattttaaatttacagaagtgatcataaaactcggccagtacaatttgaatgtcatttcatatagactctcgggactcatgcaccttcctcactgtggcaccttggcacaccatccctggttagatggcccaacacaacagctcccagaaaacatatttcatttcttgtttgcgtctttctctccgcttttctttgctcgcctgcaatttttgtgtttttgtgattttctgctcgatggatgcgctgctaccttttcacagttgagctggccattaagtcggaacgccaaaaacgtgatgtgagtcatcaggcggccggcgatgagaacattctgctggtgcaatcgatacaaatcaccgataagttcgccttcaatggcgccgatgcaccgggaggcagcggatcggaggccggtggtctggatggcctggccaaattgcaactggatctgggcaccaaatcggacacttgcataaacggctatggtgagttgggatcactggggtccagtccaatgtgtagcacggtggcaagtcgctccaagtcggcggcatctatttggtatcgctgagcgtggcgaattgatttgcgctaatcgcgtgccgtcgcgccatctagccgctggaaaaaaactgccgacttgccgactgagtgcccagctaattaaataagctcgtaaattttcttcaactctttttacaactctatccaggcttcataattgccggggctctgttcctgctgctccagctgacggtcattgcagtctgggacaatatgcagaagcgagcgttacacaagcggtaagaacgtcaacgccagtgaatggccttttaacaagccagttggagacggagatggagatgcagatgcagacggagctccgaatgcagaccgaagatagaagtgcagacggagacagagctgcaggtggagaggcagaaactagcatgaaattctacttagctcaaaacttagcaccgctcataatctagttagtagatgtacgatcaagacatggagaatggacgcccttccccggactttccgccatagagctggactcctctgtgaagggatccccttagaaacgaaacgtagcttaatatttatacctacacctaactatattgcctatgtaagtgtgcgcacttaggcgccccctctataagacttacttactaagactactctggacacgtcgacataaatactttcagcttaagactcggaactcggaaagtaaagctccttagttgtagtgcgaatcattcaaacctctcaagcgagcttcgaactgacaatcattgctcgtttaagaggtttgactgtctaataatacctaaacacttaacttaacttaacttaacttaatgcttatatatgctaggcccaatcgatcacagacacagatacacaaaaaattgtaacaagaggcaaaacttcagatgctataaaaggtaaataaacgtattagaaagatactcgtttgcgtttgcattacttttattttctttcgatcgagctttgtttggcctacgttagcggaaaacaaaatttgcccgtcactg

SEQ ID NO: 1802 - DNA, 2643 bp, DROSOPHILA
ctaacaaactcgatccgattcgatcttgcccagcatctgagatctggaattccccgaagagtttcgcataagaacgtttagccaaatcacacaagacgcagttgggcgctccactttcgacagtgaggacgtcgctcgagcggtgcgcgttgtttcggttcatctaaaataagaagacataaatcaaacagcatttgttttcgagaaacaaattgaccgtgtgttttgtgcgcgtcctgtcatctgcagtgaagttccaaaaaggttttaataccttaccaagtactccagtgataaagaatacggaatacgtatacatagtctgaaatgcatctgcggtcaatgacaaagaaacgaggagtcagcatgatggcgctgctgggcttaatgctgcttttggtggacacctcggtggcggcacgcaagttgcccaagcggccggcggtgaaaccgttgaagacatttccgcgcaacaatgccacaccgattccgccaacgggagcgggatcgggagttgcgacgccgaacggaagcgagctaccaaaaccgttgagcgttgagccagcggaagcgattgccgcatcgccacctggttctataggtgattcttctggtgcttctgccgccgccccggtgccacctgccgctgcatctgctgctgctgttgcggagaccaaggccgatgatctggaccccactcccatggcaacaccttctgggagctcttcggtcgacgaggactgcgagccggatatgattggctttgagctcataacagggtacgtgctatcggcgccatcgaagcaattggaaacgctgcccggcaccctcatgctgaccgactgcctggaggcctgccaggccaatgaatcttgcagcgcggttaattacgagacgggcctgtgtgtcatgttccgcagcactgccgatcagttgccaggttcactttcccgctcccagtatcccgtgttcaccgtttacgcgcagaaatcctgcttcggagtgcgtccctgttcgaaggcctggtgcatcgatcgcgtccagggctaccgactccctgagcgggccaaggccagccagagtgtggccacgcggcgcgactgcatcgagctgtgtctgggcgaaacggagttcacctgccgatcggccaactactatgcgcactctggcctgtgcgagctctcggacatggatcgcattacgctgtcggacgaggcaaacatcgcggcctacgatggcgccgactatctggagaacaactgcgccgaggagcccagcaagctgtgcgagttcaagcgcgtagcgggtcgcattctaaagacggtggactcggtgcaccagaatgttcagacgctggacgagtgccgcgacctctgcctgacggcaccgttccggtgtcattcgtacgactacaacgaaaccggcgagctggtgtgccgcctgtcccaccacagccgggccacgctgacggatctctcggagccctacctctccatcgaggaggccgccacttacgagcagtccgcctgctacaatgtctccatcgattgccgctccggtgagatgataaccaagatcaggacctccaagctgttcgatggcaaggtgtacgccaagggagcacccaaatcttgtgctgtgaatgtaaacaactcattggagttcgacctcaagatgcggtacaacgacctggaatgcaatgtgcgtcaaagcgcgtatggcaggtatatgaacgacattgtaatccagcaccacgatatgattgtcacctcgtccgatcttgggctggccgtatcctgccagtatgatttgaccaacaagacggtggttaacaatgtggatcttggtgtgactggggagattgagtctacgctcagtgaggaaatcatcgtcgattcaccgaacgtcatcatgaagatcaccgcacgtgatggcagcgacatgaagaggatcgccgaggttggcgatccgctggctctgcgattcgagatcgtcgacgccaacagcccgtacgagatctttgtgagggaactggtggccatggacgggacggacagcgccgaaatcacactgatcgacgccaacggctgtcccacggaccagtacataatgagtgccatgcaaaagctggccaacaatcgcaaggtgctgctctcacagttcgacgccttcaagttcccctcctcggagctggtgcagttccgcgccctggtcacgccctgcataccgcgctgcgaaccggttatctgcgacaacgatgagaacggcgagctcaagtcgctgctgtcctacggtcgtcgcaagcgatcggtgctcaacggcactgatggcgttgagctggccattaagtcggaacgccaaaaacgtgatgtgagtcatcaggcggccggcgatgagaacattctgctggtgcaatcgatacaaatcaccgataagttcgccttcaatggcgccgatgcaccgggaggcagcggatcggaggccggtggtctggatggcctggccaaattgcaactggatctgggcaccaaatcggacacttgcataaacggctatggtgagttgggatcactggggtccagtccaatgtgtagcacggtggcaagtcgctccaagtcggcggcatctatttggtatcgctga

SEQ ID NO: 1803 - protein, 758 aa, DROSOPHILA
MMALLGLMLLLVDTSVAARKLPKRPAVKPLKTFPRNNATPIPPTGAGSGVATPNGSELPKPLSVEPAEAIAASPPGSIGDSSGASAAAPVPPAAASAAAVAETKADDLDPTPMATPSGSSSVDEDCEPDMIGFELITGYVLSAPSKQLETLPGTLMLTDCLEACQANESCSAVNYETGLCVMFRSTADQLPGSLSRSQYPVFTVYAQKSCFGVRPCSKAWCIDRVQGYRLPERAKASQSVATRRDCIELCLGETEFTCRSANYYAHSGLCELSDMDRITLSDEANIAAYDGADYLENNCAEEPSKLCEFKRVAGRILKTVDSVHQNVQTLDECRDLCLTAPFRCHSYDYNETGELVCRLSHHSRATLTDLSEPYLSIEEAATYEQSACYNVSIDCRSGEMITKIRTSKLFDGKVYAKGAPKSCAVNVNNSLEFDLKMRYNDLECNVRQSAYGRYMNDIVIQHHDMIVTSSDLGLAVSCQYDLTNKTVVNNVDLGVTGEIESTLSEEIIVDSPNVIMKITARDGSDMKRIAEVGDPLALRFEIVDANSPYEIFVRELVAMDGTDSAEITLIDANGCPTDQYIMSAMQKLANNRKVLLSQFDAFKFPSSELVQFRALVTPCIPRCEPVICDNDENGELKSLLSYGRRKRSVLNGTDGVELAIKSERQKRDVSHQAAGDENILLVQSIQITDKFAFNGADAPGGSGSEAGGLDGLAKLQLDLGTKSDTCINGYGELGSLGSSPMCSTVASRSKSAASIWYR

SEQ ID NO: 1804 - DNA, 7049 bp, DROSOPHILA
atgcggtcggcgttttcgctcgccgtattttgtctttgttcgccgcgccgctgacgctttgcgttcactggtcgccgttgcccggtcactgggtccccaattcactcatcgcgatcgctttcgttgtattaaacgcgccgcaattgatcgaaaaacatttaattattgtgaaatgcgccttggctttgttgtttttgtcacgcttacaattctcgagtcgccattttgagaacagtgttagaagacgcgcacgagtggcagtcccgctaagagtgatgctcgccaggcgggttattagctatatttaattcacgactggattcaccattctaaataacatttaaagagatttcttgactcaaaaagaaatcttgtccgacaaggaaacattttacttaccaattccatttacatgtttgtatttacttgatataattcacgattatgttgtatagaaactataacaattttttgggcttttaaaatcctatgcattgaacattcaaaccctaaatattaaaggaagtaggcccaatgattgtgttatttgtttatgttttttatgttaacttaataacccactaatttataatatgtgtaacattaaacaaattttatcttctttcattaagaattatttatggtgatatttaaagtcctcttaccataaaatatttaaattatatttctagctggaacatgtaatttctgctagaatttgtatgttgagataggttctgcatgcgcacgccaaaaaatgaactagttcgccgaactggaaaaacactgagcacttaggctattttcgttattaaattatattttttgatagattgtatataattcattcatcaatgctaaaaaatgataaatatcgaaattcgaaaaacctctgaaaaatattcaaaatatagctatgagtcagtcgtcagtcttgaccaaacaaagagatatcgatattggcgggacatgtatatcgataccacgttgcaatgttaatatggcgtcagagggcgaaaacgttgttatggaaagtccaggtaaattgatgaaaaattacaaatacgtgcattccttcgaccggacctagtgaccgttgattaaaaattcagtccttactagcccatttcggtagctgacactgacagttagctggagcagcccattaaagcatttggaaaaaagtgaacatcacgaggcagcgaacaacccacaacaccgcgcgtacagtttatgtaaaccgcatggattaaccaagaaagttaattgacgttttccaggtcgccgcacacgttctggtcggaaggccgcatccccggctgcatcgctgccaaccagaagcacccggcgcacatccaagcggaacgtacaggtcagttcatcccacgtagttaccgcctcttccagatcatcagccaatgatgtaaacgattgcaatttccagtgtgggtgtggcgttgttccatccgcacatgattcttctccctggaggagcgagtgattacctgcaagggccaactgaaggcacagcatccacaaatgctctgagaaatgccgggaaccttcattaacgacttttaatcctttcagctaagtgaccacgaagaggaggccgaagagcaagtggtcatggttcaggaagaggaggagccctttagagggacaaacactgcggaggcacctgctttggagccccaattcgaggagactcagcaccagatagaggatgacgtggaaatgctgccagccgaagctgctggggttgatgaaaagagctcttccttcccgtttggcacggtggcggagctgcattcagagactagtgatgatattaaagagacacgcggtcaggctggcgtggacaccctactggcttctttagccggcgataatgccaacagcctgccctccgtgggtggaaatgacgagagtgacaatgtcaagaaggcggactttgagtacaatgtagactccctgcagccgcagatggagaaaatgaattcctctgaggactccagctcacaacatgccattgccgaggatctggccgatgcggacaccagcaatgcaaccattgtcaacacagagatagtctccgaggatgagctacctctgcccagcaagcctgaaataaatgatgccgaggaagtttccgatgaagagcttccagcaccgcagcgggctgaattgccagaggatgctgaagtaatctcggaggatgaactgcccgccagtaataacaataacaccgccactgagcccaaggcacctttgaagcgcaaggcggaaaacgaaagcgttaagagcaccgaagataaggatgcaagcagtcatgaatcaagcacaaaggataaatcctccgagcaatataatccgggcagtcccacatctgagagcaacgacgcacagccctcagagaaaaaactcaaggtcgaaggtaattgttaatcttccaatgactaattagttggtagagcttgactcacaatatttaaacccacagaatcggagcccaaggagaaaaagaaggaaaaggagcgcgataaagataaggagaaggataaggacaaagataataataaggataaggaaaaggagcgaaagaagctgccggacctagataagtactggagagctgtcaaagaagactccaccgacttcaccggctggacgtacttgctgcaatatgttgacaatgaggtggttatttagccgaacgccgcatatcttgaactttaaataagcaattttcttctttctcaacagtctgatgcggaggcggcgcgcgaggcctacgacacattcctgtcccactatccttactgctacggatattggcgcaagtatgccgactacgagaagcgcaagggcatcaaggcaaactgctataaggtgagtaccccacttacatttggtcgtgcaaataaatatctttcgcaatttcttgtactacgcttacaattacgattacaattgatattcatatatttgttgttaaatgcaatttattatgacctaataaaaatactacattcaataaatgcaacatctaccaaaatacaccaaattgagaagacaaaaccaaacttgccatgagactagtgcagcatccacttaggatcgtgttttctcatagggttcgtgtctgctaaatactttttacgggagatgaatctaaaaagggtacggatttaatttttttagatggtgaaagctttatgggggagcttggcaatttgtttcaaaggctaagctaagtaaatggacttaatgggtcgcgtatagagattgcctccaaatttgtttacgtttctttaaagtagtttctgttttgtaaccttagttacaccaaattcataatttcgagaccggacgtcgaccttatttaccactccgtactccctacaccttagcactttttttttggcgatcttagcccctgagatattgtccttaatcttcacgacactaattggaccgtttaagcataagccactcctgtgtcgcacaaatcacgctgtaactcagcacagactagctcaactctgttgaccctcgaaccccagaccgacctgaacccgaaagcgactggttcgtctactcgaagtacgatccgtctactttctgatcttcgtacgtttgtatcaccagttacctcttcagttacgttacctccatccttcttcaacacgatataaatagtgagatcgcatctcgtacagtcgtaagtacaaatggcgtttaaatgaaatttttaagtctctttgtgaattttgttgtaaatcgagtgccaaaaaagaaatcaactacaacctgtgtgttatgtattccgtgtacttgttaagtcgctaagttagcttttaagcccgaacaccattcacatcaaaacgataaccttaagtatctgagcacttaactcttgaaatcttactataaaccacgaatatatttttatatttctcttctgcgatcaatcaacaataaatgaaaaaatcaaaacttgtaccgaacatacgaaatgaccaaatcctaggtgtttgagcgcggactggaggcgattccgctgtccgtggatctgtggatccactacctaatgcacgttaagtccaatcacggagatgatgaaacattcgtccgctcccagtatgaaagggcagtgaaggcgtgcggcctggaatttcgatcggacaaactctgggatgcctacattcgttgggagaacgagtcaaagcggtaccaccgtgtggtccagatctacgatagacttctggccataccgacacagggctataatggtcacttcgacaagtgagttccactcaaattggttttgtgaaacatgcgaataatgtacatgcacatttcagtttccaagatttgatcaatcagcatgatgtaactatcacacttgcaaacgaggaggtgatccgtctgcgcaaagacttccacgaacgtcagcagagcaagtcctccaagtcctcgtcgaagcatcgccgggacagcagcagcagctccaaggacaaagactcaaaggagcgagaacgtgagaaggacaaggataaggacaaagacaaggacaaggagaagcgagaaactgtcgggggcggtgttggtaagtcgccaaaagatacaagtgaaactcaagtcgatgaatcagatagtactaccgatctgaccaccgaaagcgagtcatcgcatgcagcttcaaagccggcaatgcagatcgatttcagtgatcttagcactctgaatgacgaagaggtggtcagcattagggacagggctatctcggcgcggcgcaaagtccacaagttgaccgttagcgcagtgacagcccgctggtccttcgaggagggcatcaagcggccttatttccatgtgaagccactcgagagggcacagctcaagaattggaaggactacttggatttcgagatcgaaaagggtgatcgcgagcgagtcctggttttgttcgaaaggtgcctaatcgcctgtgctttgtatgacgagttctggctgaagatgcttcgttatttagagtctttggaggatcagagcggagttgtggatctggtacgtgatgtttaccgccgcgcctgtcgcatccatcatccggacaaaccgagtctgcacctgatgtgggccgccttcgaggaatgccagatgaactttgacgacgccgctgaaattttgcagcgtatcgatcagcgctgccccaatctcctgcagctttcctatcgtcgtatcaacgtggaaaggcgtcgaggagcactggacaagtgtcgcgagctgtacaagcactatatagagagtacaaagaacaagggcattgccggcagtctggccatcaagtatgcccgtttcctcaataaaatctgtcatgatctcgacgccggcttggccgccctgcagcaggcgctggaacgtgatccagccaacactcgtgtggccctgcaaatgatcgatttgtgcctacagcgcccaaaagtcgatgagcaggaggtagtcgaaattatggataagttcatggctcgtgcggacatcgaacccgatcagaaggttttgtttgcccagcgcaaagtggagttccttgaggatttcggcagcacggccaggggtctacaagacgcacagcgcgctctgcagcaggcactcactaaagccaaggaagcgcaaaagaaaaggtaagaaatccatgaagatgtatccacactcattcattaatcatggacattccaatagtgatggcagtcctagtcgcaaaaactcatcaagcagcaaagaaggtcctgtccccacaggatccgcggcggcagcttacaacaatggtggctcggccgcagcagtcgcaggctacaactatggagcagcaaatccatactatggtcagcagaataccgcagcagcctatccctcacagacgccacaacaggcgtcctacgactcttactacaatcagtggggctacggttccggtggggccagcgccaacagtggtggtagcggctacaactacggccagtggagcggttatggcaactactattaagttcgctgcctagatgtaacccactccgccacctgtagctctaagacgctacggcttgtttagttttgccttgctgctctgttaagttgtacacatctaattgtaattttttatcaacccctatttgagcccacaaaataaccccaccattgcgaaaaataaaatataccagctttttatcggtccaccataatcgcgttgcttgtatttagccaatatatgcttgaaataagtcgaattatgcctaaatagaaaattaaatatacagattgacagtgagcgcgctcttcgcccggctcaactgaagtctacaggttgggtcgataccaggtcacctcgcccccgttgcatccggttacaaggagcggttccctggggctaaacttggcgcacagaacgacgtcctggtgttcggtgatcttggctagctcaaccagtttccgcggtttgcttttcacctcctcaaacgcctgacatttcggatagtcgcagcagtcctcactgtaaccaaagagtcttaccccattgccgtacggcgagcagacaacccgaccgtccgcggagaatccaggttccttgatgaagcccggtttggtgttggtctcggcggcatagtaaagcagtttcttggcattcaccagtattgaatgaccgttttccttgaacgttggcgttgtcacaggactattgaatgatcgcagacgcagcctgtttccgatctctaagcggactgtggtgtcgctattgttgctggagctggagctgctgctggagctactgctactggagctactgctgctgctctggttgctttctgtgggcggcggggtggtcagggggcgaggactggtgctgctgcccatcagactatttgcccccaattgtcttagcggaagcactccgctgctgatggcgtacacaaagttatagccgctgacatggttattggagacgcgtgcacggttctgtcggatggcccgctcctggactgtgacctccg

SEQ ID NO: 1805 - DNA, 3359 bp, DROSOPHILA
atggcgtcagagggcgaaaacgttgttatggaaagtccagcccatttcggtagctgacactgacagttagctggagcagcccattaaagcatttggaaaaaagtgaacatcacgaggcagcgaacaacccacaacaccgcgcgtacagtttatgtaaaccgcatggattaaccaagaaagttaattgacgttttccaggtcgccgcacacgttctggtcggaaggccgcatccccggctgcatcgctgccaaccagaagcacccggcgcacatccaagcggaacgtacagctaagtgaccacgaagaggaggccgaagagcaagtggtcatggttcaggaagaggaggagccctttagagggacaaacactgcggaggcacctgctttggagccccaattcgaggagactcagcaccagatagaggatgacgtggaaatgctgccagccgaagctgctggggttgatgaaaagagctcttccttcccgtttggcacggtggcggagctgcattcagagactagtgatgatattaaagagacacgcggtcaggctggcgtggacaccctactggcttctttagccggcgataatgccaacagcctgccctccgtgggtggaaatgacgagagtgacaatgtcaagaaggcggactttgagtacaatgtagactccctgcagccgcagatggagaaaatgaattcctctgaggactccagctcacaacatgccattgccgaggatctggccgatgcggacaccagcaatgcaaccattgtcaacacagagatagtctccgaggatgagctacctctgcccagcaagcctgaaataaatgatgccgaggaagtttccgatgaagagcttccagcaccgcagcgggctgaattgccagaggatgctgaagtaatctcggaggatgaactgcccgccagtaataacaataacaccgccactgagcccaaggcacctttgaagcgcaaggcggaaaacgaaagcgttaagagcaccgaagataaggatgcaagcagtcatgaatcaagcacaaaggataaatcctccgagcaatataatccgggcagtcccacatctgagagcaacgacgcacagccctcagagaaaaaactcaaggtcgaagaatcggagcccaaggagaaaaagaaggaaaaggagcgcgataaagataaggagaaggataaggacaaagataataataaggataaggaaaaggagcgaaagaagctgccggacctagataagtactggagagctgtcaaagaagactccaccgacttcaccggctggacgtacttgctgcaatatgttgacaatgagtctgatgcggaggcggcgcgcgaggcctacgacacattcctgtcccactatccttactgctacggatattggcgcaagtatgccgactacgagaagcgcaagggcatcaaggcaaactgctataaggtgtttgagcgcggactggaggcgattccgctgtccgtggatctgtggatccactacctaatgcacgttaagtccaatcacggagatgatgaaacattcgtccgctcccagtatgaaagggcagtgaaggcgtgcggcctggaatttcgatcggacaaactctgggatgcctacattcgttgggagaacgagtcaaagcggtaccaccgtgtggtccagatctacgatagacttctggccataccgacacagggctataatggtcacttcgacaatttccaagatttgatcaatcagcatgatgtaactatcacacttgcaaacgaggaggtgatccgtctgcgcaaagacttccacgaacgtcagcagagcaagtcctccaagtcctcgtcgaagcatcgccgggacagcagcagcagctccaaggacaaagactcaaaggagcgagaacgtgagaaggacaaggataaggacaaagacaaggacaaggagaagcgagaaactgtcgggggcggtgttggtaagtcgccaaaagatacaagtgaaactcaagtcgatgaatcagatagtactaccgatctgaccaccgaaagcgagtcatcgcatgcagcttcaaagccggcaatgcagatcgatttcagtgatcttagcactctgaatgacgaagaggtggtcagcattagggacagggctatctcggcgcggcgcaaagtccacaagttgaccgttagcgcagtgacagcccgctggtccttcgaggagggcatcaagcggccttatttccatgtgaagccactcgagagggcacagctcaagaattggaaggactacttggatttcgagatcgaaaagggtgatcgcgagcgagtcctggttttgttcgaaaggtgcctaatcgcctgtgctttgtatgacgagttctggctgaagatgcttcgttatttagagtctttggaggatcagagcggagttgtggatctggtacgtgatgtttaccgccgcgcctgtcgcatccatcatccggacaaaccgagtctgcacctgatgtgggccgccttcgaggaatgccagatgaactttgacgacgccgctgaaattttgcagcgtatcgatcagcgctgccccaatctcctgcagctttcctatcgtcgtatcaacgtggaaaggcgtcgaggagcactggacaagtgtcgcgagctgtacaagcactatatagagagtacaaagaacaagggcattgccggcagtctggccatcaagtatgcccgtttcctcaataaaatctgtcatgatctcgacgccggcttggccgccctgcagcaggcgctggaacgtgatccagccaacactcgtgtggccctgcaaatgatcgatttgtgcctacagcgcccaaaagtcgatgagcaggaggtagtcgaaattatggataagttcatggctcgtgcggacatcgaacccgatcagaaggttttgtttgcccagcgcaaagtggagttccttgaggatttcggcagcacggccaggggtctacaagacgcacagcgcgctctgcagcaggcactcactaaagccaaggaagcgcaaaagaaaagtgatggcagtcctagtcgcaaaaactcatcaagcagcaaagaaggtcctgtccccacaggatccgcggcggcagcttacaacaatggtggctcggccgcagcagtcgcaggctacaactatggagcagcaaatccatactatggtcagcagaataccgcagcagcctatccctcacagacgccacaacaggcgtcctacgactcttactacaatcagtggggctacggttccggtggggccagcgccaacagtggtggtagcggctacaactacggccagtggagcggttatggcaactactattaa

SEQ ID NO: 1806 - protein, 1009 aa, DROSOPHILA
MVQEEEEPFRGTNTAEAPALEPQFEETQHQIEDDVEMLPAEAAGVDEKSSSFPFGTVAELHSETSDDIKETRGQAGVDTLLASLAGDNANSLPSVGGNDESDNVKKADFEYNVDSLQPQMEKMNSSEDSSSQHAIAEDLADADTSNATIVNTEIVSEDELPLPSKPEINDAEEVSDEELPAPQRAELPEDAEVISEDELPASNNNNTATEPKAPLKRKAENESVKSTEDKDASSHESSTKDKSSEQYNPGSPTSESNDAQPSEKKLKVEESEPKEKKKEKERDKDKEKDKDKDNNKDKEKERKKLPDLDKYWRAVKEDSTDFTGWTYLLQYVDNESDAEAAREAYDTFLSHYPYCYGYWRKYADYEKRKGIKANCYKVFERGLEAIPLSVDLWIHYLMHVKSNHGDDETFVRSQYERAVKACGLEFRSDKLWDAYIRWENESKRYHRVVQIYDRLLAIPTQGYNGHFDNFQDLINQHDVTITLANEEVIRLRKDFHERQQSKSSKSSSKHRRDSSSSSKDKDSKEREREKDKDKDKDKDKEKRETVGGGVGKSPKDTSETQVDESDSTTDLTTESESSHAASKPAMQIDFSDLSTLNDEEVVSIRDRAISARRKVHKLTVSAVTARWSFEEGIKRPYFHVKPLERAQLKNWKDYLDFEIEKGDRERVLVLFERCLIACALYDEFWLKMLRYLESLEDQSGVVDLVRDVYRRACRIHHPDKPSLHLMWAAFEECQMNFDDAAEILQRIDQRCPNLLQLSYRRINVERRRGALDKCRELYKHYIESTKNKGIAGSLAIKYARFLNKICHDLDAGLAALQQALERDPANTRVALQMIDLCLQRPKVDEQEVVEIMDKFMARADIEPDQKVLFAQRKVEFLEDFGSTARGLQDAQRALQQALTKAKEAQKKSDGSPSRKNSSSSKEGPVPTGSAAAAYNNGGSAAAVAGYNYGAANPYYGQQNTAAAYPSQTPQQASYDSYYNQWGYGSGGASANSGGSGYNYGQWSGYGNYY

SEQ ID NO: 1807 - DNA, 2757 bp, DROSOPHILA
atcaatgtctgtatccgacgaaggctcttggagattctcggattctaagttctccgacgggtcatataagatgggattgcgctcctccaggccatcgaagcgttccccctccgccggaacggccacggccagttggtgctgtgagcgagaggtgctgcggccattttgcaacgagttctgttttatagttttgcccttagctgctggtttctccgccttcgagtctcccatcacggaggaagagcgtcgcagcgggggcatccatttcgggcgcgtcggctccttagcggccaacttctggctggtggacttttccagcgagcgcaggctcaccttgttttccttgaggaagtttcgggactgtgtgacgcctgtgggaacggagaccaaaacaaattaccaactggttgccatggccaagcggctgtttggaaaagaaatcttacgcggcaccgaaaagatgccctttaacgttggaatcgggcgaactgaagtattcgacatgttccacctactcccgaactataactagacggctggggctccagaaatgtgatctcgactacgacaagtggaaactgcgtcgttgtgtgaagtaaggcacaggttcaaatgacaattttgaaccagctgcttgtgattgtacctgctcatcgatgcccgataacattatatatcggttcggtgctgacccgcggctggccacattcgagccaactaacggtttatgggatgtcctagtgtttaagtaaatattaaataaaaaagcaagtagaaatcaagtgaaattcttactattctgtaattatagtaaagttaaaataaaataaataaaaaaatataaaataaaataaaaactctgcacagcttctaattttaaatatttaattttcaaaggtaattaaccaaaccaatttatggtaatacatactgtattaatttattgactaacctattgtaaattcatgaattccagcacctagtggactggtctaaggcaatgcttccgcagatagctaacataacggattgctacgatgagtgggttcacaagccggtggacaggccactgcgtctctttgacccttggtacttggagatgtgcaccaagacgccctggtggctggtgcccctgttctggataccagtgatcgtgaaatgcgccgtggaggagttcaccaccgcctggcaggatagcaaccaggtgagtagtcgcgcaatcttcgcattcttggatacgatcttctaaaagtatcttctttctgcagctggctgtgttctccggttactttttatttggcgtgctcctgtggtctttcctggagtacacactgcaccgctgggtgttccacgtgaagctgagcaacaagagcggaagttggctatgcaccttccacttcatgatccatggcctgcaccacaaggtgcccttcgatccgatgcgactggtgtttccgccccttcccggcgcagtgctcgccgcggtcatctacaccccgctcagctttgtcctgtcccatccgcgagtgatcttgtctggagctctggccggctatctgtgctacgatatgatgcactactacctgcactatgggaacccttcgctatgggcctttgtacacatgaagcgctatcatcaccaccaccacttctcgcaccaaactctcggttacggcatcagcagtcccttgtgggatgtcgtcttcaaaacgagaatccatctccgcaagctgagataccaactgcgctggtcctagctgcaataaatggctaatacagtgctactatagaacaaattacattcagttttcaacgcaacagagttgctgccgcagcaaatagttcaatcaaatcggaaatttggtttttagcctatttgtgtaggctgaatactgagcattaggcttaagaattatttgtaagacttttaccaatttctattaaacaggaatacacttccaatgataccaaagaacaaatggaaaatcctttttgaaaacagaaaactgggcaatcaaaggaactattggaactattttggaactattttggggaaaaacaaaaaattttcggcaattttatgatgcgtcaccaaagtttacattagaagtttggtaccttacctatatatgagagggaatactttgattaacttttaattcctttggtaaatgccttatcatcactctggagcgtttaaatatttttgtttaaaatcgaataaataaagaagcagacagacggtttgtatgaacactttcatttacctatttcatacaaatctggtacaatcagttcaagtttgtttaataattaatattatattattaaaattagcttaagataattgtttaagacctgtcttaagtggaatttctcattggcgttgcttggtcacactaccaagaatccagcgaaagttttgtttatttttttgggtcccaatttctcctgctggaataatgctaaatgccaagatcgggaaggtcggcaaggtactggtgtgcgggatgaagggcgtgggcaagacggcgctgatagagcagctggtctacggccacgtcaatcccgaaacggtgagaatgcctttggcagagctcaaagtaaagctgatgtctcatatcccggagttcattgcaggaactgcatccaaccattgaggatatctacgtggccagcgtggatacaggcaggggcggagcccgagagaccctgcgcatctacgacacggccggattgcagggcgagcagcagcag

SEQ ID NO: 1808 - DNA, 693 bp, DROSOPHILA
atgcttccgcagatagctaacataacggattgctacgatgagtgggttcacaagccggtggacaggccactgcgtctctttgacccttggtacttggagatgtgcaccaagacgccctggtggctggtgcccctgttctggataccagtgatcgtgaaatgcgccgtggaggagttcaccaccgcctggcaggatagcaaccagctggctgtgttctccggttactttttatttggcgtgctcctgtggtctttcctggagtacacactgcaccgctgggtgttccacgtgaagctgagcaacaagagcggaagttggctatgcaccttccacttcatgatccatggcctgcaccacaaggtgcccttcgatccgatgcgactggtgtttccgccccttcccggcgcagtgctcgccgcggtcatctacaccccgctcagctttgtcctgtcccatccgcgagtgatcttgtctggagctctggccggctatctgtgctacgatatgatgcactactacctgcactatgggaacccttcgctatgggcctttgtacacatgaagcgctatcatcaccaccaccacttctcgcaccaaactctcggttacggcatcagcagtcccttgtgggatgtcgtcttcaaaacgagaatccatctccgcaagctgagataccaactgcgctggtcctag

SEQ ID NO: 1809 - protein, 230 aa, DROSOPHILA
MLPQIANITDCYDEWVHKPVDRPLRLFDPWYLEMCTKTPWWLVPLFWIPVIVKCAVEEFTTAWQDSNQLAVFSGYFLFGVLLWSFLEYTLHRWVFHVKLSNKSGSWLCTFHFMIHGLHHKVPFDPMRLVFPPLPGAVLAAVIYTPLSFVLSHPRVILSGALAGYLCYDMMHYYLHYGNPSLWAFVHMKRYHHHHHFSHQTLGYGISSPLWDVVFKTRIHLRKLRYQLRWS

SEQ ID NO: 1810 - DNA, 3708 bp, DROSOPHILA
ttaagtgtgaccgtcttatgataaacttataatgtttaacagtaatattgttagaagtgtcaattttccatcgattagaggctaccaatgctacctatgctcaaaaggtgaaaattttttacgatttcataaatacgtttgctacaaaattcccgattcgagtaactcgacctttttaaaacaagcatacatttatagtctcaattgtgatttaagtacatgcatattaaaattgcttttttggctgttttgcaatctccacgttcatacaaacggacacacatacggtaagagtgaatcgattgatgttttgattaagaacatgaaaaatggatctagtatactgacatacattatcagtaacaaaaaacagttcatcatcatattctcttctaactttctgatagagaatattgatgtatactatttataaacttgcatattatcgatgaactcgcataggtgcgatcggattactacgttactaagcatttgtggtgtcacggcgggatcggctatgatcggtgcgccgccgatgaatctacacttataaaagtgctttcctaaaatcgccccaaaaatcataattagcaaaaatttcgaaacaaggacccattaccaacttgaaccaattttagaaaaatgaaccctaaataactgaatataatatttatcttttttatgtgaattttattgagttaagacaaagcttttatttttagggtgcgccaagataattaccgaaaaattagaaaaaaaaacttacttaaattaagaaaacaacataatggtgcattgttttgcatttatggtccgcgaaaagcgattttctaaaatacagaaaaacttttttatgagtgtagacggctaccactaaataggtacataagataagataagcgagaagatagcgatgaacaatcaattaagctggtgcatacatatagtcaatgtgcacaaaccgctggtgcagttctggtcggacactcttcaagtaacgatgatcgctgttttttcactcattgcggctgctctcgccgttggatccctcgttctgctccccgttgtcctaagaggtggatgtctacttgtcgtaacaatcgtttggctgtggcaaattctacacttctggcattggcgacgtctgggcgtcccctttgttccggctgccccatttgtggggaatgtgtggaatcttttgcgtggagcctgctgctttggcgatcagtttcgcgagttgtacgagagtaaggaggctgccggccgcgccttcgtgggaattgacgtgctgcacaatcacgcactgcttcttcgagatccggctctgatcaagcgcattatggtggaagacttcgctcagttctcgagccgctttgagacgacagatcccacttgtgacacaatgggatcgcagaaccttttcttttccaaatacgagacttggcgggagacgcacaagatctttgcgcccttctttgctgcgggaaaggtgcgcaatatgtacgggcttctggaaaacattggacagaagctcgaggagcacatggagcaaaagctaagcggcagggatagcatggaactggaggtcaagcagttgtgtgccctcttcacaacggacatcattgcatccctggcctttggcatagaggcgcacagtctgcaaaatcccgaggcagagtttcgtcgtatgtgcattgaggtcaatgaccccaggccaaagcgcctcctacacctcttcaccatgttcttctttccgcgactatcgcacagggttggcacccatctttactccgaagagtatgagcgctttatgcgcaagtccatggactacgttctttcccagcgcgcggaaagtggggaaaatcgacacgatttgatcgatatattcttgcagctgaagcgtacggagccggcggaaagcataatccatcggccagatttctttgcagcccaggctgcttttctgcttttggccggcttcgacacctcgtcgtccaccatcacgtttgcgctgtacgagctggccaagaacaccacgattcaggaccgcctgcggacggagcttcgggctgccttgcagtctagccaagatcggcaactgagctgcgacaccgtcaccggattggtttacctgcgacaggtagttgatgaggtcttgagactttatccgcccacagctttcctggaccgatgctgcaattcccgaacgggctatgatctctcgccgtggaacggtggatcgccattcaaattgcgtgcgggcacgcctgtctacatatcggtgttgggaatccatcgtgatgcacagtactggccaaatcccgaagtcttcgacccggagcgcttctcagcggagcaacggcaacagcaccatcccatgacctatttgccctttggcgcaggaccaagaggttgcatcgggactcttttggggcagttggagatcaaagttggactgctgcacatcctaaatcactttcgggttgaggtctgcgaaaggacgctaccagaaatgcggttcgatcccaaggcctttgtactcactgctcacaatgggacctatctacgttttgttaagaattctctttgaaatacatccagtaatagttatattaggtaaactttagttggacaattgctgttgaaaatgcaccttagattttcctaaaaagtaaaccactccttagaaaggtttaaatttaatgacattgttttactatattccataaagcacttttcagttggcgaattgtcgggtagtgcgacagttatcctgcatgtttctataaactatacttattagcaggtgaattcttaaataatgaatacatttttaaacagtgaatacattaaagccaattccaattcacatttgaatagtgccaaccgtactgcaaactatctgtgcacatgaaacagatacagagcttacccaacgagtatacgagtattgtacgtacgagtgagtgagtattggttgaaaatcaatctggcaattagtctgcattaatttcaagggtcctggtcccttgccaattctcgtaaatgtgtctggttaataaagatgtaataccgacaaaagacgacccggactggcacctccaccagccgaacaattaagccatgctcgtccaagactgattgttctcgacatcggtttttggtcgagcattaattacacacaaattggagcctaaatgttggctaaatgtgtactgatctgtacgacaacaaaggagcggaaccactagaagccctccacttattcttgcccatcgtggagccacctgtttgcaagaagctcaagccgcacaaagcaggtaactctggcagctcactaatcacaaaagtctcgaatacagagctgcataaatgccaaaaccttcaggcattcacctctgcctttgcccacttgagttttaaatttgagttgcccattgacccgacaacacaatcaaatattagcactcgggttagcaagggcaaagggttcggcctgtggggtcctgggaatgaaatgagcttcaaatccttttgacaacagccccgccccgaactctggtggaaacccattcgaaaatttactttactgagcccctgtaatctccgtgcttacgatggcttcgcctctcatttccgaccccctcatgaacgcccctggaaggcccggaccctacgaacccacaccccctcccccacccaacacaa

SEQ ID NO: 1811 - DNA, 1708 bp, DROSOPHILA
atgatcgctgttttttcactcattgcggctgctctcgccgttggatccctcgttctgctccccgttgtcctaagaggtggatgtctacttgtcgtaacaatcgtttggctgtggcaaattctacacttctggcattggcgacgtctgggcgtcccctttgttccggctgccccatttgtggggaatgtgtggaatcttttgcgtggagcctgctgctttggcgatcagtttcgcgagttgtacgagagtaaggaggctgccggccgcgccttcgtgggaattgacgtgctgcacaatcacgcactgcttcttcgagatccggctctgatcaagcgcattatggtggaagacttcgctcagttctcgagccgctttgagacgacagatcccacttgtgacacaatgggatcgcagaaccttttcttttccaaatacgagacttggcgggagacgcacaagatctttgcgcccttctttgctgcgggaaaggtgcgcaatatgtacgggcttctggaaaacattggacagaagctcgaggagcacatggagcaaaagctaagcggcagggatagcatggaactggaggtcaagcagttgtgtgccctcttcacaacggacatcattgcatccctggcctttggcatagaggcgcacagtctgcaaaatcccgaggcagagtttcgtcgtatgtgcattgaggtcaatgaccccaggccaaagcgcctcctacacctcttcaccatgttcttctttccgcgactatcgcacagggttggcacccatctttactccgaagagtatgagcgctttatgcgcaagtccatggactacgttctttcccagcgcgcggaaagtggggaaaatcgacacgatttgatcgatatattcttgcagctgaagcgtacggagccggcggaaagcataatccatcggccagatttctttgcagcccaggctgcttttctgcttttggccggcttcgacacctcgtcgtccaccatcacgtttgcgctgtacgagctggccaagaacaccacgattcaggaccgcctgcggacggagcttcgggctgccttgcagtctagccaagatcggcaactgagctgcgacaccgtcaccggattggtttacctgcgacaggtagttgatgaggtcttgagactttatccgcccacagctttcctggaccgatgctgcaattcccgaacgggctatgatctctcgccgtggaacggtggatcgccattcaaattgcgtgcgggcacgcctgtctacatatcggtgttgggaatccatcgtgatgcacagtactggccaaatcccgaagtcttcgacccggagcgcttctcagcggagcaacggcaacagcaccatcccatgacctatttgccctttggcgcaggaccaagaggttgcatcgggactcttttggggcagttggagatcaaagttggactgctgcacatcctaaatcactttcgggttgaggtctgcgaaaggacgctaccagaaatgcggttcgatcccaaggcctttgtactcactgctcacaatgggacctatctacgttttgttaagaattctctttgaaatacatccagtaatagttatattaggtaaactttagttggacaattgctgttgaaaatgcaccttagattttcctaaaaagtaaaccactccttagaaaggtttaaatttaatgaca

SEQ ID NO: 1812 - protein, 529 aa, DROSOPHILA
MIAVFSLIAAALAVGSLVLLPVVLRGGCLLVVTIVWLWQILHFWHWRRLGVPFVPAAPFVGNVWNLLRGACCFGDQFRELYESKEAAGRAFVGIDVLHNHALLLRDPALIKRIMVEDFAQFSSRFETTDPTCDTMGSQNLFFSKYETWRETHKIFAPFFAAGKVRNMYGLLENIGQKLEEHMEQKLSGRDSMELEVKQLCALFTTDIIASLAFGIEAHSLQNPEAEFRRMCIEVNDPRPKRLLHLFTMFFFPRLSHRVGTHLYSEEYERFMRKSMDYVLSQRAESGENRHDLIDIFLQLKRTEPAESIIHRPDFFAAQAAFLLLAGFDTSSSTITFALYELAKNTTIQDRLRTELRAALQSSQDRQLSCDTVTGLVYLRQVVDEVLRLYPPTAFLDRCCNSRTGYDLSPWNGGSPFKLRAGTPVYISVLGIHRDAQYWPNPEVFDPERFSAEQRQQHHPMTYLPFGAGPRGCIGTLLGQLEIKVGLLHILNHFRVEVCERTLPEMRFDPKAFVLTAHNGTYLRFVKNSL

SEQ ID NO: 1813 - DNA, 2712 bp, DROSOPHILA
caaggtgcccttcgatccgatgcgactggtgtttccgccccttcccggcgcagtgctcgccgcggtcatctacaccccgctcagctttgtcctgtcccatccgcgagtgatcttgtctggagctctggccggctatctgtgctacgatatgatgcactactacctgcactatgggaacccttcgctatgggcctttgtacacatgaagcgctatcatcaccaccaccacttctcgcaccaaactctcggttacggcatcagcagtcccttgtgggatgtcgtcttcaaaacgagaatccatctccgcaagctgagataccaactgcgctggtcctagctgcaataaatggctaatacagtgctactatagaacaaattacattcagttttcaacgcaacagagttgctgccgcagcaaatagttcaatcaaatcggaaatttggtttttagcctatttgtgtaggctgaatactgagcattaggcttaagaattatttgtaagacttttaccaatttctattaaacaggaatacacttccaatgataccaaagaacaaatggaaaatcctttttgaaaacagaaaactgggcaatcaaaggaactattggaactattttggaactattttggggaaaaacaaaaaattttcggcaattttatgatgcgtcaccaaagtttacattagaagtttggtaccttacctatatatgagagggaatactttgattaacttttaattcctttggtaaatgccttatcatcactctggagcgtttaaatatttttgtttaaaatcgaataaataaagaagcagacagacggtttgtatgaacactttcatttacctatttcatacaaatctggtacaatcagttcaagtttgtttaataattaatattatattattaaaattagcttaagataattgtttaagacctgtcttaagtggaatttctcattggcgttgcttggtcacactaccaagaatccagcgaaagttttgtttatttttttgggtcccaatttctcctgctggaataatgctaaatgccaagatcgggaaggtcggcaaggtactggtgtgcgggatgaagggcgtgggcaagacggcgctgatagagcagctggtctacggccacgtcaatcccgaaacggtgagaatgcctttggcagagctcaaagtaaagctgatgtctcatatcccggagttcattgcaggaactgcatccaaccattgaggatatctacgtggccagcgtggatacaggcaggggcggagcccgagagaccctgcgcatctacgacacggccggattgcagggcgagcagcagcagctgccacgccactaccttcagtttccagatgcattcgttctggtctacgatcccatggatccgcgcagccttgacatgctggccgacatcaaggctgacattgagaagcacaaggagaagaaggagattcccgttgtggtgctggccaacgtgagggcacgagcagccccaaatcccgtcgagaaggtcatggaccgcgccaacatctggtgccagcgagagcgcataaagcactacacggtgaacgccatggagcgtccctccctctacgagccattcaccacgctctgcgcccggctgcacccaatgcagacgaagagcacgttccctcagctgcgccaagttatgcagaaccggcagaagagcgaggcttagctgttttgaacggacgaaagggaagagatataatttaagttttattcgggagtgtcccaataatctccgatacttaacagtagctatgaatgccacagatttggctttaagttcaagagatccttgggatctccccaatcgtactcgtattgatccatttagagtctacttgccttgtattaactgttgtgctttaatgtgggccagagcccaagccacttgtacttatgtctctttgtgtgtgtccaattgtatctactatttattacaccgacatgtcttctctcattccgcgagaattaagcgtaatcagtattcactgctcaatcgcagctcaaatggcgcgtagtgattaaataaccatgccgaaattctgctctacggcaatccccttggatcagtcgtctgcaagccccttcctcgagcgcaatgctttcgcgtgccgcttttcttactgttctcctaacgctgatctatgccagccatgcggctgcgggattgagcattacagttccgggcacaaagtggtgtggacccgggaacatagcagccaactacgatgacctgggcactgagcgcgaagtggacacgtgctgccgggcgcacgacaactgtgaggagaagattccgccgctggaggaagcctttggcctgagaaacgacgggtttttccccatgtaagcgtggattccatagcacccatgctgatcttgggatcaataatcgtgcgctccccgcagattctcgtgtgcctgcgagtcggccttccggaactgcctcaccgctctgcgaaacggacactccctggctcttggcaaaatctacttcaacaccaaggaggtgtgctttggctacgggcatcccatcgtttcctgccaggagaagcaggccgacctgttcgagacacgatgtctcagctaccgagtggacgaaggtcagccgcagcgctggcagttctacgacttggccctctacacacacgtaagcggcagcgaggagg

SEQ ID NO: 1814 - DNA, 648 bp, DROSOPHILA
ttttgtttatttttttgggtcccaatttctcctgctggaataatgctaaatgccaagatcgggaaggtcggcaaggtactggtgtgcgggatgaagggcgtgggcaagacggcgctgatagagcagctggtctacggccacgtcaatcccgaaacggaactgcatccaaccattgaggatatctacgtggccagcgtggatacaggcaggggcggagcccgagagaccctgcgcatctacgacacggccggattgcagggcgagcagcagcagctgccacgccactaccttcagtttccagatgcattcgttctggtctacgatcccatggatccgcgcagccttgacatgctggccgacatcaaggctgacattgagaagcacaaggagaagaaggagattcccgttgtggtgctggccaacgtgagggcacgagcagccccaaatcccgtcgagaaggtcatggaccgcgccaacatctggtgccagcgagagcgcataaagcactacacggtgaacgccatggagcgtccctccctctacgagccattcaccacgctctgcgcccggctgcacccaatgcagacgaagagcacgttccctcagctgcgccaagttatgcagaaccggcagaagagcgaggcttag

SEQ ID NO: 1815 - protein, 201 aa, DROSOPHILA
MLNAKIGKVGKVLVCGMKGVGKTALIEQLVYGHVNPETELHPTIEDIYVASVDTGRGGARETLRIYDTAGLQGEQQQLPRHYLQFPDAFVLVYDPMDPRSLDMLADIKADIEKHKEKKEIPVVVLANVRARAAPNPVEKVMDRANIWCQRERIKHYTVNAMERPSLYEPFTTLCARLHPMQTKSTFPQLRQVMQNRQKSEA

SEQ ID NO: 1816 - DNA, 6227 bp, DROSOPHILA
gacactatctgtgtgggcgtccggtaccttaaagatctccttctgtgtgatggcatcgaagacgaggacgcacttcctctccgtggcggccacgacaacgttcccatcggcattgaactccaggttgaagatggccccagtgcgtcccgcatccgtgggccagcagttggcgtggtagctattaaacatgttcatcgagctgtaaatccgccgcatcagggagttgtcgtcgctccggtggatgtggaagccactttcgcggcggctcaagtaccgctccatcgtgtgggctctgggatctcttaagtggatcggaaaacctagaggagtgtatgggtgtgtgccttctcgcgatttcacaggcaccgcgatgcaatttccccgtggcctttcttgtgtttattctgaaaccaggggtgcaacgccgtgctgcttgtaaccgatttctttttacaactgaacaatcaagaattaagaaagttgaacaatggtagattcatcaatggtagataatcatctggacttaaaatatccttttttggcacaatactctgtaaattaatggaatcgattctttttgcttcgccgtacgatgattaacttgaagtatttttcatccaaagcacttattgcaattcaatatattctgaaattacgatgatacaatttcatagtgtagccctgaaaacgaagtgcttttaacaccacttgtaaaaatagtaaacaaacatctttttagtaaagacgtacaatttgtttcagtatttattctgcaactatataacattatttatttataaaaatttttgacaaattttttatatttagtgataagaaatagccaataatgtgattttattggctaaatattttttttaacgagtttcaaaaattatacttaaaatcaaatttgctaattttgagataagcaaaaaattcgatcctatcgatagcacatcgatttctaccaaccttgttagccgctgaccaacactaagcgtattggaataaacaaaatgcaagttcaactggagataaaacctttaatcatgctaaattaccggtgaataaagcctttcgagacaaattttaagatccggccgaaatggatcggtttgcttttaagatcgacgctgccctcaaggcgaatctgtgcacgatctgtcgtctgtgcggcatcgataatccaggaaaagtgccaatacttttgccaaatgaagaagacaccatcgacctggacgagcctaggatgtcccagaagatctacgagctggtgggcttcactgtgggtgtttttcttaaaaatgttcatagccaagttaaccaacgccctttgcaggtgtccgtggacgacaaaatgccgcagacaatttgcagccagtgcgtggataaaatcaatgatttttatgagtttcgggaaatgtgctatgcgacgaataaacagactcgaaatctattgggattgaagcaaatagagcccgcaagagtgagaaaaacgaataactatattataatttataattatacgaactaatgtattatttacgcctcacagttaattgatcttaagcgcatcgttaaggaggaacggccaatatctggtgcagttggaaaacggggaaggaagcgcaagggcgaggaatcctggccaaaaaataacaatgtcaagccacaggtaaaaaaggagtcctttgtgtggcacaaaaagcaaaaactacagccatcacagataacatctttagtgtccaaaagagagccggagatgtaactataacatacattcctcttgttctatttgtaaataattcccatttttattatcccagcaaagacgagcccgctgaacaggacaccagtcttaagggaccaccgaaaaaggccggtcgcaagtctatttgcagcgtttgcggcgagaagttccttagcaaggagctggccgacgagcataaaagcctggtgcatgtgccatcgataccgcgatacatatgtaatgcctgcaaccagacgcaccacaaccagagcgacatacgcgcccaccagctgtggcataagctctccaagactccctacaagtgtcccctgtgcgagtctagcgtagccaatgcgtatgcttttacgcgccatttgcgcgaacacacaccacccactcccgtccaactgctcgtcctggatcgggagtgtccgctgtgcaagaagactttcgtcacgaacttcttctacaacactcaccgctgtgccatccgtaaacgcaagtgcggcggttgcagtcgcaccttgaacaccgaagcggcctatatgcgtcatgcgccaacctgcccaaagatttacctcaaccactcgaagcacatcatgccccaggtggtgaccaatgaggcgcagatgttaatcaagaacgagatcgaggaggaattgctaggtcttccgccggccacaacagtgccgccggatttcgtcatagacgagggtatgcaaccggtagtagttctggaacgcctgtcatcgccacttctgcggtcttcgtctggaaccgatcaactggttgctgccaaaagcaaaaatagcgatagggtttctgccaggaattatttgaaacgagtggatcagctgctgaagaatacgattaacactctggtcagcattaagcatgagccagaagtgcacataaatgacacggggccacctagaggtcaagccgagagtgatcccgagccggaacggaatgaagaacatccaagttttggtgatgatattcaggcagctaacgacgaatgtcaggaatgtcaaccggaaacagaatccgataaaatctctgttgctgcctgtgacgatattcccagtgtatctgttaaacaggaacccgagtatgacggctatgaaaagcaaacgggagtgaagcaagagcctctgaagctaaaacttaaaataacgaagaaccatggaaagctgaactcttctctcatagacgatctggatgaagctggacaggcgtttggcagaagcagcaaaaagaaaaagaaaagaaagcataaggaacgggagaaggaagcgtcgaacgagactgaaaactgtcgaacagaatctcagaatcaacctgccattaaaatcaaacaggaacccgtcgattatgctcctgaggccactgtcatgaccactattcccatgactcagtttgaaagcagcttaaacgaaagcgaacgaagtgaggaagtcgatgaggccatgattcagagtcaggaagatgttaagccaaatcgcatggagcttgatcgtatgatgcagatctctaatgtgaccagtggcgtggatatggcagaagaagcaatggcattagaacgagctgaagaagcctgtcccgaggactccctgcacaaggtgaagtccgtaaagtccacagcgcgcaaaagtacgggaggtgcagaacggaaaacgtatagcccacccaggacgaacactttgccgcagattgttgccgttgtgagcggcgagtcggcgtttaacatgatttccatcaagccggaaccgagaaatctcggatatggagacgaagaaccagaagatcaacgagaaactacagaagagattaatcataatgacatgatggaagaagagaaagaatacataggcagtttagatctaagtgatgtatcagtgaaacaggaaagagagttggacatatgcgagatagacgccgtgcacagaaacggattggagaagagtgatgaggacgatgacgatggaaatgaagacagtgcatcatcagccgatgaagctgaggaagccatggagcgggacacggaagagcgcatatatcgtgaaatagagttgccaccattagaacttcaaaacgagtcatctaggaaagatttggaatcggaaagaatggatacagaggtatccactgcattgcctgccagtgaaactccttcgcaaactcgggacgtgctaggtgtggaaaaatcagaagcttctgcttttagtttggtcataaccaacatatgcagtcaagctgtaccgcaaccatctgcagcatgctcaaatgatatagaatgttcaataggcccaagccccagcactacaaatgaacctcattcccacacagtggaaaatgtccagtctcctgcaaacgacctccaaacttctgcacaagttgccattgccgcacaatcccagcccgatccttgcattgtctctcagcctgcagcttcgtccgaatcccaagcagatactaaagatctccctcccgcagcttcacagatccaaacctttaacacagaatctttgccgattcatgtccatagcgaaactgaggataattcaatagaaaacgatgcctcctatctggaatcacgtgctcaggtcgactgtcaatccgcgggaacagaaaatccttctgttgtcttagagcaaaacgaatccctcccaagtggaagctgtgtttcgcctatacctgaaaacccctccccaggtaattcaccaccgcaacacgatgaatcggaatctctggacaaaccagaaatggcagcagggagtgcatattgtttagcaacagtgtcgcttgatgctccaaaagatactgaagcgcttgctttgccaccttgcgatgcagctatcatagatagtaattacacatccgacgaggagcagcaaaatgtgcttaatcatgagctctcggagcagcaactggctataatggaacacagacagctactagttcacgaggagcagccggctttgctggaggtaataccaccaggactctcgtctaggccgatcgaggagactgagaaccgtattaacgagcagcagcaggatctggagcagggggaggaacgtccacctcgtttccaggccaacgacgactccaatatcaacgaaatcgccgagaacaataacaacgccaacattgagcgtgaattgcaagacgatgcgctcggggctcaggaaaacgtaaatccatagacttcggataactgattggccttagccatatatccaatttacactagcatgccctcctcattctattaggagctgtaaatatgtacggaatggtgaattgtgcttttgtaattggatacgagtagaattggagctaccacgaattgagaataaacttctttcggatagcattatttttaagttagatatacacaactttattacataaattaatggcttatatgttagcatatgtaagtataatgtatttaaatacatacatcgcacaaaactctttagacatgcgtacacacattaatcaaaaatctgatccacataaatttctcgctctgacaagcttattgggtttattagtttcaaaaatgtcacgacaacatacatatacgtaatcgtggtttaaatacaaacacacagaagaaaaatgactacaagtttgcattaaatgcgctcgaactaaaagaaaatacttatgcgttactaggtcatcaatcgattgggtgtaactgaatgaatagacagctttagcggacccatgggtgcccgaggaagccttgtggtcaacataatttgaatacatgcctattggacttagccacacttacattacatttgttaataattatttcaacaagtagtgaattattactgagcaaacttgtaaatttagtttatggttaattgcgggcaaatctattagtttaaatattgtatttgaataattctcagctgtggctttattaatagcagtcacagatttcttttcgtttgatccttccctttgttgtagatttataaaatatattcactataataaatttctatcgctcagtttacagtttttcagttcgcttaaaggtgaatctctaatttttcacaaactcctcttatattttggtgttctcaagtttttggcacagtagtctgaacggggtttgcaaaactcacccacatattgaagaaacactcggtgtgtattattcatatttaattgagcagctttatggatatgcaaatgtgatttggaacaaacgaaaacgggtaattgctgataaaatttctcaatttgtgattatcctttagtagattttgtttttgttaagcgcgtacaattaaattaaagaggtatgaaaattcactaacagtatttacagggatttatctaacgataaaccaaaatgccaaagcacaaattaaattattgcttatttttggaatagtgtctgcctgcccctatcgcatcgtgtcattcgtagttcccttagtcccac

SEQ ID NO: 1817 - DNA, 4042 bp, DROSOPHILA
tattggaataaacaaaatgcaagttcaactggagataaaacctttaatcatgctaaattaccggtgaataaagcctttcgagacaaattttaagatccggccgaaatggatcggtttgcttttaagatcgacgctgccctcaaggcgaatctgtgcacgatctgtcgtctgtgcggcatcgataatccaggaaaagtgccaatacttttgccaaatgaagaagacaccatcgacctggacgagcctaggatgtcccagaagatctacgagctggtgggcttcactgtgtccgtggacgacaaaatgccgcagacaatttgcagccagtgcgtggataaaatcaatgatttttatgagtttcgggaaatgtgctatgcgacgaataaacagactcgaaatctattgggattgaagcaaatagagcccgcaagattaattgatcttaagcgcatcgttaaggaggaacggccaatatctggtgcagttggaaaacggggaaggaagcgcaagggcgaggaatcctggccaaaaaataacaatgtcaagccacaggtaaaaaaggagtcctttgtgtggcacaaaaagcaaaaactacagccatcacagataacatctttagtgtccaaaagagagccggagatcaaagacgagcccgctgaacaggacaccagtcttaagggaccaccgaaaaaggccggtcgcaagtctatttgcagcgtttgcggcgagaagttccttagcaaggagctggccgacgagcataaaagcctggtgcatgtgccatcgataccgcgatacatatgtaatgcctgcaaccagacgcaccacaaccagagcgacatacgcgcccaccagctgtggcataagctctccaagactccctacaagtgtcccctgtgcgagtctagcgtagccaatgcgtatgcttttacgcgccatttgcgcgaacacacaccacccactcccgtccaactgctcgtcctggatcgggagtgtccgctgtgcaagaagactttcgtcacgaacttcttctacaacactcaccgctgtgccatccgtaaacgcaagtgcggcggttgcagtcgcaccttgaacaccgaagcggcctatatgcgtcatgcgccaacctgcccaaagatttacctcaaccactcgaagcacatcatgccccaggtggtgaccaatgaggcgcagatgttaatcaagaacgagatcgaggaggaattgctaggtcttccgccggccacaacagtgccgccggatttcgtcatagacgagggtatgcaaccggtagtagttctggaacgcctgtcatcgccacttctgcggtcttcgtctggaaccgatcaactggttgctgccaaaagcaaaaatagcgatagggtttctgccaggaattatttgaaacgagtggatcagctgctgaagaatacgattaacactctggtcagcattaagcatgagccagaagtgcacataaatgacacggggccacctagaggtcaagccgagagtgatcccgagccggaacggaatgaagaacatccaagttttggtgatgatattcaggcagctaacgacgaatgtcaggaatgtcaaccggaaacagaatccgataaaatctctgttgctgcctgtgacgatattcccagtgtatctgttaaacaggaacccgagtatgacggctatgaaaagcaaacgggagtgaagcaagagcctctgaagctaaaacttaaaataacgaagaaccatggaaagctgaactcttctctcatagacgatctggatgaagctggacaggcgtttggcagaagcagcaaaaagaaaaagaaaagaaagcataaggaacgggagaaggaagcgtcgaacgagactgaaaactgtcgaacagaatctcagaatcaacctgccattaaaatcaaacaggaacccgtcgattatgctcctgaggccactgtcatgaccactattcccatgactcagtttgaaagcagcttaaacgaaagcgaacgaagtgaggaagtcgatgaggccatgattcagagtcaggaagatgttaagccaaatcgcatggagcttgatcgtatgatgcagatctctaatgtgaccagtggcgtggatatggcagaagaagcaatggcattagaacgagctgaagaagcctgtcccgaggactccctgcacaaggtgaagtccgtaaagtccacagcgcgcaaaagtacgggaggtgcagaacggaaaacgtatagcccacccaggacgaacactttgccgcagattgttgccgttgtgagcggcgagtcggcgtttaacatgatttccatcaagccggaaccgagaaatctcggatatggagacgaagaaccagaagatcaacgagaaactacagaagagattaatcataatgacatgatggaagaagagaaagaatacataggcagtttagatctaagtgatgtatcagtgaaacaggaaagagagttggacatatgcgagatagacgccgtgcacagaaacggattggagaagagtgatgaggacgatgacgatggaaatgaagacagtgcatcatcagccgatgaagctgaggaagccatggagcgggacacggaagagcgcatatatcgtgaaatagagttgccaccattagaacttcaaaacgagtcatctaggaaagatttggaatcggaaagaatggatacagaggtatccactgcattgcctgccagtgaaactccttcgcaaactcgggacgtgctaggtgtggaaaaatcagaagcttctgcttttagtttggtcataaccaacatatgcagtcaagctgtaccgcaaccatctgcagcatgctcaaatgatatagaatgttcaataggcccaagccccagcactacaaatgaacctcattcccacacagtggaaaatgtccagtctcctgcaaacgacctccaaacttctgcacaagttgccattgccgcacaatcccagcccgatccttgcattgtctctcagcctgcagcttcgtccgaatcccaagcagatactaaagatctccctcccgcagcttcacagatccaaacctttaacacagaatctttgccgattcatgtccatagcgaaactgaggataattcaatagaaaacgatgcctcctatctggaatcacgtgctcaggtcgactgtcaatccgcgggaacagaaaatccttctgttgtcttagagcaaaacgaatccctcccaagtggaagctgtgtttcgcctatacctgaaaacccctccccaggtaattcaccaccgcaacacgatgaatcggaatctctggacaaaccagaaatggcagcagggagtgcatattgtttagcaacagtgtcgcttgatgctccaaaagatactgaagcgcttgctttgccaccttgcgatgcagctatcatagatagtaattacacatccgacgaggagcagcaaaatgtgcttaatcatgagctctcggagcagcaactggctataatggaacacagacagctactagttcacgaggagcagccggctttgctggaggtaataccaccaggactctcgtctaggccgatcgaggagactgagaaccgtattaacgagcagcagcaggatctggagcagggggaggaacgtccacctcgtttccaggccaacgacgactccaatatcaacgaaatcgccgagaacaataacaacgccaacattgagcgtgaattgcaagacgatgcgctcggggctcaggaaaacgtaaatccatagacttcggataactgattggccttagccatatatccaatttacactagcatgccctcctcattctattaggagctgtaaatatgtacggaatggtgaattgtgcttttgtaattggatacgagtagaattggagctaccacgaattgagaataaacttctttcggatagcattatttttaagttagatatacacaactttattacataaattaatggcttatatgttagcatatgtaagtataatgtatttaaatacatacatcgcaca

SEQ ID NO: 1818 - protein, 1222 aa, DROSOPHILA
MDRFAFKIDAALKANLCTICRLCGIDNPGKVPILLPNEEDTIDLDEPRMSQKIYELVGFTVSVDDKMPQTICSQCVDKINDFYEFREMCYATNKQTRNLLGLKQIEPARLIDLKRIVKEERPISGAVGKRGRKRKGEESWPKNNNVKPQVKKESFVWHKKQKLQPSQITSLVSKREPEIKDEPAEQDTSLKGPPKKAGRKSICSVCGEKFLSKELADEHKSLVHVPSIPRYICNACNQTHHNQSDIRAHQLWHKLSKTPYKCPLCESSVANAYAFTRHLREHTPPTPVQLLVLDRECPLCKKTFVTNFFYNTHRCAIRKRKCGGCSRTLNTEAAYMRHAPTCPKIYLNHSKHIMPQVVTNEAQMLIKNEIEEELLGLPPATTVPPDFVIDEGMQPVVVLERLSSPLLRSSSGTDQLVAAKSKNSDRVSARNYLKRVDQLLKNTINTLVSIKHEPEVHINDTGPPRGQAESDPEPERNEEHPSFGDDIQAANDECQECQPETESDKISVAACDDIPSVSVKQEPEYDGYEKQTGVKQEPLKLKLKITKNHGKLNSSLIDDLDEAGQAFGRSSKKKKKRKHKEREKEASNETENCRTESQNQPAIKIKQEPVDYAPEATVMTTIPMTQFESSLNESERSEEVDEAMIQSQEDVKPNRMELDRMMQISNVTSGVDMAEEAMALERAEEACPEDSLHKVKSVKSTARKSTGGAERKTYSPPRTNTLPQIVAVVSGESAFNMISIKPEPRNLGYGDEEPEDQRETTEEINHNDMMEEEKEYIGSLDLSDVSVKQERELDICEIDAVHRNGLEKSDEDDDDGNEDSASSADEAEEAMERDTEERIYREIELPPLELQNESSRKDLESERMDTEVSTALPASETPSQTRDVLGVEKSEASAFSLVITNICSQAVPQPSAACSNDIECSIGPSPSTTNEPHSHTVENVQSPANDLQTSAQVAIAAQSQPDPCIVSQPAASSESQADTKDLPPAASQIQTFNTESLPIHVHSETEDNSIENDASYLESRAQVDCQSAGTENPSVVLEQNESLPSGSCVSPIPENPSPGNSPPQHDESESLDKPEMAAGSAYCLATVSLDAPKDTEALALPPCDAAIIDSNYTSDEEQQNVLNHELSEQQLAIMEHRQLLVHEEQPALLEVIPPGLSSRPIEETENRINEQQQDLEQGEERPPRFQANDDSNINEIAENNNNANIERELQDDALGAQENVNP

SEQ ID NO: 1819 - DNA, 3935 bp, DROSOPHILA
tgaagaagctgttcgcatggtccttcaaccggaggaggaactcaccgcaggtcttgacctcgaacaactgcgaccacatcgcgtgcaactgatccacgtgctcgcccgtcatctccaggatctgggccttcaccgcaatggcgctcggcgagttcattttctccgttttcgttgtgaaatttgtgtttttttttttttgttcaaaatttcttttcttgcgtaaatgctcactggctttgttttttcgttgtgttcacttggggactatttaaccagcatatctgagttaacttgacagttgtgtcgcagacccacaacgctgggcaggattgctcgggaatgtgcggatttatttagtggtttatttagagtgcatcactgcacgaaatttcgaactgaatgaatcgatgacgctagacagaaatttcggtaaattcaaattgaaatggcggccaagagtgttgccaccgcgttgtgggacagcattgccacgcggcggtaacttctggtaaaaccagggctggagcatacgccacttttttgaatatttaaaattcgttatttggtttattagcaaattaaaatatctattttaattattttgctccttaaaaacgtattatattctcttatatgcgcttagtaaacatcccacagactttagaaaacccttcccacacatgtatattttggtaaaattgaaatcaagtaatttataatgtaaacaagcgtttttatctgactaaaaatttaaaatgtggacaattgttcatttacttcttgccgtcacaggtagtgcaaaatagttaaaagaattttaaagttgtaaatttagatagtctttgcgctaggaaaagccctaacactatacatatgtgtatacatataaatacgatgagtctgcaattgcgagccaaatacttcagtacaggtaatagatatagaacacagatcagttgccgaaatgattgccattggatgtgattagagtctagctccattatatggccacgaccgcctcctcgtcgggactctcgttctcctcgccggacggcggacgcacatggatttttggtatgggacgaattttctggggattcctgctccctgtgctcggcctgccggatcccttgccccgacgcaccgagtattccagcacgcgcaccttcctctgcggcgacttgagcagcttctgcccattcacacagaccttgcgacttgcattgttgcactccagcgatgcgattagatttcgcttggccgctgctgccggctgtggactattggtgttgtgatgctgtggatgccgtctcttgtgcagattccctgtgctcattgccgtggtgctggcatttgccttggtcggcgtcttcttcaacgaggatgtggatccatggatgccccggttgctcttctgcgtattgggcgtaagaggcaccattggcggcttcatttggccgctcgtattgctgccatccttcttctgggcggagggctgctttttggactgtcgatgccgctcccagtccgccgacatgcgctccagtatatccacgccgtgcaccaggaacggcgtgtgcgtttcactcatgtagacctgcaccagttcggtgatttgttgatcgatcttgggcagacgggacatgatagtcttgcgctccttctcctccttgagcagctgtccaccgcgattgttgaaccgatttggatcgttggccttggcctccagggcctccatgcgcgtccatagctcgcctcgattcgcgtatagctcaaatatcttcctgttgctgttgtagaactccttaaggttgtccagctccttctcgaactgctcgagaacatcttcggtctgcgtatcacagtagtaggtggtgaagcgcctgcgctcctcggtgcttttcagtgaaagatcccaccactcgttgatctcaatgcgcagctgctcgatgaaggcaatcagattctgctgccgcatcgcctggcagcgctccagctcctcgcgcaatatgtcgtaggtgcactggttataggacgtggcttcgcgcacacgacgcatggcgtattcgtcggtcatcctgagccgctgccagaggcattcaatcttgccgcgcatctcgtcgatgcggtcgattagatcctgcacctggtcggcgaactctttgtccatttcttgcaggcgcacgtaggcgtagggagtaagcttatggttatccgcattgagtaaccgcttttccgagtccgttcgcaattgaagttcgagtagttttatgtttcgtttgatgttctggcgcagctcgtccatatccctgaggcgctgcactcgctgatcgcgcagctgggctaggtgctcccgaaaggggtccatctcctcgggcagcggcaggggatcagctagaagtgaaagcggctgttcgcccagctcatcgcagagctgctgctgttgatggagtagctccctgatctctgcccgtcggctgaccagctctttgcgcagttgttcgatgtatttctccagcttaatgtaccagatctccatcggcacatcgtccggccgctcgccaatgtccaccgctttgtgaagcagccgccttagcccgctggcctcgttgcgcaaaacggctatgtcgttgagtataccctgctccttgtcgctcgtctccttgcggagatccgtgtagaatgtgtgtacgtgatccttaagacgggcgagacaatcctcgcaggcttgcggctcaaacattcgcgaccacattgcgtgcagctcgtcgaagtgctcggccgtcagcgctagtatccttgctttgtgttcgctagatagcattgtgtttattttgtttgtttctgtgtcgtgttctcgtgtgtggttggatgtaagtaaacatgaaattcaattcgaatcagaacgtatggacgcaatgttgctatgtttaaatcggtaaatttcaaactgtacatcaaactcgtgcgctctgcaacactggccaattggtgctgttaggcgacagcattgccacatcggtaagcattggagatcaaatatatatatagtgagtgagtatatttctgctactcactttctattgcgtataatgcgttataagaaaataattgttttaccgtgtctaatatggtaaatgttagtaccaatggtatggtaagtagtataaattgatatcgatatataccgatagcaacgcatacctatcgctgtacttgccaccactaataccaattgcatccctcaaaaaaaatactgcgtgtgaaaaagacccgaacttttcgcatacctttcgggtgcctacttattcagtggaaaagcgcgcgttactgctcagatcgattcgatcgcaaaacggctgttcaaaatgttataaaacaccgcgccgcgtccgtagacagtccctgttctactttaaaacacacacccacacacgcgcgccgccgagtgtcaacagctgccctggcgaaaaaatgtcggacattaagtaagtggtgggtgcgaaaaagtgggtgaccctgtgatgaatggtggccacctaagattgggcaacaatcctggccagcgttcgattggtggcactgagaaaatcgcatgcaaaaagcattgtcggggcgggggggttggcgatgcatgtgtataacattttcaagctgcgtaggtgtgtacgtatgtgtgcgaatgtgtgtgaatgcccccccggctgtgcttgtgtatgtgtttgagtgcgtgtggttattatatttttttttttcaatggaacctcgaaggatagaaaagtctcaccttggttttctccttaacccattaatgatttcttaactgcatctcatccgcagcgatgacctgctcaactacgagctgggcgatgacatcgatgaccaagctctgctcggcgccgatgaggatgagttgctactctcggacgaaggtg

SEQ ID NO: 1820 - DNA, 1893 bp, DROSOPHILA
tttaaacatagcaacattgcgtccatacgttctgattcgaattgaatttcatgtttacttacatccaaccacacacgagaacacgacacagaaacaaacaaaataaacacaatgctatctagcgaacacaaagcaaggatactagcgctgacggccgagcacttcgacgagctgcacgcaatgtggtcgcgaatgtttgagccgcaagcctgcgaggattgtctcgcccgtcttaaggatcacgtacacacattctacacggatctccgcaaggagacgagcgacaaggagcagggtatactcaacgacatagccgttttgcgcaacgaggccagcgggctaaggcggctgcttcacaaagcggtggacattggcgagcggccggacgatgtgccgatggagatctggtacattaagctggagaaatacatcgaacaactgcgcaaagagctggtcagccgacgggcagagatcagggagctactccatcaacagcagcagctctgcgatgagctgggcgaacagccgctttcacttctagctgatcccctgccgctgcccgaggagatggacccctttcgggagcacctagcccagctgcgcgatcagcgagtgcagcgcctcagggatatggacgagctgcgccagaacatcaaacgaaacataaaactactcgaacttcaattgcgaacggactcggaaaagcggttactcaatgcggataaccataagcttactccctacgcctacgtgcgcctgcaagaaatggacaaagagttcgccgaccaggtgcaggatctaatcgaccgcatcgacgagatgcgcggcaagattgaatgcctctggcagcggctcaggatgaccgacgaatacgccatgcgtcgtgtgcgcgaagccacgtcctataaccagtgcacctacgacatattgcgcgaggagctggagcgctgccaggcgatgcggcagcagaatctgattgccttcatcgagcagctgcgcattgagatcaacgagtggtgggatctttcactgaaaagcaccgaggagcgcaggcgcttcaccacctactactgtgatacgcagaccgaagatgttctcgagcagttcgagaagatatttgagctatacgcgaatcgaggcgagctatggacgcgcatggaggccctggaggccaaggccaacgatccaaatcggttcaacaatcgcggtggacagctgctcaaggaggagaaggagcgcaagactatcatgtcccgtctgcccaagatcgatcaacaaatcaccgaactggtgcaggtctacatgagtgaaacgcacacgccgttcctggtgcacggcgtggatatactggagcgcatgtcggcggactgggagcggcatcgacagtccaaaaagcagccctccgcccagaagaaggatggcagcaatacgagcggccaaatgaagccgccaatggtgcctcttacgcccaatacgcagaagagcaaccggggcatccatggatccacatcctcgttgaagaagacgccgaccaaggcaaatgccagcaccacggcaatgagcacagggaatctgcacaagagacggcatccacagcatcacaacaccaatagtccacagccggcagcagcggccaagcgaaatctaatcgcatcgctggagtgcaacaatgcaagtcgcaaggtctgtgtgaatgggcagaagctgctcaagtcgccgcagaggaaggtgcgcgtgctggaatactcggtgcgtcggggcaagggatccggcaggccgagcacagggagcaggaatccccagaaaattcgtcccataccaaaaatccatgtgcgtccgccgtccggcgaggagaacgagagtcccgacgaggaggcggtcgtggccatataa

SEQ ID NO: 1821 - protein, 593 aa, DROSOPHILA
MLSSEHKARILALTAEHFDELHAMWSRMFEPQACEDCLARLKDHVHTFYTDLRKETSDKEQGILNDIAVLRNEASGLRRLLHKAVDIGERPDDVPMEIWYIKLEKYIEQLRKELVSRRAEIRELLHQQQQLCDELGEQPLSLLADPLPLPEEMDPFREHLAQLRDQRVQRLRDMDELRQNIKRNIKLLELQLRTDSEKRLLNADNHKLTPYAYVRLQEMDKEFADQVQDLIDRIDEMRGKIECLWQRLRMTDEYAMRRVREATSYNQCTYDILREELERCQAMRQQNLIAFIEQLRIEINEWWDLSLKSTEERRRFTTYYCDTQTEDVLEQFEKIFELYANRGELWTRMEALEAKANDPNRFNNRGGQLLKEEKERKTIMSRLPKIDQQITELVQVYMSETHTPFLVHGVDILERMSADWERHRQSKKQPSAQKKDGSNTSGQMKPPMVPLTPNTQKSNRGIHGSTSSLKKTPTKANASTTAMSTGNLHKRRHPQHHNTNSPQPAAAAKRNLIASLECNNASRKVCVNGQKLLKSPQRKVRVLEYSVRRGKGSGRPSTGSRNPQKIRPIPKIHVRPPSGEENESPDEEAVVAI

SEQ ID NO: 1822 - DNA, 9645 bp, DROSOPHILA
gaatctccggtgttcgcgacactttgccgattcaaatttgaaaaagtcgttttgctgtttaacatagacgcatccttcgttgttcaccagctttgaattgtgcggcgagtactcaatggacttgttgttcgaaacgtatctgtaggtgggcttatcgtgtgcattcaatccaaaccagtactcgtggtcgtcttggtttattttgcttttcatctggaatagggtaacttcggtgtttagatcagccaagcacatgtggaggcttttgcagatggtcagggcactaaaccaagaagcctatggtattgtaattttgaaatttccaatctcaatgacttaagttaagtctactcactgttttttcactgaaatacaggcatatgcccttaccgtttgcctcatcagcacgcaaaagcagcagcagccaaatgggaagacagtaaagcatgcgtagtatttgactcatttctttcggtttgttgtattcaccagtactgatggatttcgaaagttgctcgttttggtatagctcactaatgccattataccatggtgcaaacaattagggtttgtggtaaattacctttccatattatttgatataccttaacctaagcaggtaccacaattttttgctaaattataatttatatattaattccccattttttttttttgcaaaatttcaaatctaactgatttttttcttgacaaaagttggcagcaccgtatatgtctaaccagtggttcggttgtagtaccccgactatcgctctcgaaatagagcgccacctagccgataagagtgcaaccactttacatccaccaaaggcattgccaactgtaaatttttagacacttgtggactatatttcttacgagtggcgctcttctcttagtttttagtttgtgtgaaacgtaaacgtaatttagatcattgaacgttacgttgaacgtactgtgactacgactccacacgagtttatacgtttctgtgctctcgacgcagtcggacgtttaaaaataaacgcgctccaccaaaaatacctagcccgctggccgcaaacgcaaataaatctgaacaaaaattcgaattccatccggatcaaacaaacttacaaacccgaaaattagttcttcgactccaacggccgagaaaaccgcaacagtttcaaaatgttcagctcgatttcaggtaaaaaagaaaagcccagccgccaatcgaagtttatgtgaaagtttggaaattagaaatcttaggtctaagcatgtgtacatatgtatgtatatatatgtacatatgatatacgaatgatatatgtatgtgtgcagtgagtgggttaccgcactggaggaaggaagtcactcgactccaactacaactccaactgcacttccaagttacatcatcatcaccagagcagcggtggagtcggacagttggagcagctggtgaccacgcgggatttggatccacggtcgggtggggttggccaaccgggcgtgttcgatccgatacgggtcgcagtagctaaaacctaattatccgctaccgcgactctggtgatggcaatgatggtgatgacgacgatgtggatgatacgtaagccaattatggcgcagttatatgtagctccaaatggactacaagttgccgttctcgctggcacatcccacacccaaaacgatgatacgtatataattatagctgcccagatacacactacacacaacacgtatccgaggcatccatatatactttgtatcttcgagcggttacgctgctgctctttccttggggctctggcacacttatatgttcctgatgttcggggaagtgggtgcaaagaaccagagttccatcagccagctccgctttcgatctctgaaatcctccggcagtagatgccacttgagaaccgcatggtcaagcattggcacttgtgagttaggcacttttgttctattatacatagattgtattcataccaattaatattatctgttcccactcaatgccaagcagatgcatcgaaatgtaagtaaccccaaatggtgaactttccactcaattaccttgataatgttactcagtattagacattcctcaccgactgcgtagttcaacatttagtagctgcatattgttcctattcagcactttgatcttatatgtttagcatgtgttttgggtctatcagctaaaaacattcctttggaaaccaatgattaagagcttttaagtacattcattttttgatttctgcttgaacagattgtttaaaaaacactattctagaacaagtggttatcactgtggggatttttaacagcatgtttctgaaatatgaaaatataatagttttaaattttaaatttataataaagtgacttcttacaggaatcagccatgttaagagataccattatatatcattctttgggatctttggattattgttttttgtaacttgaatggaatgaaacccagttgatcttcatgttgttaaaactcaaatttatttggtgaaagctcaaatattcctcggttccctaaatgtccattggtccgcccgtttggtggtgggtccgtgcgttcaggccgccggagctggtgttgcttcgccctcgggagctgctggtgcaggagtggcggcctcggcggctggagctccttccgctggtggagctgccgccggagtggctccttccgctgccgcggcatccggtgcgggcgtggctgctccagttgcgtctgccgccgcgggtggacccgtgccgcctggcggcaccgtttgctcctgctcggcaatgggttccgcggcgttttccatgccattctcgaacacgggctccgtggtgccaccaccatcacctggagtcggcgcgccctccgcttccttctccttcgagaccccgatttccgttgaattcgaattgtcagctggccgtgaatcgctctccacactttgctctttgatccccgtctcttgcttatccttctggcccgcgtcgtggtggaagtgatgcaagtgctcgtggctgtgtttctggccatccccactgtcctcggcgggaacggcgcacttcatctggttctgttcgcagatgaagtacttcttctcctggcagttcacgtccaggacgacggtgacattgggcctgatcctgatctccaggcagtcgtccaggttggatcgttgagtcggctccacaatattggagtcgcccatgtagcgcaccagtttaccgctgctgatgtacttgaagcgcccctccgactgcagatcgttgccaccgaaccagaagtcatcgaagcccacctgtgacgtcacgtagtgtaccaccgccttgaagtcctccatcgtggacacgtcggccaggttgaggcccttgcgcaggcagttgttctgggccccgaaccagttgatctgccaatacatttcaagcgatatatagttatttcgggactctatggatgggcttattcgaatctatgatagctttattggtactaaaatggctggccaagtatattacaagtgatgggatgctctctcacctttttgatgcccacatagaagcactttccgtttagctccctgagatacggtttgccacagggacccttgtccttttccttcttgctctgcttctttccgcagccggaatggaccgtcatcaaggtcagaatcacaattggtaggatcctcatggctgccagcaaaactgaggcacctgtccggtcaaactgtaagcatgcgtgccgccccctgttctatatataccctttcgtgggcgtggcatctgcattatcgaggagtgaccaatttccattagggaatcgtcgtgtattgttcgcacagaatttttatcgactgctgcagtccatcaaattgattaattctaattggacatggtgatgcccaggggttggtgcatctgtcgttggtttctcaatcgcccacagtattgaaactatgctggtacttgtcagacttccatctgggatgaagaagttcccgaattcactgacatcttaaaagggttcagtaaataaattactcaattgctatccgattaagtggtcaataggtgaccctccacttaaagttcatccccattattttgtatttttcagagatataatttcaatgctctgtatacttattacatgtaaaattcgaataattacatattcatcatcaggatgaattgaacagaaactaaactttcatataagaaactataaagtatctttgcatgtcaataatgccatctttaagaacttatcttatacactggcccttgatttatttgaaagttagaaacttgaacttcgattgaaatttatttaactgctcgtatatttaatttcattcgtgtacccaagccgacctgcacttgaatatatattttaaaataacttgttatattattgctgtcatttatttttaatcgataatagttgtgggcttcagctgggcaagttgtggagatcaggctgctggcggtgccggagtctcggctgctgcggcggcgggtgcttctgctcctggcgcgggagtgggtgcgggcgtggctccgtcggcggcaggagtggcggcaccttcggcagctggagctgctccggcgggtgcggctccttctgctgctggagaaacagcttcagctccggcggcaggggtggcagttgcgcccggctcaccagttccgccaacggtatttgtttcttccgctcccggtgtcaccgagacgccattctgaccaggttgatcgtcatcgggcacgtcgagcgccccgactgcatcctccgagtccggctccgggtgctccactgagccactggcaatggggtcctggcggtcgtggtcgccatcgccatcgccatcgtcctctccttcggcacttccgccaatgtcgtggtggaagtgatgcaagtgctcgtgactgtggtgcttcggcttcttgccactatccgtgccctggcagtagcgttccgagcagatgaagtattgccgctcgtggcagttgtctgccgacaccatgttgatctcggagcggatcctcacctccaggcagtcgtcgcactcggagtgctccagtggcaggacgttgctatagttgctgtagtagcgcaccaaccgaccgttgctgatgtactggaagcgaccctcgtggtacagatcgttgcccccgaaccagaaatcctccgtgttgcccaggccactcaggaacccaatggctccgtcgaagtccctttggttactcaagtccgccagggtcagtcctttgcgtaggcagttgttcagggcgccaaaccagttcatctgaatgggtttcatattatttcataagcccatgcgacagatcaactcttacctttttcaccgaaaagtagtagcacttgccgttgatcctgcgcaaatagcgacgcgggcaggggggtcctgatcccaggagctcgccccgcggcaggatgctcagcagggccacgagtgcagtcaggagatgcttcatttcgctcgcttccgccggtgcacagtgagccggctcaaatcgcctcctgtacttatatcctccgctggccagcagtgcgcccaatcgatttggagctcgctggagctggagcggcatcttcggcagcatggccaattcaattacaagtccatgccgccggaatgcctacgccaatgtcgtgggctaatttgctcacccgccagtgggtcaggtttagggtcattcagtttaattggctattagatacactcgaagaaaacgagccggaaaagtcgcatggggtgctgtaattgccagtaatgttaaccctctaaattccttgatggcaattcatccgcctaataatgggcatattgcgagtaactattatatcatatatagatgttataaaattgtaatacaagtttaatgcaaataaattaaaagattatatatatggttttgaaataagcaataattcttagcagtattctaactcattcgaaggtagcagagctttcttcttctggagtatgatgatgatagatggatataaaatgcttcagttcctttgaccctgatctgtcctcccatttagtttgtatctgccgaagtgagttaattgctggctatgaactcgctggtaatcttcaacagctcaaaaacgctaagaatattaagttctgtgattcgagcaactggagtgacttcatagtcattagcataacccgcccgaagggctagatgtctgacccggccttgttctttccgattattgatttacctggcagggtcgtgacatcagccattggattgtccgtggccaggacacgaatcgcccgcctttccttctgttgccagctgactcagacgaccttcggtcggatgacgattgcgccgggtggccacaacaattcgtggggcgtgtgagtaccacgccacccctttctgccacgcgcgctactctcacatatataattctttcgtatattgtatctcgattgtgcagttgtatctcacatgacatcatcagcaatggcaacaacaacggcggccccagtagctccatcgattcatcacggattgtagctcttttttttaaggcatccagaactggtgtggaacgtgagtcggcagacctcaaatcgcagtaactcatagatattcgttccatgcccgtatgtgtgtccgttccgagctgggttcccatgtagcccaagctacagctacagctacaggttttcctctatccgaggcttctgcgcattatttcagctgcgagtgcgacatcgacgaaaacaaaatcagagagcaaaatcaaaatccaaaactaaaaccaaaccaaaaccaaaacaaaaacgacgccagaggctgtgagagaatctgggcttattgtgttaccttttggccatgcttctagccggttttcagtgttgaccacaagttgccacagttttgaataaagactgaagaacaaaatgcgtcgtattacgcaaatgccttaaatagggccgctggccttaggaattccgcgtgtgtaagccattaagatatatatgtacatatatccaaaggatttggcggggaatattaaacactgcggttgccttatacgtaaggccaccttttttaagtttaataacttatcattctacgaatgtattttaagtatctttaaatacgattttaatttggaaaacagcacaatatacttagcatgcatctctatacatatagttacatattgtacagtgtagattgcacgattccttccacttaaattgctattctagattctagattgttaagcaagtccaatgccacatacatacattccttagccattagccattagcatttgaaatgtctgaattccctttgattcaccctgttttttttgagcagtaaaagtaattttcaacacctcggccgagcccacacattccataatctcgatacccagcaagcgtagaatagaaactattattttcgcacaattttcggctcctgcggtggcgattggctcattaaatgcgaaatgcgaaatgcgaaattggccgaaactaaattatttggaaatgagccgagtgtatggggccattaaagtatctctgcggagagaaccgaatcagaataaacacattcccgatcacaatcagaaagcgtgaatagaccgcactagaaacttgggggcgatttcattcgccggctgcccattatgacatcacatacgccgaataatttgaatactcgagctttgtttgcctcattcgcatacaagcatactgtatattacaaagaaattcctcggctatttccgcccgtttccgtttcgcccaaccgattcgcacccggttccgagttgagcggcacaatgtttctatttgagtggacgcacacgtcactcccagtgaatgcagattcgaggggacagcaaaagctggcgctcgttaatttctattaaattgcgaatataagtctcaagtctcgaattttaaggctgacgccatggggctggcgatcacgatttcaacagcccctagttgcgcagtttctattaataggaaagtgtcccagtctaatcgatccgatttagtcatgtaaatagttcatgctccagctgctttgtttatgtttcggcaattacctgtctggaatttggaatctgaaatctcaaatctcgcatcttcgatctgatcggcgctccaccctgctgattgcaatcaggctataaattataattagcgccaggccagagcttagttagcattcagagggccagtcagcatgtttcctagtcgccaaaaccaaagtaatcccatccagccagcacagtcaggatctaaaatgcactcctcattcaatccccagcttccttgaagaacttcggtgacaagaccgccaacctcttcagcaagaagaaggatgaggccgagaagctggccaacgagaaggctgccgaggcccagaagctagccgaggagcaggccaagaaggtgggccagtccgtacagcagaccaagggcgaggccgagcagttggccgccagcacgggtgagtaacgaacatccaaaaaataatgaatgtaacacataaaagatgtcttagagaattaattggagttattaattctaaagacttccaaaaactcttgcaacgaagaattgaatgagtcccgtttgagataactttcaaaatcaactttcagttcttgctaaaaatgttttctcattagcattccatttccaatttatctaaaacgcaaatcttttaagcatatcaaacacaagagaacttaataaatggaattctttagtgacgcgttgacgtaaaacatgtttccaagaataagattcgcatttttgaaaacatttcttcataaatattgaaatatttctataattgtgaaaagcaatttaatgtgctagagatttataactaaacagaacatcaatgctatgttttatgctggagcaaagcccgaccaattcaataaatatctttaggagcacttttaaagatattttgtaagaatttttcccactaatatctctctttatcatacagccaaggaagccgctgctctggccaccgcggaggctcagaaggctggacaggcgattgaccagggtgtgaaccgtgccgccggagccgtcaaccaaggcaagcaggcggtggacaacacggtggcccaggcggcggccgtggcccagaactccaagcaggtggcggccaatgtggcggaggcctcccagcgagcggccgccaatgcggtggaccagaccaagaaggcggccaacgacgccatcaacaagagcgtgaaggccgccgagaacgtggcggaccagaagctgaagcaggcggagggcgccatcgatggggcactgaagcagaccagtcaaacggtggaccagaagctgcaggaggccaaccagtatgtcgaccagaagcgccagtccgtcgagaagaccgtccaggatgcggccggacaggcccaggagtctgccggacagcaggccaacgccctgttgggcaagctgcatctgggtcagaagtagaggcgtctcccttcgcggtgccacctaaaatatcttgatgtgaaaatgctttagatacaaaaacaaaaaaaatagaaaggaatttgct

SEQ ID NO: 1823 - DNA, 869 bp, DROSOPHILA
tcgacgcagtcggacgtttaaaaataaacgcgctccaccaaaaatacctagcccgctggccgcaaacgcaaataaatctgaacaaaaattcgaattccatccggatcaaacaaacttacaaacccgaaaattagttcttcgactccaacggccgagaaaaccgcaacagtttcaaaatgttcagctcgatttcagcttccttgaagaacttcggtgacaagaccgccaacctcttcagcaagaagaaggatgaggccgagaagctggccaacgagaaggctgccgaggcccagaagctagccgaggagcaggccaagaaggtgggccagtccgtacagcagaccaagggcgaggccgagcagttggccgccagcacggccaaggaagccgctgctctggccaccgcggaggctcagaaggctggacaggcgattgaccagggtgtgaaccgtgccgccggagccgtcaaccaaggcaagcaggcggtggacaacacggtggcccaggcggcggccgtggcccagaactccaagcaggtggcggccaatgtggcggaggcctcccagcgagcggccgccaatgcggtggaccagaccaagaaggcggccaacgacgccatcaacaagagcgtgaaggccgccgagaacgtggcggaccagaagctgaagcaggcggagggcgccatcgatggggcactgaagcagaccagtcaaacggtggaccagaagctgcaggaggccaaccagtatgtcgaccagaagcgccagtccgtcgagaagaccgtccaggatgcggccggacaggcccaggagtctgccggacagcaggccaacgccctgttgggcaagctgcatctgggtcagaagtag

SEQ ID NO: 1824 - protein, 230 aa, DROSOPHILA
MFSSISASLKNFGDKTANLFSKKKDEAEKLANEKAAEAQKLAEEQAKKVGQSVQQTKGEAEQLAASTAKEAAALATAEAQKAGQAIDQGVNRAAGAVNQGKQAVDNTVAQAAAVAQNSKQVAANVAEASQRAAANAVDQTKKAANDAINKSVKAAENVADQKLKQAEGAIDGALKQTSQTVDQKLQEANQYVDQKRQSVEKTVQDAAGQAQESAGQQANALLGKLHLGQK

SEQ ID NO: 1825 - DNA, 4903 bp, DROSOPHILA
ttaacacttctttggctccggctgcgaatattaaaatacccacttaaggccaacaataacagcggcaagaagcagagaaaatgtgaaaaggaggagctagaattgaactcaagtactttcgtctcgcactgaaagaaaaaaatacatttatgtatgaatatgaaaaaaaaaactatcttaatatcatagtgctattttatttacatgaaatctataaactaaaatagcgactcactaagcgtgaaaaatcgaaatagatctaaataatattatagccagcatttctcgcagtgcacaaacatgatctggcattggcgcccgtgcgtctgaatatggaaatcgaaatgggtccgagtatgggtgcgttgtatatggaatgggatgggatgtggataggaggacacttgagttttaggccgggcttatctgcattctaggcgaagggaggggaagcgaaaggaaaggaaaccactcgacggcgcacttgagaagcgggagaagcaagcggcagtctgctgcatggatattaactaattgtcggccacaaaaatgcatgggaaggcgatcgcaacacgccatttaacacatttgcacgcttccaaagtgtttccttttcgaatttgctttgtatatagtggtttactctggcgagtgacgggggtatatgcattttattttttagtttgggttttcaatttaagcttaagatgtgaaaatctatacttatacttgtctatactcattatttccgattaagctttctgcaaacgttcgcttactttcggttatacaataaataatgttaaaaatctgaatagccttttttctagatgtaaaatgtagaatattttgaatattgcgccaacagtgtgacccctgctagaacgcagaaatgtttttttgcgagtatgtggcaacgttggtcgtaagtttttccccatgcgcgaacggtctcaccgatttcctgtaatgcatcatcgataatctatcgattgctgagtagtgcaaaaaaagtgggcaaaaaaggtgcaatgtttagcgtttaagtgcgttaagttgcttttgcggacgacaacaacaacaccagcagcattgccggtcaaattgatctaattgattttcgggcagtgccaacagcaactaaaaccaaattaataaatgaatccctgcgcatacataaacatataaaaacacacacacacacacatacattcgcataaaggacgcgaaccgaaaagggaaaaacaaacacaaaggaaaaaaaaaggaaaaaggagagcgcagctttttcagaaattgggtcatttgttgttgttgttgttgttgttgctgctgttgctggtgattttcaaacgaatttcatttgttgctgtcgtcgtcggttcggtgttgttgttgttgttgctgttgttgcaatggtcgtggacgttgttgtcgctgacagctaaatgttatggcaacacttgcaacctgaattcgtgtgggtaagtagtgtttgcatttatgttgaatttattttaacttatataccttatacttaacttatttttgtgcttttcgccaaataactattcatatttggcaaaaattaatagtgaggagcggaaagcgaaaggataatagggtagcggagacgaagccttatatttccaccagaaaatcctggcacaatttatgacaactctacacttgtgtgtgtttgtgttggtgagtaacttaacaactatgacttcttttttttttttttgctatgttaaaaaaaaaatgtgatatttcattattcagtttagtttgaagtaatagaaattcaaaagtatttgtgctatattttattatttactccctaataaccaatgcctattcctttctattcgcagagtgagacagcggagtagcttcttcaaatcaaaggataccactgcagcagccatccagccaggagccttaaaaaagctgttcagcttgagaaatccgaaacgcagactatagacaaataataccaccagattcattccgtgcacaatgagcgtggtgggtaagcaactaaatccggtgcaatcctccggtgcaggcgcagtgacaacgtcttcctccgcggccgcaggatcctcttcttcgaacagtggagtggaggccaacggcggcagtggaggatcgtcgggagctgcagcagcgggcgctggtgcctccggtgatgccaaacggcctgcggagtcttccagcgtgactcccgacgaggtgctccatctgaccaagatcacggacgactatctctgctccgccaatgcaaatgtgttcgagattgatttcacgcggttcaagattcgcgacctggagagcggcgctgtgctcttcgagatcgccaaaccgccgagtgaacaatatccggaaggactgtcctcggatgaaaccatgctggcggctgccgagaaattgtcactggatgacactgccgatccaaatgccggacgctatgtgcgctatcagttcacaccggcatttctcaacctcaaaacagtgggagccacgtaggttatacagtatttgcatttgttttaaatgcctctcaatttgtaagtttcccttatttgcagtgtggaattcactgtgggcagccagccgcttaataattttcgtatgatcgaacgccacttcttccgcgatcgcctgctaaagacgtttgactttgagttcggcttttgctttccattttcgaagaatacggttgagcacatctacgagtttcctaaccttccacccgacctaggtgagcaatttttacataatcccagccagcatgacacgcaattgaaagttgctgccaaaagttgaaggggtttgtgggtcaaggtcgtttacgatttgcgcctgtgagatgaggcttctattggtcagattgcgagcagctatcatggtttttattttttgttatcggtttgtaggatgtggacttattaatgaaatgcaattcacataaatatgttcgttcgttttccatttttttttagttgctgagatgatatcgagcccctttgagacgcgctcggacagcttttactttgtgggaaaccgactcgtcatgcacaacaaagccgactacgcctacgatggcggcaatatagtctagaaactcaactataatggaactgcaactagagcaaaactaataactaaagaactagaaactacagaagctgtgagacaaaatcaatgacttgtcacacacacacacacacgaaacacccactcaatgtcaacaatcacactcacaaacacatcgaatcgaatcgaggaatattatcacagccattttagccttagcacaccaaagttttacccaccattcctgtttgatgtatttagcatcaagatatgatctcctgcaaacggaaactaacacacaaacacaacaacaacacactgaagcacgcggattgtgttcatttatcaatgatttccactttgactatataattttaagtgctatgtgatttcccttgatttatatatgtatttgtacacacttatttaatcctaataagtaaggacactccacacacacacccaacaagaaacaacaaatacatatatataaaatacgtacgtatacacacacgcacacacagaacttatgagaagcgaattggaaattttcaaaaaaaaaaaattgaggaaaatccatttgccgtcaatttttgtatgcagcatacgaaatcatacgaaatctatcagcttcttcatggcatttttttcgtgtctgtgtatgtatattttttaaacaaaaaccaaatggaaaaagacgaacgtaactggaaatccaaaaaaaaaaaaacactaacgattacacgccgaacaagaatgataaattaaattacattttaaatgtacatacaccactataaattgaaacttttctaagggggttaaatcgagggcatttcgtgcactaaaggtgcttaagaaatttattatattctgaaaaatcatcaagttcagaacgcttatatcaaaaaaaaaaatatatatattgctatcccgctcttttcggtgaagattcttgaagatctgcgtagatcgttgaagaatgtcttctcgagttctgaagtgaaattaatttgaattcccgttcccaagaaaaacaaagcgttcactttccaatttagctaaagtcgatctacgcgattgacttctttgtacatttggttaaaatatcaaaatttggtctactcagttctattcaggaactcgctgactattgttagaaactcctgcggcttttcaaagtgcactaaatgtccggcatccagccagtggatctcagaattgggaaacattttctgtatctgtggccattgctcgcgtctaataaagatggcaaaaagattcaattagtttagtttacttagcacctcgggatccaagttacctcatgtaaggtgatcgcgtgccgcaaatgaacgtagtgggtcccgtgtacggcggcagttcctccaaattactctgatatttgtcgaagcgggtgaggaattcacgaagaacatgggcattgcaggcccaagagaaactataggaagattatctcattttaaagcggttcccaaaaaaggccaaatacatatgtggcaaacttacgcgccggtgtcaggattttttcggagattcagcatgataaagtcaacggtctcgtcttcggtggctttcagtagtttttcccgtgcaattttcctgccctcagacatggacatgcttggcgaaaggtccagggagaccatcgcgtcgaaaatttccgtcatctcgcccgtggaacggggcacgctaattggcgatatgtccaccactatcaaacgttccaccaactcgggctatgataatggaaaaatgattgtttaacatttaactcagt

SEQ ID NO: 1826 - DNA, 2315 bp, DROSOPHILA
tagtgcaaaaaaagtgggcaaaaaaggtgcaatgtttagcgtttaagtgcgttaagttgcttttgcggacgacaacaacaacaccagcagcattgccggtcaaattgatctaattgattttcgggcagtgccaacagcaactaaaaccaaattaataaatgaatccctgcgcatacataaacatataaaaacacacacacacacacatacattcgcataaaggacgcgaaccgaaaagggaaaaacaaacacaaaggaaaaaaaaaggaaaaaggagagcgcagctttttcagaaattgggtcatttgttgttgttgttgttgttgttgctgctgttgctggtgattttcaaacgaatttcatttgttgctgtcgtcgtcggttcggtgttgttgttgttgttgctgttgttgcaatggtcgtggacgttgttgtcgctgacagctaaatgttatggcaacacttgcaacctgaattcgtgtggtgaggagcggaaagcgaaaggataatagggtagcggagacgaagccttatatttccaccagaaaatcctggcacaatttatgacaactctacacttgtgtgtgtttgtgttgagtgagacagcggagtagcttcttcaaatcaaaggataccactgcagcagccatccagccaggagccttaaaaaagctgttcagcttgagaaatccgaaacgcagactatagacaaataataccaccagattcattccgtgcacaatgagcgtggtgggtaagcaactaaatccggtgcaatcctccggtgcaggcgcagtgacaacgtcttcctccgcggccgcaggatcctcttcttcgaacagtggagtggaggccaacggcggcagtggaggatcgtcgggagctgcagcagcgggcgctggtgcctccggtgatgccaaacggcctgcggagtcttccagcgtgactcccgacgaggtgctccatctgaccaagatcacggacgactatctctgctccgccaatgcaaatgtgttcgagattgatttcacgcggttcaagattcgcgacctggagagcggcgctgtgctcttcgagatcgccaaaccgccgagtgaacaatatccggaaggactgtcctcggatgaaaccatgctggcggctgccgagaaattgtcactggatgacactgccgatccaaatgccggacgctatgtgcgctatcagttcacaccggcatttctcaacctcaaaacagtgggagccactgtggaattcactgtgggcagccagccgcttaataattttcgtatgatcgaacgccacttcttccgcgatcgcctgctaaagacgtttgactttgagttcggcttttgctttccattttcgaagaatacggttgagcacatctacgagtttcctaaccttccacccgacctagttgctgagatgatatcgagcccctttgagacgcgctcggacagcttttactttgtgggaaaccgactcgtcatgcacaacaaagccgactacgcctacgatggcggcaatatagtctagaaactcaactataatggaactgcaactagagcaaaactaataactaaagaactagaaactacagaagctgtgagacaaaatcaatgacttgtcacacacacacacacacgaaacacccactcaatgtcaacaatcacactcacaaacacatcgaatcgaatcgaggaatattatcacagccattttagccttagcacaccaaagttttacccaccattcctgtttgatgtatttagcatcaagatatgatctcctgcaaacggaaactaacacacaaacacaacaacaacacactgaagcacgcggattgtgttcatttatcaatgatttccactttgactatataattttaagtgctatgtgatttcccttgatttatatatgtatttgtacacacttatttaatcctaataagtaaggacactccacacacacacccaacaagaaacaacaaatacatatatataaaatacgtacgtatacacacacgcacacacagaacttatgagaagcgaattggaaattttcaaaaaaaaaaaattgaggaaaatccatttgccgtcaatttttgtatgcagcatacgaaatcatacgaaatctatcagcttcttcatggcatttttttcgtgtctgtgtatgtatattttttaaacaaaaaccaaatggaaaaagacgaacgtaactggaaatccaaaaaaaaaaaaacactaacgattacacgccgaacaagaatgataaattaaattacattttaaatgtacatacaccactataaa

SEQ ID NO: 1827 - protein, 265 aa, DROSOPHILA
MSVVGKQLNPVQSSGAGAVTTSSSAAAGSSSSNSGVEANGGSGGSSGAAAAGAGASGDAKRPAESSSVTPDEVLHLTKITDDYLCSANANVFEIDFTRFKIRDLESGAVLFEIAKPPSEQYPEGLSSDETMLAAAEKLSLDDTADPNAGRYVRYQFTPAFLNLKTVGATVEFTVGSQPLNNFRMIERHFFRDRLLKTFDFEFGFCFPFSKNTVEHIYEFPNLPPDLVAEMISSPFETRSDSFYFVGNRLVMHNKADYAYDGGNIV

SEQ ID NO: 1828 - DNA, 4064 bp, DROSOPHILA; identical to SEQ ID NO: 4

SEQ ID NO: 1829 - DNA, 1758 bp, DROSOPHILA
cgacgtcgagcaaggcaaagcgaaaattttcaccaccatttttcgtttgtagtttcagttcacttttcgatgttgtggaaatcgctgattgcgttgtgcgtcattggggctgccgtggcggagcaaacgcccgtctttttgtggggagccaacagtgtggcgaaaccctccctgaagacggtgtcccaagtggagtttgccgagcagttggctgcattgctggaagatcacatggtcgtggccttcgaggaaaatggcctgagcagcaaggacttcctgtgctccaactcccaggcgcagtcctgctacgcccagctgcagggagtgagccccaagacctactacaccagcgtggagaacccctcggaggcactgcgctcagtggccgccaagcgcgagcacaactccatcgatgccagtggaaagctgaccacgccggccaagtgtgccgtaggtacggccctgtttgtgaccttcgaggacgccgccgagagccgggaggccagtctggagtcacatgacgccgccatagctgctatcagcaagcagttcgagtgcaaggtggcttatctgtacctggccgccccctccacggctcctgtggtgcagcgtcgtacccgccgtgacaccgccgccacaaccggtggcatcatgtggaagtcgaccaatcagtttcagatcttctacactgccctgctctacaacggcaaccccatcaccgtcaccgacctcaagctcaccaactctagctctaccaagctatccgttgttatggacacatctgtcgccgacaagccaatcacctttgacgttgtttataatggcggatactttagtctgagcaatttggtctacgacaacaacaacttccgctccagcggcgtgaatgccccaaccacgttctcttactcgtgcggcaacctcaccctcgagtccgcggccgtcaacaacatgtacaacaccctgagcttcaagtccctgcagctgcaggctcccttcgatggtacgtacaaggaggactttcccttcggcgactcctgggactgtgtgggcttcgtgacgcccggtatcctgatgggactgtttgtggtcgccctactgctggtcatcatgttcgtcggcgtctgctggatgatggacatcaacacgatggaccgcttcgacgatcccaagggcaagactatcaccatcaatgccgccgccgagtaaaccgcctacatcatcggttcacaccttatttgattgttcaatgcgcactcaatattcattcctttattccttcagtctatccacatgtatatgttaacgaatcaatacttaataccgtacacgcattacacataacacataaccgggaaattagtcctcacaatttgtatcgtatccgtaattttcgccgccaaggatcagtttacgttcagcatcacagcgttgctgattcttgtcgccgacaaattgcctgaggttttgcttgcaccgacgcagcatccagtatttcatttagaatagcccctaaatgtcgtttatcgaaggaactttaaaagacgcacatgtgtgtgtgtgtttaagagcgcgcgcgtgtgtgtgtgtgcacatgggcagtaaatctaatccgaagtatatctaagtgttttatagtttcttgtttggcgcaaatatgcgagactaatttatgcctctgtatgatagtttgtcatttgtgcaaccctcctgttgttcgcaggcccaacgaaaataaagtttttttcaattgtgtta

SEQ ID NO: 1830 - protein, 379 aa, DROSOPHILA; identical to SEQ ID NO: 6

SEQ ID NO: 1831 - DNA, 15833 bp, DROSOPHILA
tgcaccgtccacagcatgtcttggccaactggataagctgtgcgctgtgggctgcgagccgtgtagcaccagtgtgctgtgcgaggagacggagatctttgctttgggcccaagctgcccgagcagcccaagcagccaaaacacacaaaggaaagcaagtgcgccgcagttgtcgctccttttgggagcgggggcagggtggtgcgggcgcaggtgcgagcaattgaaggccacacaggtataaacactgataccaagcgctagctgcgctccgctctgccagttttgccagatgttgaaacgaaacgaaacggatcgaatttttgaacaacacaagcacacagagttgcgtgcgtgagcggacgcacgaaatagcagggctccactgggtcgtgctgttatcgatatcgatagtatagatttctgattgacaattgcatttaaaaaatgacaaattcgaaaatccaatgtatttgcattaaatatttagctattttagcgaaacagttgcaatggcaatgtgcatttacactagattgatttttaagatgaagctccaaacaatgaattagaatattctaatgtctttggtcaatttacctgaactttttttcactcaatcacaaattctcattgaatattcttagtttttgcaagcttagttgcgatatttatttactgttgtatatatgtgtttttatatacgtcaagtgtttgtgtgtaaattagattgattgtagtacaaaagttataacaaaataaataacaagaaatcatttaatacaatattacgcgaacatacattatatatgatgcaatctatgcacattttggtttacgaatagtggtccccatgtgtctggccacaaaaaaataaagggacgccgcagcgggattggtacgaaaattggaggcaaatcaaatgctacgattgcagggaaggggtgggcgggggggttggggtgtaatggaggaaatggggtattcgaagccccgcctcctatacattcgtgggcgcgtccatgccgcagataaccgacttaaccaccgacgccgccgaaatggcagcgaagttttgccacttcctggtggacgtgccgtccttgtagtcagcgatgcccttcaccagtataaagctctctctgcaattgccaatgatgctgtccagcacgctgctcatctccacatcggtggccagtaggccgtacttcctggcgaactgggtgcgcagctcgtcgctcctcaccagatcccttccggatccaatgggacccagatggagtcgcaaccgattgacaccgtccacctcgtcggcggcaatgggatgggccacctcgatcacctcgttatttccaatgttcataaacagtttgtccgtccgcgcgtccggccggttgaagtcggcatccgtcttctgggccaacgcctgttgggcctggttcaggtagtcctcccacggccgcttcacctgcatgttggcctgcaggctctcggcgatctgctgcagcgaatcgttcaccgggaagtaggtcttcacgtcctcgccgctcttgtacaagtacacgtacggtttctccttgctgtgaagagccatacatgaatgcgattgatagattgaagattttatattcgtgtaacttacctattgctgatcagtgcccgctgtttgtccacatacgagatgaccacatcgcccagtcgcacgtgcttcttatagtccgtgtagtggggaacgccaccggctacgcccacgatgaaaacatagtcgaccttttggaatgtgcccaacagacgggttgtggtattgcccgtcgccgtcatcgcctcccgattgctgcccaccgacgggagcttggtgctcacgatcctgtgcgccccgatattgcccagagtatacacattcgattcgcctgtggagtagagagaaagtttggatcaattgattggcttacagaaagcggtttacgttcaggacattgatagatacatatataccaaattatacaaagaggaatgaaaagaacatgaaataaggaacaaatcatatttaaaaaaagaaaaagaaacaccaattataattttccatacatcccatattcttttgcgatcaaaatacaaaacataaaccaattaatgaaccgagtgtgtgacggatctaatcaatccgtctaatgacgtagttacatgtgtatatgtacaatataaggtcatgtatcctggggcaatcctttaccataacaacaaaacaaatgaaacaaaacaaagcaccgacgacgatacagcacagacacacaaaggacacgaaagttacaacaaatcgaattattctaggccaagttcataactttctatccaagtttatggcaactcattcgcgtacagtgcgcactcgatacatgcgaacgctccatgttcaatcgattgcattactattgttatttttgattcaaagatgattctttagagtattaatgatctaaaaaaaactcatgaacttgaccttggatatacatatgggtgcttctgagttaaggagtggattctggacatttagcttaccgaatcttcgtttctttttggactttctgagtgagttcgttagattgggatcggaatctgttacatggtttggtatttttcgattcgggggaaaggtgaaaggtttgtatttaattaatatcattgcaggcaagtaaacatcagcaaatttgtatgcaaattcattcgtttatggcgaaattttcgtggtgatgaggatatatatatattttttttttgtttccacaaaagtcgaggtatttgggatacagaagtggaaagagagaaacagagaaaagacggttagacgagagtttgattagtaagagttgagggaaattcgattcgctatcgaactgaactgaactgaactgaaccacctaccgactgtggtgtatcggacgaatgtctccttgttctcgagcattgcgtccacggcgagcttctcgcaatattgcgccgtgatgatggcaatggtgggctgcttgttggaggcgatcgtgggcatctgcttgaccaccttaatctccttgtcctcgtgatggatgcgagtgtacgcattgtactccatcgacttgatcagaccgcgctcctgcagtgacttgatcaccagcagcacatcctgctcgctccagccgtaatccctgcattaaacaaaatgaattaattacatctcaggtctagacttcaaacggatcttgatgtactcacttggccagatcctcgggggacacgggattgggatatgcctgctcgatgagctccagcaccttctcctgagtcaacggcggtgattcgaactgcgattcctcgagcgaaactacggggatgagagcaaaggaaacaacaaacacgattaaagcacaatgtctgggcaattcccgctaccaatggttatacatttagcaaggactcttctgttagcgggcaatgacatctactctgagcggtgggcgtggctggttaggcggtgtctgttagtaaaggaaacgcacaggcacacgagcacacacacacacagtcagacggctggcagggcggtcaattaagtgctcaagcagcgcattttaattgcagacagcagacaaattggacactcgagatgtcaactgcattttgaggataactaaaggggtagggaatgctttcgggagtttcaaaccagcacaggatgcggaagacaacagcacaagtagaaagaccaaaattgcagggtattattttttccgacagatttccaagtgtagattcaccacctagctgaattagcaatggaaactcatgtggcatccttgtggatttggagcagtaactgcagagcatttgacactagcaattttattttattttatttcgcttttttacatatccgttctttgtttttcaatactctgaagtgcacaacactttttgtgtacatatttaatgcgttctgtttttttttttagtgagtttttagtgcgtgcattagtacgaaaaggagaaacgaaataaaaaaacgaacgaacaacaggaaaggcggcgaggaaatgtgcaacgaagcggatacaaaacgaagttcgttgagcggattggattagatgatgattagttgtggggagcactggagcagtgggccattggaatcgggattcatttccgccgggcgctcagctgctcggtgtacatgtccagccaaatggccttcatcagattgtcgccgtcacctgtctttcgctgcgccatcagcgcctcctcgaactttcggttgcagtcgccgtagcagtagatgatgtacccatcccgggctgatatccaaacaaatagaaataaccacccgcacagcccagaggatagatggagccatgtagttcagatgaaaagtcaatttcgcatactacaatcgactcggaaagttaagtaagacatggaatttgatattcaccgagcaaaaatgcataaaaataggctactcacaatatgcagtggcataaatttgattcaaatggtacaataactcgaatatcaagttccctcttattacatccgcatagaaaggaatagggtatactcacgtggtcgcgagggtggtgcggatgtctcctccaggatgcgcagctcaatctcgatcgactggatctccgagtatccgtgctgcaggagcttcattatcttcttgatgaagcccacgtagtctgtaaagagaaataaaaagcaaatcaagcaaacctaaaacttctcataaccgccttctttactttgataagaagttctggattttcttatcatatttaatacaagtaaaccataaaccatatgtatacatttaatagaggcttgaaaccattggttctactatcaaaccacaactgctttcaaatcaattcagacccacctctgggaaagtcctgcggactgaccagctccttgaagaagtcctgggctatgtgcgcctgcttctcctcgttggtcagccagtcgcggaaccagaagcgcagggtgcgcgactcctgcgaatgcttgcccgtattggcgctgaccagaaagacgcggaattccagcgatagcgctgccgccttgctggcgctcttctgtccggcgaccgtgtccttgttaatgatgatgcccgtatgatcaccgccggcgacatgaacgcgatcattgatctcatcgaccagtttgcgttcgatgaggatcaccgtactgttggccgttttaccgcgtggcgtcatcacaacctgttctgtgcgtggtggcgactggctcctttgaacgccgctcgagttctgagccagcggctcctggtcttggactgcgacaattttgttatagtttttattgccattcggcagggttccgttgccagtgcccgttcctatgcctgtgccgttcccaataccatttccattggctgtctgcgatttgtttggcttggggggcggcggtggcggcgccatctgtatgtgactcctgcgctccgacatggtgctggtgctagttgctccgccttgctcctcctgttccttggtgctggaactgctgctccttcgatccgatacgataccgctgctccggcgacgtccttgagcccaaacttgctgctgctggtgctgccgaaagaaagcaaaagtcgactgtcattagtggctgacaaacagggaactttgcctacggtggacacttatttaataattaagtatgatgcaaaataaacaaatttctagcataagaatatctaaaacttagtttctatagtttatttgttttctggcttcaagcaatgtaacccatttgccacacgtggcagttaaaatatcgctagtagcgactctgcactgtgccagctgtatttttagcccggtactcggattaccatattttgccccacccgaaaccatcggtcatatcaaatgtaacctgtacccttcgacgcctttggaattcggggcttctttcgcctgcctgtctgtctgtctgtctatctgtctggcagtgggccaaacaaatttagaattcataaataatgggtgtcataaatacgaaaccccctcaccatcctcccccctttttggccgcttactgcgacccagtgacttcgattcgggcctacggaataatagcactaaaagaaaccaaaacagaacgccaacggaagaaaatcaataggaacgtggtaacgccatctgcatgacaaccataaaaattagggctacgaatggtttacaaaaaaaaaaaaaaaaaaaaaatagccttgggtcaaccaagtcaacctgccaccccacagcaattaaaggcaaaagccaacttccggccaaatgtcaccaaaagggccacaaaaaggtttttgaactcgcccagggaaatggcgacagagatggaaaattggtaagaaaatggggcggcggtgtggtgttgttggtgttttccttgggggttgagctgccgctaaatttgcataggacaaacaacaggagatttcgccccgcgggaaaacgaggggcgaatgaactgggcatgaaaagcggaaaatgcagggtatatgaaaatttacatttttcaaatgccagttcgtggaattctcggtggtcccaaaaggatgcatgtatatatgttctttatatgtttgggttccaaaacaaagacattagtcatgtgaattaattcggctttttgtttacttgccgctgagacagaaagttattgttattattcaattgaaaatatagaaactccaaacgcacttattacatattttgtttttctttttttaggtctgcactttgtgcgctgaatgagacattattttatccattccaatcatcccgttcacttaattagattaaatcacttcagccctcttcaattttcatcgccaaagggtgcagcactcgaatttcacggccggaaattattcgccggctgcaatttcaattaaaaacactggcaaaacaataaatattatatgatcagatctcggatcaactgcagcacagcacagtacagtgcacacccgcttggaagtttggaagtgcattgcttcacttccgctggccaacgggttttttttttttttttttgagttcgttaatttgccgatcttttttttttttttttgggcgacgtccgatatggaaattcctatcgcaagtgcctggcgatgcgtaactgccacaactccagcgtatcccgaaaaggggcaaaggcaaaggcctaagggcttggctccccatcgaaaacccttcacgcttgacagcatcccagtcacgtgtcttgtaactaaaaaaaaaaaaaatatagtagctacacattgtgcagatactacgaaatcaaatttcatactataactatatatggctgaataaaaaacaacaacagcacacacacacaatttccatcgttagtgccttcctccacaacccacagttgttgaaaaccactcttttcacaggctcacttttccgctttttcccactttacaaatgaaggaaaatgttggaatgtgtgcaaattagccaagtttattcatttataatttaaaataaatatttactcaaacaaatgctttgtttgctcatcgctgataatggaacaacaacactcgatgattaactcatatacgtttgttgattgaattcagctagtgtgctgtaagttttaaatagattcaagctgcatttaactgcactattttctcgcagtgtgccgcttaagtgaggcgtggaccaaaccgggcaaactcagccagaaagtgggttgtccgtgggcccacacatgaaactgtcatatgtagacacttttcgccggcaatttcctgtttgccacattttttatattttctttttttttttgcgtggggctccctcatttgtgtacttgccccaaagaagttgcatagtaagcgcccgaaaatcgagaccaaatctcaatattttcgcaaactgatcgcatggtggattcgttttcggctactgcaagcgtaacaagcgctaattaccgcataatttcagttaatttcagttccctttgccgtaattagcaaaaaggggggcgagaacgtgactcaaagtcaaagtttcctcctgaaccgcgtcgcttcacaaacgaacgcaataagctgcaaagtaaactagtgtacttagtgactcacggcggcaaacgtgattcgatcgaactttgttgattcaatggttaattgacaatcaactgcattgacctgacttatccggcgataagagaagatatagtcgcagtacatattactacatacatctgttctcatcgattcattgggcaatggaagagatatatgtagatatgtagatacgtttgtctgcatcttgccccatcgagctgtaaataaactgtatctacagtcaaaccgaatctctggacattttcatagtctcgtttcgcatgtcaaggtttttcgaaaatcaacctgctgccttcatcggaatggctgtcggttgtttatgaaaccattttgaaaatgttgtagccatatttttgtagcagcttcttgtggcaatttattggaaacaagaaagaaaagaaaaacaaacaacaaatttggcaagaaattcggtatcgcaaatagaggcaagtgttcattagaactatatagtgtgatcttaaaaatatacttctttatcgaatagttgcgtgcctcgaatgatatgaaactaaaagcagacatctaactagcgaatggaatggaattcatgacctgatctttaactgaaaatcgaatttgaatacaaattcaatcagtatttgcatatctatgcataacgtttgaaattgtttttccatttcggttaattgagttcgttcgatcgttctatttgattttaatttggctaggcggcttgggcttgtgcgagaacctcatcgagattgggatttctcgaccaggcccaaccaaatctgcaatgacgtcagcccctcaaatacatatatacatatatacatatatatataatgagtgtatagtattgtatttcattatgatgacttttatcgcccgtgacgcaatattcgtggcatttgcgactattgaaatcggcaaaccagttgccatctgagcgctctgaccttcaaaagcaaacaatctgagcttggaaaagaacacgatagctcgggaaaacccatctagtgcttatcttcagctttagtgggccactccattgttactcacatattattctatgtatgtttcgctgacttgttaccaagagatcatcaaattaataaacttcctatcgtcagtttgtctggactttcgaatcgccgagtgaatcatctgccgccgaatgttgcgcaaattggaaaaatatttatgctcagatagcaagatttatttatctttgcccaatctctcgtcagatggctcacaagaactattcatcgagtctcttgtgtgggcgataggggaaaaacctaataatacaataataacattaaagttctcgggcgaatcggtttgatgcaatatttttggggcggctcttctgttctgtggcgacatcgctgtggcatgcggcattacccatgcgccccactacccaacatcaattggagttctacgagtggatcattcgatcaattagccgcggatcaatactcggatgcagtgcgtgggttccaattaattccctcactcctcgaaatgaccaaactccatcatggccactacatccccatttccatgtccgctggcttttatgccctttgtgcacggaatagaaatgggattattaatacgcaacatgtgcgactaatagatacactacgcaatcatttgaaaatgctttaaatcggaaacaagcaaacagtcgggctaacttctaatatattttcttaaaatctatattaataaatatgcctatatcattactaatctaataacgtgatttgcttactcttttaattacatgtatatactattcttactaatcagattaaatgaacgtgtctaagaacaataataaccctttgcaggctgcacaataatttcctggccatatatatagtttggaaaatcgtatgaaagcaattacagaatgcgtcctatagacgatttccattaattcttaagcaaaaacccttaagatacgtgctagaagtgcattcgttaataagttcactcgaacacgcgagaaaagaaaagtcggcttccctttgctaacacaatacacaaggcaatattctgggaattagcgtggcaaagttcagagcaccaccctcttcaaaacacaagaaaaaaaaaaaaccgtggtggttggtgggtttgggtggatttggtggtgctccataaattagagcaacttggcaatatgaccagccagtcggacagttttatggccacggaacatagaacgcacatcgaaaatgcagtttacaaatgcttgaaagacccccgcttttccacacacacacaacccccatcccccacccccctccccaccatcgatttcaaagaaaaccccttttcctttttgagggcaaagttctttaatgtgccagtgggcggttttcgcttttgtttgctgcttttctttttaaaggagcgtcgattagaggctaattaaggcgtcattaagtggcctagatagcgattaataaatgaaatcgattaataaattaaaaataatgccaatttggactaaattgccatgtttaaaacgcgattttcgacgtaaattaatcaaaagtggtcacagaacttaaggaagtaccgttttttaatccttattaccaatactaaccattcgtatcattttttgtaaaataaaaatttgaccaaatttttgcattttctgtaaggggtaacatcatcaaaatttgcaaaaaattgaaaaatcttagaattcccaaacttgaatgcaacgaggtatgacattccgtatttgggtaattatttccaatgttatgatcaaaataccgaatatttttatcaccaaaaatctggaaattattcttggcaaaaaactcaattttcaagttggcttttttggctataactcgactaaaaatggtcacagagcaaaaagaagtaccattttatactacttacaaccaatactaactacccctttcacttttgaactgattttgtaaaattaatttttggccaaattttcgcatttttgtaaggggtaaccatcatcaaaatttgcaacaaattgaaaaatcttagaattcccaaacttgaatgcaaatcgattggaatttaaaaaacaaactcaatgaggtatgacattccatatttgggtaattatttccaatgttatgatcaaaaaaccaaatatttttttcacaaaaaatctggaaactattcttggcaaaaaactgagttttcaagttcgcttttttggctataacttgactaaaaatggtcacagagcaaaaagaagtaccattttatactccttacaaccaatactaacaacccctttcacttttaaactgattatgaaaaattaatttttagccaaattttcgcattttttgtaaggggtaacatcatcaaaatttgcaaaaaattgaaaaatcctagaattcccaaacttgaatccaaatcgattggaatttaaaaaacaaactcaacgaggtatgacattccatatttcgaccattattttcaaagttttgcacaaaaaacagattttttcgaatcaaaatttgccaattaaatgccaaaatctaaagtctaaaatttgattggcgatcgtttgaaaatcgaattagaaagaccaccaaggtacgacactccattgttggtgcattcttatgataaggatattgttacgaatttgctttgaaggaatacaataatgggcatacaaagttgcagcaaggcccttcagattcaggtcacatccactcgcatttccatgtgcacaaatatgagcatatttcccccagctctaatattacaaaacaactttcaaatgggccgccaaacgcacagaaatgcgggtgaaattcgcagctcatctcgaattgcatttgtttatcgacaagcgacaatgaggttgaattccccatcgtcccgctgacaaagcatccacatatcatttgacaccagttgcagttgcagcaacgggcagccgcacgcctcatttcatccatgtaaaagtggcaacgcgatcgggccacaaatggcagaggaactcaagtcaggagaagattgagtggagattatttttaaatgccgagccggacgattgaccgaaagaccgggcaaccgggcagccgggaatccggcggagtggcagtggttgggactcccagttgaatgacccacacaccggcgccgaatatatatatgtacatatacatatatatatgtatatatcgaacagataattataatgagagcagatggtctcgtctcttcgggctgaattctacatagtaagtgtatatgtacatatgtatgtatctgaattggtaaactcatcaaatatatatcaaagttctaagtgaagaaatagcatagaatagttattagaatattattcaagaagttatttgagcgattatctagttttttcatgattcatagctgtcgaaaattctagacaatgagtgaaaatagatgtggcatctaagattgcctagttctcctgaatcttttagaatgtgcaacaaaattgcctgggcacaaaaactggaaaaaaaagccaaaaaaaaaaaaaaaaaaaaaaaactgtgccaagtaagcaacaataaatatgagaatgagatcatttttggacttctctcacgaatctttttctttttcagtttcttctcgctctgctcgccgttgtatacattttgttaaccaaatgtttttagcatcgtagaaattgttcgaatttccaccgactggaagagcggaaatatacacaaaaaaaaaaaataaagtgcggataacgtagaggggggtaaatgcaggtcagacgaatgaattagaaacaaagcaatggcaaataaactgcgacaacgaagcggaaatggatttagataaaaccagtgtaaacaacaaagagggcaaataatgttatcaaagcagcaagtgcaaaatgtaccaaatacaaaatacgaattatattcaaataacaacgaatacccagactcataaacggcaatcattccggttagtttagtgggggtcagtatcgttatactcacttggccttgctgctcaaattgcttgaatttgatgaattgaaattagaaaattcaaatgcagcacgacagccaattgtttgtttatgataccctcgcactgcaaattgtaatatgattgtcacgttcttgggcatagttcatttttttacggcacatcaatttttgggaagctaggagatacatttatttgcaatagaaaaatatatatataatatataatatatgtacatattcctcctatctgctcttaagtaaaacgaagttactagattcatttatggctcattaagctggtagacattatctaatcgggcgatgaaaccaaccagtcaaattgttcaaaaactgaccaaaagtggcaaaggaaactagtctttttgtactcgtaaatagccgtcattatggccaccaaaaaattttggtgaaagtgccacaaaacaatacaattaccacccgcattttgcccgctttttagactcacctgttgctggatcaaacaaacgaacaaatgacgtgttttatttgccacttgatttgcaaccggttctcccttttcggtcactattatttgcttaatttgttttatgttttccttgctggtttgcttcgtttattccactacttctaaaaaacaaaaaaaaaacaacaaaaaaacgccaacgaacgtgtgtgttaacaacttttcacagaattctgattgatgcacagcgcatgtggaaaaaaaaagaatgcgaaacacgcgaagcgaagaatgtttatatcttatcttatcagtgattggatggcaaagggggtgttgggcaatttttcattatcaactgatgatgatagtgccgtacacatcgatatttgctctgtttgctgtttgcccttttgcttgttgttttctcgcaagtaatagtcaccaattgcttagcatttctaaatgtatccagctgacgtcagagcgtcaaaagttgtgcgatcttctgaatgcaccgcaaaaaactagtggatcgattccgaggcacatactttacattttcaatgacattattactcatcaattgttggtttggctttttaaatacttagcattcattaagtgatctctttttgttcagtgcaccttagtcatctgatctgtaaaacggtttttagtgacgtcatgaatgacaatagcagaaagagatggcaataaaagggttgcacttgaaatgagccaaacaataacaacaacagcacactggttcaccttcagctgatcagcgggtactgccatctccctcccacacaccccattcaaacttcaaacaattacaattctcattctgttcatattgttctacacttgcaaaaaccaacaggcaaacaagaagcactggcaagacaaaaaaagaaaaaccattaatgcgaagagtagagaagctcacgttcgcaaaacaaagtgtgtattgaattacgcgctatttatattaattaatggcacactgttcgcattttcaccgttagtgcgcgcggcgcatacgacggacggtggatgggaaagggaaaggtcgcggcaaaggagcgcgcgtacacttacgccaaaatgccggcaaaaacaaaatgaaaacacggggatagatgttgatggatggaaacccttttcaaagtccgttttgttcaaagttcgcttttcaactgaccagattcggctttcggttgcgcggccaaaaatgccaaatgccgcgcatagtgtgaccatccgtcagtgcagcgtgaataccgaaaagctcacgcgctgatgctccggttacactacaacaaaagcttttggtacaaatcgaagcttacaacagctttttaaaacgcaatgaacaaaatatttacagagtatttacacgacgagctttttttttcaattgtcaactaattgaaaaaaagctcgttgtgtaaatatttttgacaacctctgtgtatatatacatatgtacatatttaatatgttacacattttttgaaaaataaataattggcgcaatacagggccactttggtttacatagcacaggcaaaacatgttgcttcggagattctaatacacgatataaacgtatgaaaacaagcatgaacgaatataaagtcccttcggctttccaagcctgctggatttatcttcatcggaggtttcatctgaggtgatatggacgaagatggaatgacgaggcatttttttccgatttacacgcagaagcagcacgagcgtcctttttatagcattttaatatgattgtacacagttcgatcgtcactatgcgattgtttaatcattatttaagcttttcaagacatgtgaccagattttagtcgcctttcaagctgagattccgaaaatcagatactttatactatggcgccattcgcgcagcctcacactgattgaaaacaagtaagctgatagctggatacgctgcaaggcaaagtataaaaaacataaagtaaacaaatgtaaacaattcatataagccaagttcaatgagccaaatccaagtaaacaaatgaatttagcggcagaaccggttgttcttgcttatataatacaatatattgctttcgtttcgattctggctgctatcaaaaaagcccaaaactcgtgtcacaaaagtcaagaagcg

SEQ ID NO: 1832 - DNA, 2402 bp, DROSOPHILA
gactttgaaaagggtttccatccatcaacatctatccccgtgttttcattttgtttttgccggcattttggctagtggaataaacgaagcaaaccagcaaggaaaacataaaacaaattaagcaaataatagtgaccgaaaagggagaaccggttgcaaatcaagtggcaaataaaacacgtcatttgttcgtttgtttgatccagcaacagcaccagcagcagcaagtttgggctcaaggacgtcgccggagcagcggtatcgtatcggatcgaaggagcagcagttccagcaccaaggaacaggaggagcaaggcggagcaactagcaccagcaccatgtcggagcgcaggagtcacatacagatggcgccgccaccgccgccccccaagccaaacaaatcgcagacagccaatggaaatggtattgggaacggcacaggcataggaacgggcactggcaacggaaccctgccgaatggcaataaaaactataacaaaattgtcgcagtccaagaccaggagccgctggctcagaactcgagcggcgttcaaaggagccagtcgccaccacgcacagaacaggttgtgatgacgccacgcggtaaaacggccaacagtacggtgatcctcatcgaacgcaaactggtcgatgagatcaatgatcgcgttcatgtcgccggcggtgatcatacgggcatcatcattaacaaggacacggtcgccggacagaagagcgccagcaaggcggcagcgctatcgctggaattccgcgtctttctggtcagcgccaatacgggcaagcattcgcaggagtcgcgcaccctgcgcttctggttccgcgactggctgaccaacgaggagaagcaggcgcacatagcccaggacttcttcaaggagctggtcagtccgcaggactttcccagagactacgtgggcttcatcaagaagataatgaagctcctgcagcacggatactcggagatccagtcgatcgagattgagctgcgcatcctggaggagacatccgcaccaccctcgcgaccaccccgggatgggtacatcatctactgctacggcgactgcaaccgaaagttcgaggaggcgctgatggcgcagcgaaagacagtttcgctcgaggaatcgcagttcgaatcaccgccgttgactcaggagaaggtgctggagctcatcgagcaggcatatcccaatcccgtgtcccccgaggatctggccaaggattacggctggagcgagcaggatgtgctgctggtgatcaagtcactgcaggagcgcggtctgatcaagtcgatggagtacaatgcgtacactcgcatccatcacgaggacaaggagattaaggtggtcaagcagatgcccacgatcgcctccaacaagcagcccaccattgccatcatcacggcgcaatattgcgagaagctcgccgtggacgcaatgctcgagaacaaggagacattcgtccgatacaccacagtcgattccgatcccaatctaacgaactcactcagaaagtccaaaaagaaacgaagattcggcgaatcgaatgtgtatactctgggcaatatcggggcgcacaggatcgtgagcaccaagctcccgtcggtgggcagcaatcgggaggcgatgacggcgacgggcaataccacaacccgtctgttgggcacattccaaaaggtcgactatgttttcatcgtgggcgtagccggtggcgttccccactacacggactataagaagcacgtgcgactgggcgatgtggtcatctcgtatgtggacaaacagcgggcactgatcagcaatagcaaggagaaaccgtacgtgtacttgtacaagagcggcgaggacgtgaagacctacttcccggtgaacgattcgctgcagcagatcgccgagagcctgcaggccaacatgcaggtgaagcggccgtgggaggactacctgaaccaggcccaacaggcgttggcccagaagacggatgccgacttcaaccggccggacgcgcggacggacaaactgtttatgaacattggaaataacgaggtgatcgaggtggcccatcccattgccgccgacgaggtggacggtgtcaatcggttgcgactccatctgggtcccattggatccggaagggatctggtgaggagcgacgagctgcgcacccagttcgccaggaagtacggcctactggccaccgatgtggagatgagcagcgtgctggacagcatcattggcaattgcagagagagctttatactggtgaagggcatcgctgactacaaggacggcacgtccaccaggaagtggcaaaacttcgctgccatttcggcggcgtcggtggttaagtcggttatctgcggcatggacgcgcccacgaatgtatag

SEQ ID NO: 1833 - protein, 687 aa, DROSOPHILA
MSERRSHIQMAPPPPPPKPNKSQTANGNGIGNGTGIGTGTGNGTLPNGNKNYNKIVAVQDQEPLAQNSSGVQRSQSPPRTEQVVMTPRGKTANSTVILIERKLVDEINDRVHVAGGDHTGIIINKDTVAGQKSASKAAALSLEFRVFLVSANTGKHSQESRTLRFWFRDWLTNEEKQAHIAQDFFKELVSPQDFPRDYVGFIKKIMKLLQHGYSEIQSIEIELRILEETSAPPSRPPRDGYIIYCYGDCNRKFEEALMAQRKTVSLEESQFESPPLTQEKVLELIEQAYPNPVSPEDLAKDYGWSEQDVLLVIKSLQERGLIKSMEYNAYTRIHHEDKEIKVVKQMPTIASNKQPTIAIITAQYCEKLAVDAMLENKETFVRYTTVDSDPNLTNSLRKSKKKRRFGESNVYTLGNIGAHRIVSTKLPSVGSNREAMTATGNTTTRLLGTFQKVDYVFIVGVAGGVPHYTDYKKHVRLGDVVISYVDKQRALISNSKEKPYVYLYKSGEDVKTYFPVNDSLQQIAESLQANMQVKRPWEDYLNQAQQALAQKTDADFNRPDARTDKLFMNIGNNEVIEVAHPIAADEVDGVNRLRLHLGPIGSGRDLVRSDELRTQFARKYGLLATDVEMSSVLDSIIGNCRESFILVKGIADYKDGTSTRKWQNFAAISAASVVKSVICGMDAPTNV

SEQ ID NO: 1834 - DNA, 6847 bp, DROSOPHILA
tcgtggatatccgtaaggcgaggccttctagcgttcaatgttaagcttaacctagatatctccacttcagcttcagcatcggcatctcccactgattggtgttccgtttccacttcgatttgacttggatcgcttcgcacatctgccgcagtttttgcacttagactatggttttaacaaatttttacacaaatatcagacacagacatacatatacatatataaatatggaaaatatcgactggaggagagagtgggatgggagattggtgtaatgcctacaacaaagcgataaagaaatctacagatacatccgcctaagcccttaacaaatatcgctagtctagatagtccatggtcttgatgaacttgaccacggatccgaagagcgtccaatagaactcgtcctcgccctccagctttttgcccagaaagcagctgatatactccacggtggatagcagatacgggggattggcctgcgcatacgtcgaaaatgattagttaattactagcaaccgccgaatggttcaccattaatgactcaccattatcactacgtatatgagcacgggcagcagatcatcggctgcgggcacccgaccactggacatgcgcagcaggctcatgatgctcgagatgcagctaaagttttgtgcgatacgatagtttgtatgttaggcaatgatataccaaagggaaacttcacacatgactcacttgatgatgcactgcagcttctcgcgtggcgtcttgtaggcggccatgtggcacagctgttgctgggcaaacgtccacggagcctcgcccaaatactcctgggcgatgcacagcgccgggtgggcgggatgtacaaagcgctgcagtttaccaatatgcgccgagagcacctcgtcccgcgacacatcggcatcctcgttggggaacatcacctgctcgtacatctgctccagcagcattcgctcgatggccacgcgtgcagcatccacctgccactcgtcctgtagatcggcactggagcgcagctcctgcagcagggactccacaaattcctcggtgagctcgacgcgttcgtcgctggcccgcagctgggcgaactccgcttgaaactgctccagcttctcctgctgacgggaccaagccagatacatccggaccagtgcttgcagcagacatctctggctgctgcgcgcctcgccacgcaatcgcgcctccagctgctccaattgctccgatcgcagcaggagctgttgcctgtgtcgcatcaggtactgcaggtagctttgtcgtcgctccagatcccgctgcagttcggccagaagctggccatgctgtggtcgctccaattgggccaaacagcgcagggcctcggccacgtgcgagatctgtggtaatcgctgcaggctgatgcactgcgccaactgaatctgcaggtagatctgtagcggtgtggccatcgttgtcgatgtggtcgaggtttggcggaaatcgccactgtgcaaatccgtccgggaaagcaccgtgcgcagcttctgcttcacacagccaaagaccacgccaggaatatgcctgaaaggtagtagaccgatatgctatagaagatgagaagacattgagagcattattcactcaccctccgttcatgtgcttatgcagatgggcagctgctccaacggatcccgtcgaccctacgccatggccattgcccgtggaatcggagttggttgcctcgctggagctgctcaccttgcggcggtacttggccaggatgtcctcgctcgtatcacagtagtgggtgccgaagttatcgcatccggcactgggatcgaagctaacgctgcgaatatccgcttggacactagaagtgctggccgccggattcgattggttactggagttgcttgcatttttggcgctggctccgcggcgattcttgaaaataccctgcctaagcttgttgaatatgccagcaccgtggtgatctcgctcccgatcccgttcacgatctcgctcccgatctctttctcgatcacgttcccgttccctgtccctttcgcgatcccgttccccgtcccgatgatacgtctgcttgtccttgtccgcgctggcgtcgaaactaatgctctttggtatggctccggtcgccttggtgggtggcttcaggcccgatcctccagccgctgctattccgctagctccatccacctctggcctcaatccggcggatcctcttcgctcctccagctgcaattgctgcgtctgcacacaaagtagcatctcctgcttgtcatcgtcggttttgggcaacatggagttcagcataatctcgtgattctcgtagttcaagctctgatggcggcgcatactgcccgccagaatgccatttcgacgaccatctatgatggccgatcgttgttcgatggagatgcgacggtgttccacattgggcgaggaacttgaaactgcgccggtctgttcatcctggttaatcatatccagcagttgttgcaccaagccaggcggctgctcctcatccctattcctcgccagctcttctttgtcctcgctgcagtcgctgaaatcgattagatcgcgatgctccttctcctgctgctggtgtttcttcttcttaagtgccgaccgttcccgctcccgctcccgctccctctctcggtgatgatgatggtagtcgcgatgatggtgctctctatggtggtgatgatgcttgcccatcggcggtggcggttcctccaagttcaggctctgattactaatgctgctctccgcggacgtttggcggcgcatgcaggatgtacccatcagcgggggtggtcttgcgaccactggaatctgctccgctgcacttgtactgctgctggaaactgctctcgccgcccagaacatgatagctggtccgcaccgagcttctggctaacgaagatgcgccatgatacagattggcatcctcatacgagttgacggcatcgaaaaaggccgaatcctcctggctacgctcgctgccgtttccccgatccggatcgggctcaccatcgccactgctgccgggcgtctgctcatcctcatcgtcgtcgtcgaggaccgctgcctgtggcgccgtcgtatccgatttggtcgtaatggaaacattgtcatcggtgtctatttcagccagcttctccgaatcgctggccaagacatcagtgctccagttgctctccgatcgctgatcggatgcatccaactgtggtccatggacgcccgagacgcgaccagctctggccaaagcctcgacaacgaaattgttatcgccgggcaggacgacggcggagggtattaggggtgtggagaaatttctatccctatccccacgttcgctcactgtggcatccaatgtgttttccgaatcggaggccagcacatccgtggaccatgtatcggatatgatgctcacattctcgtcgccctcgaatttcttcagttcgaatttacagaacttatcctcgatgtcggatctggccttggatagcagcatcttttgcatttgcggattggcagctgcccgggcgtgaacaccatgatgatggcccaaatccccgccagcgccatcaccatcagttacctgcgatgatggtgtatcgcgaccactgatgttcggtgttcccctgcccgacacattggccgaaaccatatcggagagattgtcctcgttttcgtgaacatctcgctcctgctgctcctccaagtcaagcgaactggcaactgaatgtgccgcctcactgatagcctccagattatccgaatttcctatcgatgcatcatcctgcggccgccgcatagcctccagactactcacatcgtcgttgttcgaagatggcgccaaaggagcagtggtgaccaccgctggcagcagattactgccatcctgaccgatgctgttcatcttcaagacctcctcctctgtcagcggtttcagcttactttttgctcccgcattatagagactgaataccaacacgggatccgacgaggtggacatgtccaggggatcatttgtagttggcatgttagctccgcaggaactcaagctggtgttgctgccgctgtgcgaggaacagtgctcgagatcagcacccagtcctccgctgccattcgaggtgttggcctggccattggtcagtggctctgagactggaaccggattatggttactactgccactgctgaaactcatgcctttcgccagtttctttttggctttgcctaggctcatcagactcttgttgctttttttgctcttctccggactttctcgggaatctggcgcatccttgggtgtttgctgttgctgctgcacctgctgcttgggtatcctgccgagaatcctctgcagccgctgcctctcttcgacggatatgtcatattcgtctctggccgttagtaaacgaaagaactccacgagctgtgccagctccctttgattgatggccaattgggaacgctcgaagtcgctttgttgcggcaatatggccaccacatcttcgccagtctgtcccagcatcaagagctccatcagctgcaccagttcgctatcctcatcgttcagtgccagtcgctgaagcaatttcacaatctgattaagattgtgccgcatccgttcactcacattaacatcgatgatgcccaggagatcagcactggcaatggctggtgaaatgaagtgtgtgaacaccaggtcggtgagcagctggcggatctcctgctcctcgtggcgcaacgactgccggagctgttggctcagtgtttggagtagccatctaagagagctgggaaatagcgcccaactctgttgcaagctcttcacaaactcttggacatgggagtgcagcttgcccaaagtctccgcatgaaagcgagccacatttcgctggtattcctcatcaccctcgcgaccaaagcgcttctcccgctccttgggcgtgaaggtctgcattagtttgtgcggatccagatccagccaaatctcgtgctcactcagcacacccatgagcggcgcatggagcgcggcggttaggaaaattctcgccgagaacagactctcaaccaatcgctgatacagtcgggcaaaggagctgctattggttctcagcaaacgtctgggctgttcgctggtcagcaattggatttcaatcagttcccgcagcaatttaagcagcagttccacatccttggtattgatggcattgccatacagtcccgtcgctatggtattaataatttggccaagctggctggccgagagcagggataagcgatccgcggtggccagggatagggccaacaaatagggtgtattatacaagtagttgaacagatcttcgtaggccaaggcgtgctagaaatgaaccaagcaaattattagtagacagataatggtatttctttcctatcacctttcctcacctcatagggcagcaactgcttggcgtccacgaattgggcactatcgtaggcactcgctcggcggcagaagagcagcggatcctgatctgtgcgcgccaggagcagctcattgagtatctgccgctgctgggcacacacaaaggccaactgtgaaagagtcaaagtgttaatcacaagtgttaggagtaatgattgtgggtaatagagaaacccaccttggttatggtccctgcattgctctcaaaggctccagtgagctgggcaaaggccgcctgctcctgctggatgaagagctgctcctggcggagagtgcgggccaggtccatgatctccagcagattgccagcagctgggggctccatggctaggtgcagccttcgctggctggaataaaagcagcaaaatgttaattaatgtgaattgagttatagatgtgctttgaattaaatggaattatgtatattatgcattaatttccgtacggaagagtacgaccattgtttatccagtttcgcaaatatatttttatttataattccagctatttccgtatgtttttacacatttgttttgtacggaatagttttaaaatcagtgatagttgaattttgtcttccgttagtaaatctctgtgaattcagcttaattttcattcttaactacaatcgtttccccattcgcattcgcttttccaattttccttgcctttaaaactgcgcattggcgcaatttaaattgctttgcattatttatggaaatgtgtgccatttgatatcagtttgttactcgcgattcaaatagaaccaggctgtcatccagtttaatggctgagcgccacttaattgaacatgcatgaattttaaacttttgatggatgacaattgggaatttaaaaacgaatcgatttttaaataggctgtcaaaatattcaagcaccaaagccattgcttagataatttccatttactttaactatatttcattctttgtttataatatgcttcccatttgagttcatatccattgtacctttttaaaatctccataacatacggataaatacatctagttgggtgcgccagatcgtgatcagtttatatcgatgcgaagggggatctttgtgctcagatacgctaaaagtccctacagcctgaccttaattcccattgtttgcacctgtgacgtctaaaatcgcatgggaaagcgtatcacgcggtctaattggcgtctctcgaataatgtaagcccaagtaaactgaataactagtgaaactaagtggaaagtaattacgaatttacagtctgaccagaaaaatatgattgggtgcgtgaaaactacgtaaaaaggtctgatattatcagaattatagcagtactaagactagaa

SEQ ID NO: 1835 - DNA, 5056 bp, DROSOPHILA
cagccagcgaaggctgcacctagccatggagcccccagctgctggcaatctgctggagatcatggacctggcccgcactctccgccaggagcagctcttcatccagcaggagcaggcggcctttgcccagctcactggagcctttgagagcaatgcagggaccataaccaagttggcctttgtgtgtgcccagcagcggcagatactcaatgagctgctcctggcgcgcacagatcaggatccgctgctcttctgccgccgagcgagtgcctacgatagtgcccaattcgtggacgccaagcagttgctgccctatgagcacgccttggcctacgaagatctgttcaactacttgtataatacaccctatttgttggccctatccctggccaccgcggatcgcttatccctgctctcggccagccagcttggccaaattattaataccatagcgacgggactgtatggcaatgccatcaataccaaggatgtggaactgctgcttaaattgctgcgggaactgattgaaatccaattgctgaccagcgaacagcccagacgtttgctgagaaccaatagcagctcctttgcccgactgtatcagcgattggttgagagtctgttctcggcgagaattttcctaaccgccgcgctccatgcgccgctcatgggtgtgctgagtgagcacgagatttggctggatctggatccgcacaaactaatgcagaccttcacgcccaaggagcgggagaagcgctttggtcgcgagggtgatgaggaataccagcgaaatgtggctcgctttcatgcggagactttgggcaagctgcactcccatgtccaagagtttgtgaagagcttgcaacagagttgggcgctatttcccagctctcttagatggctactccaaacactgagccaacagctccggcagtcgttgcgccacgaggagcaggagatccgccagctgctcaccgacctggtgttcacacacttcatttcaccagccattgccagtgctgatctcctgggcatcatcgatgttaatgtgagtgaacggatgcggcacaatcttaatcagattgtgaaattgcttcagcgactggcactgaacgatgaggatagcgaactggtgcagctgatggagctcttgatgctgggacagactggcgaagatgtggtggccatattgccgcaacaaagcgacttcgagcgttcccaattggccatcaatcaaagggagctggcacagctcgtggagttctttcgtttactaacggccagagacgaatatgacatatccgtcgaagagaggcagcggctgcagaggattctcggcaggatacccaagcagcaggtgcagcagcaacagcaaacacccaaggatgcgccagattcccgagaaagtccggagaagagcaaaaaaagcaacaagagtctgatgagcctaggcaaagccaaaaagaaactggcgaaaggcatgagtttcagcagtggcagtagtaaccataatccggttccagtctcagagccactgaccaatggccaggccaacacctcgaatggcagcggaggactgggtgctgatctcgagcactgttcctcgcacagcggcagcaacaccagcttgagttcctgcggagctaacatgccaactacaaatgatcccctggacatgtccacctcgtcggatcccgtgttggtattcagtctctataatgcgggagcaaaaagtaagctgaaaccgctgacagaggaggaggtcttgaagatgaacagcatcggtcaggatggcagtaatctgctgccagcggtggtcaccactgctcctttggcgccatcttcgaacaacgacgatgtgagtagtctggaggctatgcggcggccgcaggatgatgcatcgataggaaattcggataatctggaggctatcagtgaggcggcacattcagttgccagttcgcttgacttggaggagcagcaggagcgagatgttcacgaaaacgaggacaatctctccgatatggtttcggccaatgtgtcgggcaggggaacaccgaacatcagtggtcgcgatacaccatcatcgcaggtaactgatggtgatggcgctggcggggatttgggccatcatcatggtgttcacgcccgggcagctgccaatccgcaaatgcaaaagatgctgctatccaaggccagatccgacatcgaggataagttctgtaaattcgaactgaagaaattcgagggcgacgagaatgtgagcatcatatccgatacatggtccacggatgtgctggcctccgattcggaaaacacattggatgccacagtgagcgaacgtggggatagggatagaaatttctccacacccctaataccctccgccgtcgtcctgcccggcgataacaatttcgttgtcgaggctttggccagagctggtcgcgtctcgggcgtccatggaccacagttggatgcatccgatcagcgatcggagagcaactggagcactgatgtcttggccagcgattcggagaagctggctgaaatagacaccgatgacaatgtttccattacgaccaaatcggatacgacggcgccacaggcagcggtcctcgacgacgacgatgaggatgagcagacgcccggcagcagtggcgatggtgagcccgatccggatcggggaaacggcagcgagcgtagccaggaggattcggcctttttcgatgccgtcaactcgtatgaggatgccaatctgtatcatggcgcatcttcgttagccagaagctcggtgcggaccagctatcatgttctgggcggcgagagcagtttccagcagcagtacaagtgcagcggagcagattccagtggtcgcaagaccacccccgctgatggagagcaccatcatcgcgactaccatcatcatcaccgagagagggagcgggagcgggagcgggaacggtcggcacttaagaagaagaaacaccagcagcaggagaaggagcatcgcgatctaatcgatttcagcgactgcagcgaggacaaagaagagctggcgaggaatagggatgaggagcagccgcctggcttggtgcaacaactgctggatatgattaaccaggatgaacagaccggcgcagtttcaagttcctcgcccaatgtggaacaccgtcgcatctccatcgaacaacgatcggccatcatagatggtcgtcgaaatggcattctggcgggcagtatgcgccgccatcagagcttgaactacgagaatcacgagattatgctgaactccatgttgcccaaaaccgacgatgacaagcaggagatgctactttgtgtgcagacgcagcaattgcagctggaggagcgaagaggatccgccggattgaggccagaggtggatggagctagcggaatagcagcggctggaggatcgggcctgaagccacccaccaaggcgaccggagccataccaaagagcattagtttcgacgccagcgcggacaaggacaagcagacgtatcatcgggacggggaacgggatcgcgaaagggacagggaacgggaacgtgatcgagaaagagatcgggagcgagatcgtgaacgggatcgggagcgagatcaccacggtgctggcatattcaacaagcttaggcagggtattttcaagaatcgccgcggagccagcgccaaaaatgcaagcaactccagtaaccaatcgaatccggcggccagcacttctagtgtccaagcggatattcgcagcgttagcttcgatcccagtgccggatgcgataacttcggcacccactactgtgatacgagcgaggacatcctggccaagtaccgccgcaaggtgagcagctccagcgaggcaaccaactccgattccacgggcaatggccatggcgtagggtcgacgggatccgttggagcagctgcccatctgcataagcacatgaacggagggcatattcctggcgtggtctttggctgtgtgaagcagaagctgcgcacggtgctttcccggacggatttgcacagtggcgatttccgccaaacctcgaccacatcgacaacgatggccacaccgctacagatctacctgcagattcagttggcgcagtgcatcagcctgcagcgattaccacagatctcgcacgtggccgaggccctgcgctgtttggcccaattggagcgaccacagcatggccagcttctggccgaactgcagcgggatctggagcgacgacaaagctacctgcagtacctgatgcgacacaggcaacagctcctgctgcgatcggagcaattggagcagctggaggcgcgattgcgtggcgaggcgcgcagcagccagagatgtctgctgcaagcactggtccggatgtatctggcttggtcccgtcagcaggagaagctggagcagtttcaagcggagttcgcccagctgcgggccagcgacgaacgcgtcgagctcaccgaggaatttgtggagtccctgctgcaggagctgcgctccagtgccgatctacaggacgagtggcaggtggatgctgcacgcgtggccatcgagcgaatgctgctggagcagatgtacgagcaggtgatgttccccaacgaggatgccgatgtgtcgcgggacgaggtgctctcggcgcatattggtaaactgcagcgctttgtacatcccgcccacccggcgctgtgcatcgcccaggagtatttgggcgaggctccgtggacgtttgcccagcaacagctgtgccacatggccgcctacaagacgccacgcgagaagctgcagtgcatcatcaactgcatctcgagcatcatgagcctgctgcgcatgtccagtggtcgggtgcccgcagccgatgatctgctgcccgtgctcatatacgtagtgataatggccaatcccccgtatctgctatccaccgtggagtatatcagctgctttctgggcaaaaagctggagggcgaggacgagttctattggacgctcttcggatccgtggtcaagttcatcaagaccatggactatctagactag

SEQ ID NO: 1836 - protein, 1676 aa, DROSOPHILA
MEPPAAGNLLEIMDLARTLRQEQLFIQQEQAAFAQLTGAFESNAGTITKLAFVCAQQRQILNELLLARTDQDPLLFCRRASAYDSAQFVDAKQLLPYEHALAYEDLFNYLYNTPYLLALSLATADRLSLLSASQLGQIINTIATGLYGNAINTKDVELLLKLLRELIEIQLLTSEQPRRLLRTNSSSFARLYQRLVESLFSARIFLTAALHAPLMGVLSEHEIWLDLDPHKLMQTFTPKEREKRFGREGDEEYQRNVARFHAETLGKLHSHVQEFVKSLQQSWALFPSSLRWLLQTLSQQLRQSLRHEEQEIRQLLTDLVFTHFISPAIASADLLGIIDVNVSERMRHNLNQIVKLLQRLALNDEDSELVQLMELLMLGQTGEDVVAILPQQSDFERSQLAINQRELAQLVEFFRLLTARDEYDISVEERQRLQRILGRIPKQQVQQQQQTPKDAPDSRESPEKSKKSNKSLMSLGKAKKKLAKGMSFSSGSSNHNPVPVSEPLTNGQANTSNGSGGLGADLEHCSSHSGSNTSLSSCGANMPTTNDPLDMSTSSDPVLVFSLYNAGAKSKLKPLTEEEVLKMNSIGQDGSNLLPAVVTTAPLAPSSNNDDVSSLEAMRRPQDDASIGNSDNLEAISEAAHSVASSLDLEEQQERDVHENEDNLSDMVSANVSGRGTPNISGRDTPSSQVTDGDGAGGDLGHHHGVHARAAANPQMQKMLLSKARSDIEDKFCKFELKKFEGDENVSIISDTWSTDVLASDSENTLDATVSERGDRDRNFSTPLIPSAVVLPGDNNFVVEALARAGRVSGVHGPQLDASDQRSESNWSTDVLASDSEKLAEIDTDDNVSITTKSDTTAPQAAVLDDDDEDEQTPGSSGDGEPDPDRGNGSERSQEDSAFFDAVNSYEDANLYHGASSLARSSVRTSYHVLGGESSFQQQYKCSGADSSGRKTTPADGEHHHRDYHHHHRERERERERERSALKKKKHQQQEKEHRDLIDFSDCSEDKEELARNRDEEQPPGLVQQLLDMINQDEQTGAVSSSSPNVEHRRISIEQRSAIIDGRRNGILAGSMRRHQSLNYENHEIMLNSMLPKTDDDKQEMLLCVQTQQLQLEERRGSAGLRPEVDGASGIAAAGGSGLKPPTKATGAIPKSISFDASADKDKQTYHRDGERDRERDRERERDRERDRERDRERDRERDHHGAGIFNKLRQGIFKNRRGASAKNASNSSNQSNPAASTSSVQADIRSVSFDPSAGCDNFGTHYCDTSEDILAKYRRKVSSSSEATNSDSTGNGHGVGSTGSVGAAAHLHKHMNGGHIPGVVFGCVKQKLRTVLSRTDLHSGDFRQTSTTSTTMATPLQIYLQIQLAQCISLQRLPQISHVAEALRCLAQLERPQHGQLLAELQRDLERRQSYLQYLMRHRQQLLLRSEQLEQLEARLRGEARSSQRCLLQALVRMYLAWSRQQEKLEQFQAEFAQLRASDERVELTEEFVESLLQELRSSADLQDEWQVDAARVAIERMLLEQMYEQVMFPNEDADVSRDEVLSAHIGKLQRFVHPAHPALCIAQEYLGEAPWTFAQQQLCHMAAYKTPREKLQCIINCISSIMSLLRMSSGRVPAADDLLPVLIYVVIMANPPYLLSTVEYISCFLGKKLEGEDEFYWTLFGSVVKFIKTMDYLD

SEQ ID NO: 1837 - DNA, 3025 bp, DROSOPHILA
atagctttattggtactaaaatggctggccaagtatattacaagtgatgggatgctctctcacctttttgatgcccacatagaagcactttccgtttagctccctgagatacggtttgccacagggacccttgtccttttccttcttgctctgcttctttccgcagccggaatggaccgtcatcaaggtcagaatcacaattggtaggatcctcatggctgccagcaaaactgaggcacctgtccggtcaaactgtaagcatgcgtgccgccccctgttctatatataccctttcgtgggcgtggcatctgcattatcgaggagtgaccaatttccattagggaatcgtcgtgtattgttcgcacagaatttttatcgactgctgcagtccatcaaattgattaattctaattggacatggtgatgcccaggggttggtgcatctgtcgttggtttctcaatcgcccacagtattgaaactatgctggtacttgtcagacttccatctgggatgaagaagttcccgaattcactgacatcttaaaagggttcagtaaataaattactcaattgctatccgattaagtggtcaataggtgaccctccacttaaagttcatccccattattttgtatttttcagagatataatttcaatgctctgtatacttattacatgtaaaattcgaataattacatattcatcatcaggatgaattgaacagaaactaaactttcatataagaaactataaagtatctttgcatgtcaataatgccatctttaagaacttatcttatacactggcccttgatttatttgaaagttagaaacttgaacttcgattgaaatttatttaactgctcgtatatttaatttcattcgtgtacccaagccgacctgcacttgaatatatattttaaaataacttgttatattattgctgtcatttatttttaatcgataatagttgtgggcttcagctgggcaagttgtggagatcaggctgctggcggtgccggagtctcggctgctgcggcggcgggtgcttctgctcctggcgcgggagtgggtgcgggcgtggctccgtcggcggcaggagtggcggcaccttcggcagctggagctgctccggcgggtgcggctccttctgctgctggagaaacagcttcagctccggcggcaggggtggcagttgcgcccggctcaccagttccgccaacggtatttgtttcttccgctcccggtgtcaccgagacgccattctgaccaggttgatcgtcatcgggcacgtcgagcgccccgactgcatcctccgagtccggctccgggtgctccactgagccactggcaatggggtcctggcggtcgtggtcgccatcgccatcgccatcgtcctctccttcggcacttccgccaatgtcgtggtggaagtgatgcaagtgctcgtgactgtggtgcttcggcttcttgccactatccgtgccctggcagtagcgttccgagcagatgaagtattgccgctcgtggcagttgtctgccgacaccatgttgatctcggagcggatcctcacctccaggcagtcgtcgcactcggagtgctccagtggcaggacgttgctatagttgctgtagtagcgcaccaaccgaccgttgctgatgtactggaagcgaccctcgtggtacagatcgttgcccccgaaccagaaatcctccgtgttgcccaggccactcaggaacccaatggctccgtcgaagtccctttggttactcaagtccgccagggtcagtcctttgcgtaggcagttgttcagggcgccaaaccagttcatctgaatgggtttcatattatttcataagcccatgcgacagatcaactcttacctttttcaccgaaaagtagtagcacttgccgttgatcctgcgcaaatagcgacgcgggcaggggggtcctgatcccaggagctcgccccgcggcaggatgctcagcagggccacgagtgcagtcaggagatgcttcatttcgctcgcttccgccggtgcacagtgagccggctcaaatcgcctcctgtacttatatcctccgctggccagcagtgcgcccaatcgatttggagctcgctggagctggagcggcatcttcggcagcatggccaattcaattacaagtccatgccgccggaatgcctacgccaatgtcgtgggctaatttgctcacccgccagtgggtcaggtttagggtcattcagtttaattggctattagatacactcgaagaaaacgagccggaaaagtcgcatggggtgctgtaattgccagtaatgttaaccctctaaattccttgatggcaattcatccgcctaataatgggcatattgcgagtaactattatatcatatatagatgttataaaattgtaatacaagtttaatgcaaataaattaaaagattatatatatggttttgaaataagcaataattcttagcagtattctaactcattcgaaggtagcagagctttcttcttctggagtatgatgatgatagatggatataaaatgcttcagttcctttgaccctgatctgtcctcccatttagtttgtatctgccgaagtgagttaattgctggctatgaactcgctggtaatcttcaacagctcaaaaacgctaagaatattaagttctgtgattcgagcaactggagtgacttcatagtcattagcataacccgcccgaagggctagatgtctgacccggccttgttctttccgattattgatttacctggcagggtcgtgacatcagccattggattgtccgtggccaggacacgaatcgcccgcctttccttctgttgccagctgactcagacgaccttcggtcggatgacgattgcgccgggtggccacaacaattcgtggggcgtgtgagtaccacgccacccctttctgccacgcgcgctactctcacatatataattctttcgtatattgtatctcgattgtgcagttgtatctcacatgac

SEQ ID NO: 1838 - DNA, 973 bp, DROSOPHILA
cgaaatgaagcatctcctgactgcactcgtggccctgctgagcatcctgccgcggggcgagctcctgggatcaggacccccctgcccgcgtcgctatttgcgcaggatcaacggcaagtgctactacttttcggtgaaaaagatgaactggtttggcgccctgaacaactgcctacgcaaaggactgaccctggcggacttgagtaaccaaagggacttcgacggagccattgggttcctgagtggcctgggcaacacggaggatttctggttcgggggcaacgatctgtaccacgagggtcgcttccagtacatcagcaacggtcggttggtgcgctactacagcaactatagcaacgtcctgccactggagcactccgagtgcgacgactgcctggaggtgaggatccgctccgagatcaacatggtgtcggcagacaactgccacgagcggcaatacttcatctgctcggaacgctactgccagggcacggatagtggcaagaagccgaagcaccacagtcacgagcacttgcatcacttccaccacgacattggcggaagtgccgaaggagaggacgatggcgatggcgatggcgaccacgaccgccaggaccccattgccagtggctcagtggagcacccggagccggactcggaggatgcagtcggggcgctcgacgtgcccgatgacgatcaacctggtcagaatggcgtctcggtgacaccgggagcggaagaaacaaataccgttggcggaactggtgagccgggcgcaactgccacccctgccgccggagctgaagctgtttctccagcagcagaaggagccgcacccgccggagcagctccagctgccgaaggtgccgccactcctgccgccgacggagccacgcccgcacccactcccgcgccaggagcagaagcacccgccgccgcagcagccgagactccggcaccgccagcagcctga

SEQ ID NO: 1839 - protein, 322 aa, DROSOPHILA
MKHLLTALVALLSILPRGELLGSGPPCPRRYLRRINGKCYYFSVKKMNWFGALNNCLRKGLTLADLSNQRDFDGAIGFLSGLGNTEDFWFGGNDLYHEGRFQYISNGRLVRYYSNYSNVLPLEHSECDDCLEVRIRSEINMVSADNCHERQYFICSERYCQGTDSGKKPKHHSHEHLHHFHHDIGGSAEGEDDGDGDGDHDRQDPIASGSVEHPEPDSEDAVGALDVPDDDQPGQNGVSVTPGAEETNTVGGTGEPGATATPAAGAEAVSPAAEGAAPAGAAPAAEGAATPAADGATPAPTPAPGAEAPAAAAAETPAPPAA

SEQ ID NO: 1840 - DNA, 2891 bp, DROSOPHILA
ctgccatcctggagctgaatgagtacctgcaccgcgacttcgtcatctttgaggcagctccgcaagagagtcgcggcattccctcgaagaagcctcaggcggactactttctctaagacgcttccgttcctgacaatccggtggaacggagtcggcacaggatgcgggtgccgactggtagcttacataaatcatctagggaatagaaatagaaactgccagcctgcaaaagcgaagcgaacgcgaatagcaactgatggtgtaaaacaaaaaatatgtaacataaacgtaagctagggtagagctgccggacacaggtccacgttcagttagacttatttgcttttttggttcaactaagatatttaaattttttttaccatctgtttacctctacctgtgtttaatcaggctatttgcgcgatcttttaatggctgttttcaaaacatgtagagatcagccatgcagatcgcgtatgacctgtgcacctcatctagctactaactaataggtttaatgaccatagcccaagaccctgagaattcgccttgcgtagacggaccgcaatcggagccgccgtcttctcgacacgaattccctgggcttgggcagcatactatactaggagcccaagttgagcaaatagatatttttaccgacagattgcgttaagtcggctaagctaggacatatttaggggagccgagagcgaacgcgcatccctggctgggtcccttctccgcaggatatcacctggagaaacccaggtacgaagaacatcgtgcattaataaatagtgagtaagaatcttttaaatatgccccagattgggagatgatatacaaaaaaatgtacttgtatttataataataaagattgtaatataatcgtcgaaattgagcaagaattttttattagtaaattatgggtcccgaggagtcttggaggataaccacacccatacgaatcccccttcacaatccaacaaacaatcaagcctgcagtttctcagtttatcaagtacttaattcatagtatacacataaaaaaaaaagatggttatattccagaagggcgcttgtgatacagtaacggggggtcgtcatgggtctcaaatctgttctcagtgctcctccagctcgagtccatgctccttcatttgctcgtaaatgcattcctcgtaggcgaaggcagcgtcgcaactgaaaatggcagcatgattatagtccggatttgagccaacagcttccggcgagcactactcactgatcctcgggtgtctcgatggcctcgcacttggccaccacctcggcgggagcgtcttccttctctgcatcgtgcttgctcatgaccttgaccaactcgatggcgtgttccttgttcagcttaccggattcatccatctgcaatgggagggagaatggaatgggtggtggtgagtggatcacacttcctgccggagcagcagcactcactatctgcagctttttcatcacgcaggcgcgcaggcacttggcctcgtgtctctcgggcaggtcgtggctcatcagctgctccacatcctctgtaagcgatatatcatatgattgataattgcacaataactatcctaacacatccaccacaggtaggagtggtacgctgacagctgtattccctactgaattttctgcactgatgaccatctgactcaccatcggtggctcccgtctcagccttgcactcgttggccagctcggcggcgtggtccctgttgatctcctcgtgcggcttggcgctggtggcgcccaggcagaggatgcccactaggagcaggacggtcaggtgaaccagatgcgacatttcgatttgcgattgaactgcgcgacgtgcgaactctgacttggatgcgaatcgccggcaacgtcggcgttttataggagctattgcctaagccgagtcccgtgattgatttggcagatcggatccatcgccgatctccagctgcgtctcaagcagctccggcaattacgcgcaattatgaactacatgggcagcacatggcacatggcactccacttcactccgccgctctggacgggatgggacggaatccggcggagatgccctcgactgggcatcgtgtgaacgagtgacaccccgctggaactgccgctgccagatgagatggcccaccgatctccacttacctgcttaattggtgactggcatgaaatcgctgcaaatgccggggatatagaattgggaatggctatggctagtggaaatggaaatgaaaatgcaaaatgctaaatgcaaaatgagagatgagaaatcccgcttgtaattaaatcgatcaacagctctgggtgagatgagtgattgtgactggcggggccatcgagcgattatacaattatatggaactgggcgaactgggaactgcggttgccgcctgccaaattggccgtttaggccataatatacccttcatctgtccgcctatttcccagtttgcccgtcagcctgccgactttctgatcattccgagtgccaacgatcgctatctgagttccatccagtcagtctgtttgtccatccatcgagtggagattttagcacgcaatctatattattgtggaatccaatagatggaatcggattgcatcgtgtgagcatgttgcatgctaatttttattccaattggattgagtggggcttactagccccattaagatctttaacaggtcggaagtctgtgtgatcgagtattatacatatatgtacatggtaaatcatccaacaaataagtccgattgataatatatgtatatatctaaataattcggttgcgagcaaatggcttactttcattttaattaacattgatattttcaaatgtattattcca

SEQ ID NO: 1841 - DNA, 625 bp, DROSOPHILA
gcatccaagtcagagttcgcacgtcgcgcagttcaatcgcaaatcgaaatgtcgcatctggttcacctgaccgtcctgctcctagtgggcatcctctgcctgggcgccaccagcgccaagccgcacgaggagatcaacagggaccacgccgccgagctggccaacgagtgcaaggctgagacgggagccaccgatgaggatgtggagcagctgatgagccacgacctgcccgagagacacgaggccaagtgcctgcgcgcctgcgtgatgaaaaagctgcagataatggatgaatccggtaagctgaacaaggaacacgccatcgagttggtcaaggtcatgagcaagcacgatgcagagaaggaagacgctcccgccgaggtggtggccaagtgcgaggccatcgagacacccgaggatcattgcgacgctgccttcgcctacgaggaatgcatttacgagcaaatgaaggagcatggactcgagctggaggagcactgagaacagatttgagacccatgacgaccccccgttactgtatcacaagcgcccttctggaatataaccatcttttttttttatgtgtatactatgaattaagtacttgataaactgagaaactgca

SEQ ID NO: 1842 - protein, 150 aa, DROSOPHILA
MSHLVHLTVLLLVGILCLGATSAKPHEEINRDHAAELANECKAETGATDEDVEQLMSHDLPERHEAKCLRACVMKKLQIMDESGKLNKEHAIELVKVMSKHDAEKEDAPAEVVAKCEAIETPEDHCDAAFAYEECIYEQMKEHGLELEEH

SEQ ID NO: 1843 - DNA, 3138 bp, DROSOPHILA
tgatacgtaagccaattatggcgcagttatatgtagctccaaatggactacaagttgccgttctcgctggcacatcccacacccaaaacgatgatacgtatataattatagctgcccagatacacactacacacaacacgtatccgaggcatccatatatactttgtatcttcgagcggttacgctgctgctctttccttggggctctggcacacttatatgttcctgatgttcggggaagtgggtgcaaagaaccagagttccatcagccagctccgctttcgatctctgaaatcctccggcagtagatgccacttgagaaccgcatggtcaagcattggcacttgtgagttaggcacttttgttctattatacatagattgtattcataccaattaatattatctgttcccactcaatgccaagcagatgcatcgaaatgtaagtaaccccaaatggtgaactttccactcaattaccttgataatgttactcagtattagacattcctcaccgactgcgtagttcaacatttagtagctgcatattgttcctattcagcactttgatcttatatgtttagcatgtgttttgggtctatcagctaaaaacattcctttggaaaccaatgattaagagcttttaagtacattcattttttgatttctgcttgaacagattgtttaaaaaacactattctagaacaagtggttatcactgtggggatttttaacagcatgtttctgaaatatgaaaatataatagttttaaattttaaatttataataaagtgacttcttacaggaatcagccatgttaagagataccattatatatcattctttgggatctttggattattgttttttgtaacttgaatggaatgaaacccagttgatcttcatgttgttaaaactcaaatttatttggtgaaagctcaaatattcctcggttccctaaatgtccattggtccgcccgtttggtggtgggtccgtgcgttcaggccgccggagctggtgttgcttcgccctcgggagctgctggtgcaggagtggcggcctcggcggctggagctccttccgctggtggagctgccgccggagtggctccttccgctgccgcggcatccggtgcgggcgtggctgctccagttgcgtctgccgccgcgggtggacccgtgccgcctggcggcaccgtttgctcctgctcggcaatgggttccgcggcgttttccatgccattctcgaacacgggctccgtggtgccaccaccatcacctggagtcggcgcgccctccgcttccttctccttcgagaccccgatttccgttgaattcgaattgtcagctggccgtgaatcgctctccacactttgctctttgatccccgtctcttgcttatccttctggcccgcgtcgtggtggaagtgatgcaagtgctcgtggctgtgtttctggccatccccactgtcctcggcgggaacggcgcacttcatctggttctgttcgcagatgaagtacttcttctcctggcagttcacgtccaggacgacggtgacattgggcctgatcctgatctccaggcagtcgtccaggttggatcgttgagtcggctccacaatattggagtcgcccatgtagcgcaccagtttaccgctgctgatgtacttgaagcgcccctccgactgcagatcgttgccaccgaaccagaagtcatcgaagcccacctgtgacgtcacgtagtgtaccaccgccttgaagtcctccatcgtggacacgtcggccaggttgaggcccttgcgcaggcagttgttctgggccccgaaccagttgatctgccaatacatttcaagcgatatatagttatttcgggactctatggatgggcttattcgaatctatgatagctttattggtactaaaatggctggccaagtatattacaagtgatgggatgctctctcacctttttgatgcccacatagaagcactttccgtttagctccctgagatacggtttgccacagggacccttgtccttttccttcttgctctgcttctttccgcagccggaatggaccgtcatcaaggtcagaatcacaattggtaggatcctcatggctgccagcaaaactgaggcacctgtccggtcaaactgtaagcatgcgtgccgccccctgttctatatataccctttcgtgggcgtggcatctgcattatcgaggagtgaccaatttccattagggaatcgtcgtgtattgttcgcacagaatttttatcgactgctgcagtccatcaaattgattaattctaattggacatggtgatgcccaggggttggtgcatctgtcgttggtttctcaatcgcccacagtattgaaactatgctggtacttgtcagacttccatctgggatgaagaagttcccgaattcactgacatcttaaaagggttcagtaaataaattactcaattgctatccgattaagtggtcaataggtgaccctccacttaaagttcatccccattattttgtatttttcagagatataatttcaatgctctgtatacttattacatgtaaaattcgaataattacatattcatcatcaggatgaattgaacagaaactaaactttcatataagaaactataaagtatctttgcatgtcaataatgccatctttaagaacttatcttatacactggcccttgatttatttgaaagttagaaacttgaacttcgattgaaatttatttaactgctcgtatatttaatttcattcgtgtacccaagccgacctgcacttgaatatatattttaaaataacttgttatattattgctgtcatttatttttaatcgataatagttgtgggcttcagctgggcaagttgtggagatcaggctgctggcggtgccggagtctcggctgctgcggcggcgggtgcttctgctcctggcgcgggagtgggtgcgggcgtggctccgtcggcggcaggagtggcggcaccttcggcagctggagctgctccggcgggtgcggctccttctgctgctggagaaacagcttcagctccggcggcaggggtggcagttgcgcccggctcaccagttccgccaacggtatttgtttctt

SEQ ID NO: 1844 - DNA, 1007 bp, DROSOPHILA
cctcagttttgctggcagccatgaggatcctaccaattgtgattctgaccttgatgacggtccattccggctgcggaaagaagcagagcaagaaggaaaaggacaagggtccctgtggcaaaccgtatctcagggagctaaacggaaagtgcttctatgtgggcatcaaaaagatcaactggttcggggcccagaacaactgcctgcgcaagggcctcaacctggccgacgtgtccacgatggaggacttcaaggcggtggtacactacgtgacgtcacaggtgggcttcgatgacttctggttcggtggcaacgatctgcagtcggaggggcgcttcaagtacatcagcagcggtaaactggtgcgctacatgggcgactccaatattgtggagccgactcaacgatccaacctggacgactgcctggagatcaggatcaggcccaatgtcaccgtcgtcctggacgtgaactgccaggagaagaagtacttcatctgcgaacagaaccagatgaagtgcgccgttcccgccgaggacagtggggatggccagaaacacagccacgagcacttgcatcacttccaccacgacgcgggccagaaggataagcaagagacggggatcaaagagcaaagtgtggagagcgattcacggccagctgacaattcgaattcaacggaaatcggggtctcgaaggagaaggaagcggagggcgcgccgactccaggtgatggtggtggcaccacggagcccgtgttcgagaatggcatggaaaacgccgcggaacccattgccgagcaggagcaaacggtgccgccaggcggcacgggtccacccgcggcggcagacgcaactggagcagccacgcccgcaccggatgccgcggcagcggaaggagccactccggcggcagctccaccagcggaaggagctccagccgccgaggccgccactcctgcaccagcagctcccgagggcgaagcaacaccagctccggcggcctga

SEQ ID NO: 1845 - protein, 328 aa, DROSOPHILA
MRILPIVILTLMTVHSGCGKKQSKKEKDKGPCGKPYLRELNGKCFYVGIKKINWFGAQNNCLRKGLNLADVSTMEDFKAVVHYVTSQVGFDDFWFGGNDLQSEGRFKYISSGKLVRYMGDSNIVEPTQRSNLDDCLEIRIRPNVTVVLDVNCQEKKYFICEQNQMKCAVPAEDSGDGQKHSHEHLHHFHHDAGQKDKQETGIKEQSVESDSRPADNSNSTEIGVSKEKEAEGAPTPGDGGGTTEPVFENGMENAAEPIAEQEQTVPPGGTGPPAAADATGAATPAPDAAAAEGATPAAAPPAEGAPAAEAATPAPAAPEGEATPAPAA

SEQ ID NO: 1846 - DNA, 35664 bp, DROSOPHILA
tatggatcgtctatatgcggcgggctaagatgcgatttgttacgtatgtgttggccaaaaaaagcacgtgcgaaagcgaaaaggaaaatgaaaacgagaccaggacaatgtcaacacacacacactcgcacagcagcctcgtgacccaaaaaggcctgcgccatttgtactccttggtgtgtgtgtgtaattgaatattccatgcgaatcacgcgagtctcggattaggccacaaataccagctcccgggcccgggaaaaaatcaataaaaatactcacttctgccatggaacacgcacacgtttttggtacagaatcctcctcgcaaaagtagagggattacgttttttcggggactacaatcctggaccgatgctacgatgagcaggtttctccactcggcttgcagatgttacgtgggcggggcatactatatagtttatcggtattcaagccattccatcggcttccgtgggcttctgtcggataaaataaagtatatcccagctagatggactctttcccagagcgacaaaacgcgggaagcagagttcggggaaatgaatccgcgtacacgaccgttgggataggcacgtcagtatttgactgagcgtgggcacacgataacgataccgttatttttcctcgcgtattgttatgcaattgaatgaatcggaacccgtatttttattgggcgccaaagcagcgcaggcgcagtgccgaacacgaggcagccagctgcttctcgcgcagttactctttcattttaaaaagtcaaatatacaacaattaaaaagatgatttatttgttttggaccagttttgtaacagtcgtccgaggctagttttgaatttgaatacttcccgcctgaattttcattatgtggcaactgcttactcttaccaacactgtgctacgacgacccttaacggttgcattactcaacatcgatatcaacaaaacatcgataagagtcgcccaatcacatgcttctcacatcactaaccaagtgcaattcaatttaatccgttgcaaatacccgcgtattaatcatatttgttggactgcaggctgctgaaaagagctgctaaaaagagcagcccagccaaacgggcaccgccatgcggtaattttatcgcagacgagctgctagaggcgaactgcgcgcggtaagcgaaaaagagcgccaaaaggtgaacattcccatgcaaacactcgcacctaagcagaaacaacagtacaaaacccatgcaactaccctcgctgaaggacaagctcatgcccagcggcagcgtgcagcaagcgaaagcgaatttctcctggcaatcgctaacgcaactcttgagcggcctgtggcagcgcctctatttgccgcgttcgccgtttttggctctgccagcgccgcccctcgccacgcccccagctaatactacgcagcgccgcgcgaagaaagaggtaagacggctgaaaagccccaaacaagatatgaaaatgctcggcaaaacagatatctcgaaaatacggaaaacaagatatccaacaaaactgctacccgtctatgggatttgtggcacccatacagacgcagactcgagcgtgcgggtgcacagctgactacgcagcacgccgcgtcgcaagggctgtcgacctgctagcggacgaagaagtagaaaccaattcttggtttttacaccaataaactatttagccagcgctcaatacataccaatacctcataagaacgattttagatcttatataaaagtagaaaagttactttccaattcttgcttccagaagcaaggttttgtggaattttatcccttttattggttgtaggccattattattgagctgttttagtttttcctaagtgttttgtttggtactgttgttgtgcactcggcagctcttttccgccagattttttcaacactgtttagttggcgtgcacaacactgtctcccagacgtggtgaataaaataccaagtgacgtgaattgaaggaaaaaaagacgattttcaacgtaaacgcacactatttttcggtgtgtgtgaaaaggccaacaagcgttttcaacaacaagcagaagccaggatttacaggacaacaattgtggatatagcggcagcagcagctgctcaaaaggcaacaacaacggcagcgacagcgacgcttcggccaagcaacaacaacagtagcaaagcaaagccagcggagcgcatagcacaaaaatcaattttcgcgctcgtgaaaaatatcagcagcaaattgcaaggtatatgtgctaatggttagctaattaaaatgcgaaagtttgtggactctttcgttgcttttatttgtagtccgtttttccaatgcactcacacagagccacaatattgcaattagcttgagcgcccgcgtgtgcgagtgtgtatatgtgtatgtgggtgtgaatgtgtgcgtgtgcgtgccagctgtattccgtactgtactcacctctagatgggaacagctgaaaggggtggtgggtgatacagggctgttcccagtgctcacaccacccgttgacttacagttcataagtacatatgtgcatgcatatatgcgcatataggcagtagtatatagcctatagttaaaacttataggtctcctaatggtaccacagacccactgacaatgtgtgtacgttttcagatgcccagaacaaggagactccaccactcaagggatcgctcctcggcgggcacacgagacaagcgccgacgacacgatactgccgatcattcgccacccctagctgaggccccatcgccgtaagttcgccatcatctttgcattctccgatattcccatattctcggaattctctgcgagctatgtgaggaactactcagctacccattgtactcatggtctccattatttcactgcaggccgcgcatcaccaacacacatcacacaagatcggcggccaagcgaaggcgacacgagctcgatgccaagaaggcccagatatccaaggaacccacgtaagtaactcgcattatttgtcacttggcagactattctatcagagggtctaaaatagattcaagcgaagttgacatcgctttggaatcacatacccttcgggtaaaccctacaaggcgaatagtgctcagtcctcgtacaatcttgtacaataactgctttgaatgccaaagcgtttttgtggacaaatattcatctgacaacacgacgaaaccctctgcctggttacaaaaatcgattgcgacattcccaacgcatcgaaaatattttaagccctcaaaaaatttctctgattttgtgacagcattttcaaaagaatacaaattgttctttattgcgaaatcgatcgagtcaatcgatttcatactacagtatatggaagtgtctttgatcgtaatgcgtttggctgcataaaacgttgaactaatggtaccgttgctaatttttaattttatacaaaagacataacataaaagcagccttgaacaaggggaaaccttaagattgttggctctaaatttacttatctatttcgcactttccttgcatttaggagtgtaacttgcctgagtgcttaagagatggagggcatgacttaacatctgcctccacaacatggagtgaataaacaaacttccccggtgtgaaacctttcgaaaagtctcggctcgtaaactggctctgcctactgcaccacgggtatttcccccagctatcggagatgtggcaacaagagtgtcctgcccacgcagcgctccgcgctccttgggactcgctttctttgaatggcttgtaaacggccgtgtttttaatggtgtatggctccataaaaaagtgccgctcgggcagcaggagcagccagagagacaaattaacatttggccatatatggcaagtgaaatctgcgcgggttcctgccagctaagagtcatcctcttcagtcggcttactgtaaattaatgcggactcagcgatttctttgtgctgacccccttcgggaggacggtagacgtgggcgttgggtctccaccagatctggcggatcctggcgcattgtccgctgcatttcctcgccttaatttatgcgcctgcgtatttaaagcgtatttgcatattactcaaaacaacggataacttgaggcgcgacgttgtcgcatttattattgtttaatacacttggcgtggcctttttaggtagttgcaccaagagcatcttggggagttggcttaatcagagtcgcatttcgtaatttatacgccactagcagcgaccgctttctttgtcgataaagtgacgttttcatgcccgccagggtgctgccgttgctgtcattgtttattaaccttttgcatttgccataaaacacgctggctaagtgttcatgaaccacggcagcggcagattaatcgacctgtcccggctcattactcagaagttggtgacatcttgcaacgcggaagtggccgaaaaacgcagcccaaatatgaaaatcaaactcaacgatatggaatactattctcaaatgtgtattgcccacatttccgccatgctcttgttttattgtcgatcattttcgatttcaatcattttttatttaaattacaagccatcaattgggtgcacgcatggtgcggcgaattcgccgctgcctcgactgcgtcccgatcgtctgtccgtaagctggtaaactggaaatgcgagcagcgaagtcgagcggtagaggcggcagcgccggaggcagcggcggtacaaccgacacttgttcgctaccaacttgtcgctcggctgctcagtcgcaacgacaactcgaaagcgaatggaggtgctggcttcttcgctcgtcgccgtcgccgccgtgcaaccgccaccaagtgttttttgagagaaatgtataagcagctctatattgtttataagttttaacgaaatgcagtgtgtgcttctgaagcactgagctccccgtgtgttttgtgtgattttcgcgaattgtttatgcatcctggccaaaaataatacctcgcgcgcctacggaatttcaaatcagctcgaaaacagccccccaattattccaagaagtttcaatgctgtgcatacagagcttttagaggacagaagaaaatcagtggccagtgggaacaaaccttagccaacacgcgttaactaagccaagataagataactccgactgcgactgcgacgatgacgcctacgacttatcaagacgggctgcaccgaactgaacgaatgacttggaggaaccggacgtgccgatagtgcttttattgggcaagggatttcgcatttatttccgattccattactcatagcgtcacaaccagttgccgttcgtcggctgctgcctgctgttgacccgcttggctgtttgcctgtttggctgtttgactgtttggccgatcggggacccaagacttgcgtttccttttgcgaatcaggttaaaaaagtaaaaattgtgaaaactggtcggcggaggacctgttcgcagccgggtctttgagctcggcgcatgcgcagacactttctactaactacgaacaacgtgtatttggctcgttcagcaaattgcataaagccttaactggttgggatttgggggtcttatcaatgaacttgccagtggccggtagcctagtagctggggaccaattggatttgccacaggctaaatcgcagtcaaggttcagggttattttagtggctaattcaattgtggccctcgccgtgctgacaggccaaaagtggcttgctaaaacaaaaacgaaatgcggccagcaagaagtcgcacaaatgcagggggttttctgggtgatggatactgccgttggggtagcccactcataaaccatcgagaacgtgttaattacacgcgtttcgaacagccaaatcagcagcagaagcaacaacagcagctagcgccagcagacaagggaaaagtgttcgataaattattgaaactaaaggctgggccaaggtgttccatggaatctggctgactggtagccgtagcttacgtagtagtccgctcgcgacaagcgaagtgtgtgcacagcattgaaaattaattctcaaaattcaaacagctagcgatatacaaatgataacgataaagctaaagataagcgatcttccaagtgcacgcgtttaaagtaaacgttcagcggtttaaatttcaacgccaattctaaacgagatcacttgcaacaacaaggaaacaacagcattgccccgcagcaacatcagcaattacgaataattaaccaacgagcgagtctatttaacaacgaaataaaaatcataaaaagctaacaaaatgccagtcgttagtcaacaatatggaaatggctttcggccatacagctcctttcgagtgccgcgcggcagttgtggctacggcaacaacaacagcgttagcagcagcaacaacaaccccagcagcaacatgagcaacagtggccaaaaaggagcagcagctgcccaacccctgagcagtaatggagccaacagatcgatggtgaaatcgatgccgggcagaaacaacaacccggcagctggatcctcctccacatccgcagcctcgtcgacttcctccatccatcagcagggtgttgtgacgagtggcaattttgtacgccagcagccctggcggagcagttactgcagcagcaaccgccacaagttgcagcccgaacagcatccccaccatcagcagcagagactggtaagcggtggcagtgtgaagccactgacgcctaaactgatccgtcgcatcgagagcacttgctccaccgcagcgcccacacgccattgcaaggcgagggcgccactaccgtccactcaggctgcacgcccggtgaccacgcccagcactgccaggaaacagtatcagccagcaggctccgtatcagtatcatcacagcaaccgatgggaacccccaccagccagaagcgcacgtatcaggcgggacgaatggcagccaaggagaactgcccagctcgcgtgggtcagcgctccaccaagaactatccggcaccgcagccaccgctgcccccgcggaggcaggctgccaccaatgatctcaccaatgcaggaggagccggaaaggccactcctctggcccagcgtcgccagctgccggccacgcccaagctgagcatcaagcagcgcagcaacgggtgcacacacaatggagagggagctggctcctcgacgggctccagtgattcgcacgactctccgcgcctcaagaaggccttctcgaataagtttccgcagggattgccctttgaggaggagttttacggacgcaatcgctcctactcgcaatcgtccagcaactatagtttctacagttccgtgggtgcgcccacaacgcctcatgatgaagacgatgttggagatatggatgaaaaagtccatcgtgttcactgtgacgacgatgacgagttccagcgcaaaccgtccactgatgagtctctctatgtggacttctcgaaactagtgcagacccaccagcaacggcagtacgtgcctgccagctcctggataagggcctctccagatgaatgcgaattgctccgaagcaagcaaactagtcagctaacacctgcccagcagaggaggaagaacagcaagtacgcacgctcaatgcacgagtatctgtacagcgatgaccctggacaggccaggatcaagcatcggttgtccgtggtcgatgagccagaggatggatactacagctatgcggctggaacaccggatccgctgccctcaccgccgcccacgccccgaacggacatctatgtggccgctgcttcgtgggcacccaagccgctctaccccgaccgcgtgctgttgccaccagcggatggcaacaacaatcaccagaagcaacagccgcgtcgacggtccgagcacttggggtccacgacgtgtgagtataagtgagtgtctcttcagcatgcggaaactcgaatcagaaaactggagttagccttgagtggcagcacagcttgctgactaagcgttctgtccgcacttcatttaaaggcaccgagcacctcctcctcgcactgctctttgtttcatctccatcttgagctcaacccaactcaatctcgttctcgctgatttttgttttttgtttttattttgattttttttttttctgtatatttgttattgttggcgttgtgccgctacgattcggttcaagatctccccgccaaatttggtcaagcacaccgcccctacttatgagctgagccgccagttgcggcgttcaaatggcgagctccgtccagctcattaggcaacctaagcgccgggccgggccaactgcaaagcttttagcgttctaccctcaagtacgggacacacttaatttggttgagcgcctcactctagtccctttttcgtcgctttgttgacttttggggcccaagagttccgacctggttgttggccactttcccgtgttatatgattgtgttgtgcccattcgaaagaccagctgatgctcagattccaatgaaatctaagctctcatcaattaacacgttttagggaactaatttaatgtgaacctatgacgtttcagtcagtcgttcattttagaagatcgaatttcgtttaatcgtattcaaatgtatttaatagatttttatttagctagcaattagcaaatcaaatcagttcatactgctactaagacacatatttattttgagtaaagtagcaaaacggcggtaaactaagctttaacgactggccgttgaagttcttccttttttgaattcctgatgacttaattgccgcaaatagctcttcctgttgaaatatttttaggcaattatgtcagcagctggccaaatggaatcctcactttgtcaatgtaggtctccgcaccctgggacttttgattcgaaagggagttttgtgtattctgggcttctgtttcttgctcgggttcatttatctgacgtttatcacaatcggaacaaaccggacctgtctccgcagacccatatacgatcgcaatcgatgctgctaccgccggcggctggggtagccaactaaagctgacaacaaagcttagatcttgagcgtacagttctcgatcgatttccgacagcgcaaggcaggcctaatcgaaaaaaaaaaataacgccaacgatctgaaaacaaaagtgaataatggatgcaactctcagcgccgatttatatgtttgtttttgttttgtatttttaatgttttttattgacttcctataaagagtccgtcgaaaggtgattgactacgcaccgcaaaaacaaatacaaataacaaaaactcgcacccaaacaatgcagtatggggagatcttctagactcgatttaaattgcacacaaatttccatcgcttcctttttcgcagcgagtgtgtgtctgtgtgtacgtttgcgagcgggccgaaagcagggagacatttggcatatttaatttggcttgttgctgaattcgcttaactgttgtttgtttttgttaacagtaatggccggctcaatccgttcgagactgatggatggggttactgcgaggaaaacgcggcggcggcggcgatctcagtgcaaaatttcattacgttcattgaaccgggctatctctccctctttgccaacagattgaactgactcagacccagaccccgacactgggctgcctgcttgaacccgcccggcgtagcacttcctcccccggtggaggcagctgctctgctcctcctctttaactgacgcacaaaggcctgtccattgcttgcattccccatctcacttactgcccgaagtgccaattgatgttgttcgctgtttgcgcagacgcaaccagtgaccttgcaattggccaacgtcacctcgtcacttggccctcggcctgccggctcctccatgccctccgagatccgagatctgccacccaaatggatttgcataatcccgcagctgtgtttgggctgctaacatacttggcctcttactcattctttgttcataatatttctgtttttcatcagttatactcggcaatactcgtaacggcacttcttttgtcatttaaggctcgcgacagtcatttgcatttcacccagtggtcgaaaccccctacttttgccctcttggtagcttttagactctggggacaggtcgaaaattccggtttctcattatgtttcatttgaggacagagatacatgagtatagtaatggtttctgctttaatcaatgagcagccaaacgaaaccagagatacgccatatatatatttaatcatattcaagttctgtcgaccagggatggagttgaagtgtcaagtcgataaataggaagaaaagatagatgggtatttaaacatgccaaattaatgaattttaaatcacaattattccatatagggagtcgactttaagtgacggataaattgataaaaattttctgtttccggaagtgtcgagggaaaaatggtatacgttggcataaaacacgaaagatttgagctgtgtaaccttaaagtcatcaataccaaccattaaatagttcatgaaccaagaaagttcgccttggtctattgacataaacatgtgctacaagtcttcggtttattgatccgagttgttgaaattgttttggaaatgttttgattttatctcatctgatgaactgtctatcacaaagttgaatatttattgagctggcatgccataaatagttcacgaaccatgatggcaaaccttgaaccatccctagcatttcttggtctattcaactgctttcgggtattttgcgtgtgtaagcgcataaagccaaaatgacgcataacttctgcagttcattggaagcgggcattggaatccaattgttaacgcttttttattatatttatatttgtataatttgtttgagcgcaggagggggcggagggcagatcgcatatgtgcgctacgttttgcctaatgtatttatggcattttcagggtcagctcaaaaaataagctaaatacaacaaaacgaagaaaaatctctcgagccgcaacaaatgtttgtcggcggttggcggtgcaggcagatctggttggtgggtttaaagtgtctcagctgctctatgtaaatcatgacaaaaaaactggttttcgaatgattaatttcataattcaataacacggctggcttataagaaactattttcatgaggtttttattctcgttctcggaatggcaagcgagttgaagacttgcactcgcagtaggttattgttcttagcggatttcgtttcgactaatcttgcctactgaatctaaatgctaattgttgtcgcagattctttatcatcttggaagtggtaaggtgtacatgattcgtacaaattgctggccattaaggaagttggtcaagacaatggtgtttaatcgtagtcaattgcggtattcattgcgtgaatgggtgattttattacttgcgaacatgcatacaaatccaagttggcagaaagaatcggtcaaggtcgtcacagtcactccaggaactggtgtccacatgttgggaatgataaggccacaaatgggattggcttggccataaaactgttgcctcatctgtgtgcctgcgaaaagtcgaggccaacagagaaaaataacaatatatagaacccccgatgcgtctgagctggcaaaatcctcaagggcagatcgctgaatgaggaactctataaatatgggcgcgattgttcaattacctcacataaagcagtttagaataaagatatttccatccttgaaataatcagcaattcccgttgaagttctttgaagtgtgaatagcctcttttaacccctaccggcaaagcaactttgtttcagttcccctaatcatatcttatctcgattcccacaggctgtcgtaacttattggcacaccgggcaatatatcggtcgaattccgacgattacccgcagatcaacccctaagatacttcgtttcagagcttggctaccacaatgccatattttaaataactatttctcaagatatcttatcttgtggtcgcccatatcggagcttttctcgtttgacaactatcaaaccctttgtttacatctaccttaagcatgttcattgtagtcccgttgaacccattactcgtgttcttttaggtcagcgataatattttacgaggccttttattagtcaagctttcgacctgttcgactgccttgagtgaaatattaagccaattaccttacacaacgccgatctgaaatgctccagtccaaattgggaatctattatgaacttgctttgccattcgcttcctaccctcctacccctcccactctcttttgtttctcgaactcgaaatcggattctggatctgaatctgaatcggaatcggaatcaacgaatcattaatatccaattacagttggccataaaagctggtctaatttgcacgcagcgcgtcattaatcataaatcaaaatgccgaaagagctgggctaccatggagctgtattccttttattaactgccgcgaggccgtaagcggcttttccgcgacagacgccagtcagagatcacagatctcagataggttcaattcagttcgtgtattggccaagagtctttccagcctacagagctatccatcccagatgtacagagcgtgtgcgctcaagtagttttcttggcgggtgcgcaggcgttgagcttttgtcatatgcgatactaccacactatatgctatatacgtatggatgcaggtcggaactaacgaacgaacgaatcgtacttgtagcagccaatgttactttcagcttcatttcggttctgtgtttttcataatttgtgcccaaatttagacgctttttgggggccacgtgggcgagaagcagtgagcgcgcaaccgacaaaaattttcgtaatcgctcaatgagagctggttttgccttattagcatatgtggcggctggttgacttcttggatcttggatttggtagtagcttgcttgataggtcagttatctctcggcaatcagctgattcatgccaagatcgctgcccacccgcacttgtgcagctcgtcatctgtctgggccccttggcttcttgttttcttggggtgggtgtggtgagttgatgtaacatgagcatgaacatgagctctgcccgccaagctaccgatgttattgacacagtttctgggctcgatcgccgagtctagggtgctatgtcgctgggttcactcagaaactggcgattgcctcacattgtgtcattcctcgaaccatgaagtactctcaaaggcatttggccgacggtagaggtgggccgctgccaaccagatagccaacagtaacagtaccagctgaggtagccatccggccgagttgattaacttgattggtaacgcaaaaccgattcgccaacacacgtctcgcactaggtgccggctgcctggcttaagaatccggcggcaaggcgagcgtggagcggcttactcgctaagtagctgagaatctgagtggctggctggctgggtagctaagtagctttccatgttgtccacgccgctgggcgttgctccaaggacggccattcatctgctgtcgccgggtggttggttaggtaatacctcaagagatcgaactaaccggacacctttctttttgcagtttcgatgacagcatctcaacccgccgacgcaaggagcgttcgaagcgttcgcaccgcaagtcgcccgccgccagtcgacggcagcacaaataccgctacagggacgagacgtcccattcgagctcccgccggcggcaccgtgatcgcgccaaggacgaacgcgacagcggacgcaacaaccgccagtcgcaggctaaggtaaaaactttttattttatacacaccacaagtagcaaacaagtgaaaattgtaggcagggcaacgaaaaaaaaaggaaaccccaaagaaaattcacaaactgaaaacgaaagctaaaagcaaaacaaaatggtaaaagaacaaactaggcggacagatagataatacgaacacaccggaccgatctcatttaaccaccacctgcgttttccaatccttgtgctgccattgccaaaatctgtgccgtccgtctgatcagtgctagaagatcgcttccatcgactcctcccccatcatgctgttcttcaagcggtatcttgagaagtcccagcaggtggccgatcacttcgagagctcccagatcccgtgctacatcaagatgcgtgatctgccggcgccaccggtcgtggatcactgtcgcgatctgatcctgtccagctgttcactgcgttttatgccgtacacggatgattggatagtcgttgagtactttgtcgatcacgacagcgattatctagtaagcatgtatgttgtgctatcaatcgaacccacccacctccccttccccttctcctccttttgactaacctatcgttccttacttttgtgtgcgtcttgcagtacaccctattctcgagtggatcggtgaagtgatcagcgcgctatcatgatcgttcgccgctgcactcgatccctctctactttcttatctatgcggcgttgagttgagctaaatttgtcattagatgtgtcacattgctctggttcttggtcttctggtacagtgattacatgggaaagtcactgtaatcagtgtaactgaatatggaaataaatgcttcagggcttcaagaggcggagcacttgagtgagcagcatgagttgataagatagtacttgaaacaaagtaacttggttgggcaaggcctttaaactgtgtcgaaattcagaaacttagatgttacataattacaaataactattggttttgttattcaagtgtaggtttgaaaaaaaacagtagccactttaaatataatcaaaattttaagagataatcattttttaaaagcttagagcggaaactcggtttgagctgtattcatcagtaataaaatggtacttaaatagagcagttaagcgaaaccttggcaatattcatgtgcaaattaagcaatttctatgcgttcttcgtggcatctagctgtatgaaaaacagctctcaattaaacgagaactttatagttctcattcactgttggtggttctttatagctacccctgtgcccaacactccccgctgttctagttattttcgttcaattgatcatttgacattaactcgttgacggcggccagagttttctttgctgctctgagatgtgatgagatattgctattgctgctgcggatgatgcgaactgctcctcgccagcattgccagttgcccatgtcgccgccaattaagtgggctgagtaactcgcatagaattccctccgcgtcatcgtttagtccccaggccgccaagattcagtattttaagcagttggagcagcagctcatcatccggaatggggcgaatggctgtggcctggaaacatatctggaggaggatgcttcacccggtgacggagagagcgtggccattacccgctgcctgctgctaaaacggcaacgtaatcactttgatcttgtggccctcagcgatatgcctgtggacaagtacgccggcgacaattggatcatcgaggagtactttgtggaccacaatgacgactatctagtgagtcgtccccattccgagtcacagattgtcggcgaatatctttcgttttctcgtgatgcattgtcggtcctacaattttataggaacacaaccttttttcaaaaatattgtggaaaaaaatatgtacagtagtaattgtaatcctaacaaattcccttcgttgttttaaactaaaattgttagttataatctgtatatgtgatatatgtacacatgtcgattcaagtcaaatggtcgtccatatattattcgaatttctgcaaacacaaatgttaagtcttctggaaattttggcatgatttattggcaatgctactgctttgaccgccgctatatacaccgattttacacggtgcccactcactctccctgtctatatcatgcccccaaatacacacatgtttatgggctcccgagagcgacgccttggggattcctctccgcactgtgcgcatgttcgtctaaactacctatggcccatggcgcacagctgatacttctttctcggagatgcgcgcgcagcttcatccggcggaaaagcatctacttgccatttgctccgtggccattggaaaattataaatacacgcgccgccgaaagtctgcgctcttctcatctgcggccagttttcggctgagaattttcaaattcgaggaaaccgaaacagattgaaatctacgtttgttggctgtgtgtcgccgccactgctgccatataaaccatataaactacatattgtcgtcgcttcgtcttcgtcgtgtaacggtacgggtaccacggggatcccccgcacactcgctgtctctctctatccggtcagatccccccgatctctatattgatcgtctcctttcgcgcaatttgtttatcgatgtgtgtgtgtgcgtgtgtggtgtgtgtgcgtttcttgtgctttgaatattccttttctttttgtatttggctgagaaacaccaaataatcgaatagaacaataattagaggtacatacggagcgtatgtgcaatatagaaacgcatttcggaacgataggataggtagaacaattgctgggcaccgtgacataatcaagcgcaagaacaaaaaacaacccaaaacttagaacatttaagtgttttaaaaataaaacagtagcagtgcggcaagaacaaaattgtcgaaagcgaaaaaaacatcaaacaaaacactgagtgttaaaaaaaagtgcgcgatattcatcggactgtatttgtttaaacaaaacgcgatgcaagataccatagccaaactgttttattgaccccccgccaatggtggcgagtgtataattcggaataatatcaagtgggataccatccagcctgatgagcagctgtgaaacgtccaaaacgctgatagtgaactttgcacttctccaccaagtttgcaattagcgaggcgaaagatacttttaatagaaatagcgtatggggatggaggagactagtgcaacattcactcaatcgaatacacagatagaaatgaagatagtttaaaaacattttggactatggaatgatatatatcttcaaaccatatttctttgttaactatgttccaaaagtttaagggtcaacaagtaaaaacagtttagttactattgtgcttagataatatggtgaatatgttttctgtgtactcggagatgaaggcgaagaagacaacgcagcggccaagcaaatcaaaacaaaaactcaaaactaacaaatggagcacacacgtgtgtgtccgttagtgtgtgtgccacatagatacaaactatctatatgtgcgctacagatcggcgggattattcatcaggctgccacatcatcatcatgttgatctccgccgctccggcgtctccttccgctgccctccatcctccactttccgcttagctggcgttttctataattttcgaaagctattttcgtaaggcttgcatttatatttagttgccacaacaaacttatagcaaaaatccaagacacaaacttgtacatgattaaattttggccatatgatgatgccaaccaaaataaaagtcaactggggtggaaaacttttccccttcagattttccaactcgaatgtgtgtgctttcggtacagtgaaagctaagccagagctcagcaaagatcagaaaattaatggaaactcaaagtgaattaaaaaatccaatcagtcgaatgtgattatcagagatcagagatgcatcttccaaatgagagctgtcagttcaatttgcatggctgatcgaggtttcactgtactggcactagcgtcacacgtactgtgtactaggtataacgtcgtccatttgttaaaaataaaaacagatttcgaaccgaacacagaatggcagggaaagatgcccaatgaaccccaccgagatatcacacataggctaaaacgatctctccagggatattcacacatattccacacatcgcaatagatttagggcaaggtgcagatcttttggctagaatcgcaaaggggtagggggtttgctttttgatgaggcggcgccgcgatcaatgagctcattgctgtttacgatttgtaatttgtatatgtctctgctctatataccaaaacaaattgggggtgctatacatgcttgtacccatatatatgtcggatgtatatgggcgccaaaaagaagcagtctttggtcgaacggcgaccattgatacaattagtaagtcaagtcgtcgggcatttgccaaaatgccaatgagacattgacattgagcgtgcgatcgattgttccgatccgatctgatccgaatagaaccaatacgaaataatccgatgttgcgcaggtttcctttggggccaacattggcagcctcgcgagtcttgcccagctagtcgaacccaacgcaattcgagggagccgccagtgcaatattagataatcgagtaatttttccccttgggatccagaaagaaagctgacaatcaaccgaaaagttcaccacaccccttggaatgtccaacgaacttagcgaactgatcgcccttggctgtccagacctcgcggcgcaaaagccgcagggcggtagcacccaggtggagttgatcctcaatactgagcgccgcctgagcataaagcagatgacggccacggatttggccacacttagggcagcagcagccgcagaagcggaggccagatctcgagcacaggcggaggcggaagctctagcaattgcccaggaacagtttcgtcaggcccgcgaggccgagtccaaggccagagcacgtgctgccctcgaggtgcaggctcagctgcagcgggtgatggagagcgagaaacgcaggcaacaggaagaggaggaacggcgcatcaggcaacaggcagaggaggagcaggaggatgatgaagacgacgacaacgatgaggaagaggaactaaccaagggttcccttccaaccaattcaggtccaagagaacgcattgcttcgctaccctgcaacatagatgatgccatggagatgcaccttcttaacgtttcgcagccgaaggcctcttccaaagatgactcaccgcctaagaagagtacctctcacatagctgactcgattgagctgctgagaatgcagcgagctgctcgggatgcccgttcccacaatcgtagtcgagagcgttccatttcgccagatcgtaatcgcgaaaggagcgctgctccagatcgcctccagagttctgccagcatgagcagcttggactcggccagtgcatcggcatccagacaacctagcaaggcaggcagtcgacgtggtagcaccacgagtgccaccggtgtggaaccaccacttatggcagcacctccacagcctaccaaatttccactcactaagacggtgtcagcgcctaacatggaccggcggcggagcagtctgacatcactctttcctgggccatcgccattggtggcacccgaaccatctctgcacactaatcccgatccaagggttcaagaacagattgaagaggatcgtcgtcggcggcgaatggacgatggttaccgtgagatacccagtggaaaaatggtgcatcgaacgaagacaccgccaccagtgggcactaaccttggagtgagcctcaagcgggtgacagcgcccagtggatcgataaccatcaagcccaaggaatcgcccatgctgggagtcgtcctgcgtagagtggagaaaaaaactgtaccgcaaaagagcattctagacgacgataaaccactgtaccacttctccattgtgcgcagcgaccacaaggaacacgtgcctgctcagaaaccaaaacccaagcctgctcctccagctgctaaaccaagtcccggtggcatccttactggaccccaagtaattcgaaacgctcccaagcaacctgtgcccgtcaagccacagcgtcctatgcccggcgttcccatcactatcaccaagatcgagggcgacaagattatcatcatcaagaagatcattgtgcctaagaacagtaagataccggagcagtatctgcaggttggtcgtcgtcgtgttggtgatcgccttgtggtgtctgtagttcgtctggtgtttggtgtctccttcctcttgtgctttgttcgaaatctgttttatagaatttacctcgatggtaggaacacgttaatacacttgggaatagttatgggttgtaaaataaggaagtgcaatggtttgattgtgtaagatataacaataccataaataaacgcacacacacataacacacaaaaccgcgataaaggctgaatgaacgggttttgattgaaaactgattgcaaaacaagctgaatcaacggattcagttgaaatcggatcttttattcatagaacccaaaacggttcgcagtgcgcgattgtttcctatagatgagtgaagatgccggcaagccagcaaatacagtgccctcagcggtatcctcctccgcagccccatcgccaagcctaagaacaaaagaggaatcccagccagctatgcagaaacctacgccgccgccggccagtggccagcagttctttcaggtggtctccccgcagttcgcctctgtgctatcatccagcatcccggagagcaagtgtgcggtgcgttctcccatatcgtcgccactagcaatccggaagagtcgtccacctctgctgccgtcgagtccaaagtccactcctccactaccgcggaaacatcaccctttggcttacaacgcggcaactggaacaatcagcagtgcctctggagcagcgttgccttcccggttaatggccaccattgcctccagcccggcttctagtatatcgctgtcctcctgtagttcaccttcatcatctccaccaccgccagtaccatgtcgagctcctaagaatgccagtagacctgttgctgtgactgctgctccacctccatccacctcgaacgaaatcagtttggacaagttgctgcaacagcagcaggagctagaggagaaatccgcggcagccacaaacagcgcaaaaatggatgcaaacttctacgatgccgagattgagatgatgaacaagtatcttaagagtctgcctgactacagcgaactggacaggaagctgcaccaggagttccaggagtgcgaggatctctatgacaagatcaagcgtcagcagcagccgctggccaagtccaattcgcagcaatcggtcacgaaggcagtaggaccaggagtgcctgcgatctcctccggcttatcaaagtcttcttcaattaacttcgcccagaatcccagcagtcgtggagctgctccgcgtttggcctatccttcgatattttcccaggctgcaggcgaacccaagctgcagcgcagcatttcaagttctaatatgcctataagtgcacctaattcaatgcgtccgctgcccaccaagaatggcctgcaaagtggctccaatctgtcccttaacaaacagttgatgaacgaattctggagcgaaaatctaaccagttctcagaagcggcaaacacctaagcgaaccttttggaactacgagaagatctgcggtgcccagttgggcgatgcaggacaaccctttaaggtggatgcaaagactgccaaaaaattggctatatttgatcccacagttgcggaggccgctcagaaggagctgcagcgacctcagcagtcacaggtgccccaaaatcagccccacaaactgcagaaaaatgcatctttgtcgcacctggatctcaaggtgcgtcaggcggtgaccaaggacgatctctataagttgatctgcaacgagcaatcgccgttggcaggatcgaattttgtgagtagagtgcctgtgaagcagcaatttccagcacagcagcaacaggtgcttccaaagagcatgtccatgacgcatgtgccgggtggtggtcaacccatgggagctccattgctgcgaacttctagtcgaactcatatacccagctacatgaagaatctaccatctttgagcaggagcacatcaaactctgcaatactcatgacccaaccgcgaaaggaacctccaccaaaggaaccactgaaagctccagctccacttcctgccatagctgcaccgacggtgggcaaaccaagtggtgtcctaaagagctccagcagttcctgtgtcccctcaccgcgttgtgccgctgccttctttcgccgacctcaagaagctaacaatcctcagcagcaacatcaccagccacttcagaaaccgcagcaagtggcgccaattgaggaatccggacctggtgattccgcatctctggaacgaaaatcggagaagagcaatagcacgttaagcacaagcagctttacggtgaccaactgttgcaccacccacctgccgcagctctccaagttcacctcatcgttccatattgcccccaccacagcaacaaccacagccgctacagcaacgccgaccccaacaggagctgcaacaacaagcgatcagcagcaacaaagtggcggaacaccggcgatggtggctgccaatttggaggtgccaacatcgtcatcgtcatcagcggccacaaagcgccagaaagatgttgacaacaagctagaaaaatgcttgaacgacatgctaaagttgaagaccagcagcaacaacaacagcactagtaacagcaataataatgcaatcatgtcgcattcgctgacgggcgagcacaaagacccgaagactgcactcgaaggccccacgagcagcagcagcagcagcagcagcaagtacataggtgaatctcagatccccgtgccagttcagctgtacgatccgcagaagccgttgctgcagcaacagcagcagcaacaaaggatctgctatcccataggcaaatctaactctacctctcagctacccatgggcggctatcagcgattgctgcaacatcagcagcaacaacatcaccaacagcaacagcagcaacatcaggaacagcagcagtatccgcagcacaagcgacccttcctcaactggaatagctttgcatgttccgccatgaacggagcgagtgatcccttcatgcagcagcaacacatgcctgcccaccagcaacagcagcatctgccacacaagctgcagcaatcatactcctcgtctcatgtgcccaagcaggcgcccaaatcgggactggccatgtttctgcagaagaacaccaacaaggagaacaagtttggccagccgatgcagcagcagccacccggcatgatgccccagatgtatggataccaggcgccccagcagcaatccaagataggctatccccgcacaggtgccccactgacgcactcggcctccttcagctccgcccaaaggccgacggccctgcagttccaccagcaacatcagcagcagcagcatctgcagcaacagcagcaacacccccagcagcaacaacatcagcattccagctttggggtgggcatgatgagtaggaattactataatatgcccaagcagcccgagcgcaagccgctgcagacctttgatccgtatgcctatcccaagccgaatcagatgcagccggtcaagtaccagcagcagcaacagcatccgcatacgcagtttcagaatgcttccgctggaggaggcggtggcggtgctgctgggcttcaatacgatccaaatacaaatacgcaattgttttacgcgtcgccggcgtcatcgtcatcgaacaagcaaccgcaacaaccgcaacagcaacagcagcagcagcagtcccagctacaacaaagcaattctgtcatattcaatcactcgggccagcaacaccaaccacatcaacagcagcagaatgaaatgtccaagtccgcattggggctgcacttcatcgaggtagattctattcctccaatttatttctgtcttgttttcgtgctgcacatgtgtttgaaccaaaaatgcccactaacaacacgctgccgcttccaaagaaagtttgccccaaaatagctggctgactcatcgctgggctccaaaaggccgccgacgatgtgttttcccccccggtttctgtactttccctcgctttgctaatttctgttggttggcccccaagtttgtacttcctgtactcttggtggcgtttcaagtgtgaagcgttcccaagagcagaggcacttattgcttacctccaaccttagaatatcggtccccttggcgtctacaccgatctcttggcctcttggcaggctcttgcacttgtcgacatcgacaacattgcacaatcgagcaaagactgcgggaaaattcaatgtcaattttcctcagctctattaatagtggctgacagcttaatttatgtttgtttacacgatttcagcgcttaaaaaatcttttgcatatttgctaactgcctacatgaattttatgcgttgatctttaacaattttatggccgaattgcgattccgatgtaattgttttaataattaaaaaacactaaacaacacggagcgcgttcagcagaatcgaatttctaaaaatatgtaatactcacgacctgctctcgcgctctccgacaaaaatgactgatcgatgcgacgactgactcgactacaagatacccctttccaatcaaaacctcatgatcatcacccaaccttcccttttacattgatataacatttttcgcatctttgaacccttatgcttaaatagtgttttgcttccagagcaacatgaatatggttcaatataccctagtatattttcgtacttgatctgcagactccttagcctttagtttttggcttctttcggtcgcagcaaataataatagcaacgggaagaagaggcgcacactcagctcagcagctctcccgcggatcttacggatggtgctccgtgctcggtgttctcgacatcgccgatattttcaatctttataattagtatttgtggcgtgcgctttcgttcatgttgcgctgatttcggtttgtttgtttcgaccaatgctcaggcaatcggcggtcggtgaaggaaacgcgctgtgaaaactgtctgggaaattggaagcggagctcgtaacattggatggctctaagtgcgtgaagtgaatggaaatggatgcatctaaagtgcagttttgatggaacctcgagtccacgtcgaaattgtcgcagtggcgggggcgaccagcgtctcttgtctctgttgtgtgtgtctatttccgtcgaagctgccgaatctcttacaatttcaattatttttacacataaatacgctctgtctatactagatctctacgtacatatattgccactccgagaacgtgtacaatacttttctattttattcgtctacaacaaaatcatgctcccaacaaataccagaaatcagtacaattaatgaaatagaccaagtcggaggagcacgatccgtatcggccaaaaattcagacggcggcccacccacccaacaaccgcaaccaagcccctaagaggcgttaagtattagccgattgtcgtcatcgtcatcgcgggcgagacccacgcgaaatctgccgcggcgaggaggatatccgacatccgaaaaaactaaggaatggccacatttctgaatcgttttcatcgcgaaaaaagcgaaaagatattgccagcgacgacggttgccgaaaatgggaaaacagctgacgccgaagcggtacaacagcagcagcagcagcagcgtccgcagcggcggtacatgcgaagcgccaccgccgccagcgtaacgcagctgctctccgagagctgcaacagtctgctgcagcgattccgacgcaatccaagcgaacgacctgataacaaacaacaactgcagcagcagcagcagcaacgcaattggtaatcgatgcaaaggaaatgaagcaaaagatttataatttatttttaattttgcgtgccttttttttttactttcgtcgcctttcgtcaagcgaaaaactcggtcaaaacgcgcaatgctcattgctttcctttccctctattttcactgcgagtgaaatgaaaatgtattctctgtgccgctggcgctgatttaagcagagtggtcagcgcgtaattgcgagtttagttgcagcgcgtcattccgccgcggtcgaaagtatctcgcgatcggatcattttattcgcatcgcatcggatcgtttcgttttgtatattgcatttcccaccgccttttggccatcgcaaagaaggccaattatgtaaacggtcccaagtgcgagtgcgttttaaatcgctttgaactcgcatctgaacttccagtagtgcgacgatctcgaaaagtgtgaaaatcttgctgccataaatcgtgaataattgccattgaaaagatacgagttgaaatttgatttatcacgtgttattgccagtcataaatcaaacagagcttaacggagctcttaaatcagtgtgatatgcactggatacccctaattgtcagtctaaagagccaataaatgctcgttgatcaataatttgaaagtgaaatttacgagagtgggccaagatttggctgagagtggaaatctgattttttgctatcttccagcatgtccataaaaacctcgaaatgttagatataatgatttacgcagtctaacttttgttaaagttcaatatttctgccaaaaactgttggttgcacaaaaaagcttgagtttccctcgagctttcacagctgtccgaattctgcgagtgaagaatccgagtggttctcttcagcagattctgaaattcctcaaatctctcttcagctgtcttcggggaataccaaataaatactcaagtccaaactgtggatgtctggcaaattcttcctcattacgcatgattataaagtatgaagcgaatctctctttttcgctgctctttgtttaactgcaattgcccctttattatttatatgtgcgggcatgtttaaaataaaacgtaaatgtttcgctttgttctttttatttctttccgcgctcgaccagcagcaattttattgttcttcttgttgactggttgttttgtcggcgagagttcaaggctttttctgcgaagactttcgatcatttcccatgttttgctgctaaactgacggaaatgtaattacactgctacggcttacaaagcgaaatgcatttcgatgaagcgtgcccagctggcggacaaaagaagcatccccattcgaagcggatcgcatccaatctactatccaatccacccactcgtctacatatgttatttgggtgttcgcccgctctcgctcgcacgcggtagcgacctctcgctctggcaagtgcgcaatattttcacacttttcacaaaaataaaaacgattcctcaatattttctggctaccgccgacaccgccaccgccgccgccgcatcattatttccttcatctacttcgttcttcgcatctgccgcctctttctttcgtcgtcgcacgaattttccgaaaaattttccccagttttcctcagttaaattttggtccgtgtcgtggcagcgcgtcccgtccgtcgttcgtcgcgaaccgcgtggatcaacgcatccagaccgacaaagaagaaccgaatatatcctcaccagaactcattgttttgttgggcttctcttttaagtgcggcagcaatagccgaggatcacaaagactcgaccccaacgaatgacagcaataataacaataataagggaaaaggtggatccagtagccaggcccagaagcagagcaaacgtcgccgcagctcggacaaatcctcggccagccggagacatccggacggcgatagggaacgggaacgagaacgggacaaggaacgagaacgggatcggcaacaggacaaggaacgcgaaatggcagatcgccacagacgctactatgcgagcggaggactcggcagcaccacaggactgggctaccatcccagcagcagcgggagcaccagtaccgctgccctgatgggtcgctaccagaagagctccaccacagccaacgccctggacagactgcgcacccacctgagtcccgtgggcggctactacaagccattaattagaggagtgggaggcggcaggcgtgaccgcgacctagacgatgttagtatcttcgaaacccataagtgaatcaaaagcgagcggtgtggaaaccaacggtgtagaccactttcaagacccaagacccagaccgagatcccaaaagcgatcccatgactcacagtcggggtatttaattttggaaaaagcgaaagaaatcatctcacctgtcgcccgtgagtcagcaagtcacttgccctaaatgtgtgacatgtctgactggcggtcaggaaatgaggaaatatgcgcaattaaagcgttatagtgtatagtatatgcgtgtttggccaaacagtattgcaccaactattgctacccctattgccacatagacggctatagaaagtttcttcctacacagaagatatatgtgcagatattatattaggggcccacacgggcgcgttttatagcgcttctatatgctcattctatatcttcagcttcattcttgccgtgtgcgtttacgttgtcgaatttattttcgattccaacatctcgtcgcttttctctattccgttatatttgtattagtatctctctgtacgctgcagatgtgtataaagctattcacgattttctgccgctttatatataaactttgaaggtcgtcgcgccgtggacttttttgtttagattctgctaggcattctaaataaaaataaagggtatctcctcagcccacctctctgaaaatccgaaaatacatggagaaagccaaatccggatagagtggctctaatgttagtgaaattgtgcgaaatgaaaaggcccaagcacaccccataattagtcattgccgaaaaggccatttaaatgggtctaagtctaggtctgggtttgggtttcggtttctgggccttcttctttcgtggagcgtagagtaaagagttttacgcccgtcaccgttggtttcacacgagcgcagctcttgagcactttccttctccattaaatctgtgaatccgaaactgaatcttaatcccaatccccctgaatcgtatgattcctcagcgaagagatctgctcttggacaaagacagaacgcccaccacctcagcgctttcctcaggaggcaagcagtcggccatttcccggctggagaacaaatactctgatatcttggaacgagcggctggcaggcggcgccatgaagaggatcgcgacaagaccctggagccggatgactatggtgccagtggtagtggcggattgctccgctcggccactgcccatcagctggcgaaatctaagttgtcctccagctcctttaatgcttcggatcgcaaggagcgcactccataccgaactcgagcgcagaggcaaaggtatatggccgagtccaatgacagcggctatctgaccagcggcaatcgactgctcgacgagaactacccagtggactatggtcagcgatacgactatcacgacgccctacgcctaggaggagcatcaggatatccttcaagtcgctacggccgaagaggtggcgaagaagaagcgctctctcctcgctccacaagagcgtatggaagaaccaaaaccgttgaaagtctactggctgctgagatccaagacagcggtcgaaatgcagctggacccgccgaggatcgaccattgaactcacggaatcgctttgctcatcgacgtaaggagcagcccccagaagaactgaccgctgaagagcgtgaaattcttgccgacgatcggtcttcggaggacaatgcagccattctgatgctgctccgagaggacaatcagttcctggaggcgaaaaagttcgaggagcgcatgcgcaaacgccgtgagcttagggatcgcgtcaagcgcatagaggaagcggctgaggaggccaagaagactgaagcggcagtagcggcagcagaagccgaggcagctgctctcgagcaggaggccaaaaaggccaaggaggcagccgcagcagctgcaattgcggcatcaactgctgctgcaacatcatcagcaactgcagccacactggcaacgccacaggaggcgcccaagaagaagtcgcgcagcaaaaaagtaactagagacggtagcgattgcagtggctcctccgagagcacctcgggcagtagctcatccgatgaggcggaaacagaaaccgagacggattcggctgcgcccggtgtgcaactaacccacacagcagacacaaccccacagacatcgttcccgtctgtaaatggcaccaccaccaccagctcctccatctccaccaccaccccctcaaatacagccaccacctcatccactagcacttctgctctttctaaccacacaacggcaacagcgacggcactctcctccggcaccaccaacaagagccgctttctgccccactcagatcgcaacaacaatgacctcgccaagtacaagcctagcagccagctaatgcactcctccagctccggggcactagccttcggtggcattggggcgcgccttgcggcagcagatgctcggcgtcagcagcagcggtatcagggcgccagctcacgtaccgccgcggtgctgagcgagttcgatcgctacaagccattgggatcgggaacgggctccggatcgagctacctccatgactcatacagcgggagtagtaggcgatccaatgccctgggaggcagctcgttgtatccgcagcgatcccaactggatgcctaccagcagcagtaccagcagtcgtcctcctacctgcagcacgatcactaccagctggccaagagcgccacctcgtcggccctgttcaacaggtctcgcattccaaagacactctcgacctttgtaagcaataagccatcacgaccatcctggcggatgggtgattcattagcagcttgagctttgttgccgccgcctcttctaactgcaactgcaattgtccattgaccctgatccccgatcccgaaccatccccccccccccccaaatcacaaggccttatatcctaaactttctcctagacaatcgacctactacagaaaaagctaacagcaatgcggattgtaatccatgttatcttacttatacaatgttgatcctgcctgattcttttgcatgtgattttgaaactgggataaaaaacgtaagaatccctttacctcgacttttacaacgaatagaaaacaaccttatttgttcttttaccatttaacatttacaatatattgccaaacagctattaatgttattactaagcagcaagcattcgatggtttgttgttttttcattgcccaagaaacaagagcacagctattgatgcatttcctatttatataaatatatatataccattttcgatatatacctatttgccattatatttgatattgtttgtacatgttttgatattaaccatttttgtaaacacaaatttcaaaaatttgtccgaactaattttcttatcgaacaaacgaaacgtatttttctcgtgttttttctgaatatgatgatgaaaatcacaatgatgatgatgggttgatgatgatgatgtacatacacaacttgatggggatgatgaaatgatgatgatgatgatgttggttggtttacgggctatctgcggctgaattttaaacggaatgcgattgctttggtgccaacgtgggatccggatcgttcgtcgtttggatggtgcgcttttgattgctttgacctgatgaccaacaacccgtggatccgatcaaacccctggatatatatatttttgtttcttttttctctttcttttttgtttctttttctctctttcaaattacatactttaccacacacgcacacacgcaccttatgtgtacgtctgtaaactgccatcgacaaccacccaacgcccccaacttctcgctcgcaaattctccgctcgccgtttcgctcgcctgcaaaccaccttctttcaacggatcgaatgcaccacccgcaacgaaacgcaatcgcaatcgtcgccacacaccgcaaaacaccaccaccacccccaacccctgcgacatcggcaacgccaacggcaaccactgcaacgtcgtcgctccgctccaatccgattcgatcgaaccgaacagacagcaaagcccgtcattcaagatgatgctgatggtcacttaatttaccacaccggagacattctccatcacagatgttcgtgacaatttttggttttttatttttccatacttatgtttagaaaacaatcagaaaactcttttgaaaaacacataaatacttgaaaaagaaagaaaaaataatgataggcaaaagccaccccaccagtcacacctttctctcctcttcttgtaactctattttcgtttaaaatatttccaagttttcattattatttcttaattatctcacagcaagaccaaaccgcgtcgcgtgcaatcgggaaattaagaagattaaacaaaaaagaaagatagaaggacaaagcaacaattgaaaattttcacacaattttcgtcactttcgcgaaaatattttgaacttccgaatatgtctttgatggctctaagattaacttttaccggcaacaaaattcaactgggaagttttcacacacaaaccgaacacgaacttgtcgcataattaacgaataatattgaaattacaaaccctttccgtacacactcagcttagttcaaattagtattttgcccagcccccatcaaatacttagctacagctacaggtttagctttagaacaagaaaatcaaccagacagctaactttttaacactatttatggacttgtccgaaatcctactacaactcgctatcctttccccgaatttcagataagatcatggccacactgggcgagggaacttttggacgtgtggtcaaggtcaaagatatggagcggtaagaatttccatacaagaaataaaatattaagtactttaaccgcccttttatcgttttagtgattactgcatggctttaaagattattaagaacgtggaaaagtaccgcgaagctgccaagctggaaataaatgctttggaaaagattgcccaaaaggatccgcattgtgatcagtaagtttctaaatatgcaacttgctctttcatctaatctaattcttattatctttcttgctccttcagtttgtgcgtcaaaatgattgactggtttgattatcatggacacatgtgtatagtttttgaaatgttggggctcagtgttttcgattttttggtgagtggattactgaaacagaaatggacgattaatactttaatcgttttttttttttacagcgagagaacaactatgagccatacccgctggaccaagtgcgccatatggcctatcaattatgctactctgtgaaatttctacatgacaatcgtttaacgcacacagatctcaagccggagaacatactcttcgtcgactcggattatacttctcactataatcataagattgtaagtagagacaagcagctaaaaatatgcaaatatccttatactattgtattttacagaaccgcgaggtgcgccgcgtcaagaatacggacgttcgcctaatcgacttcgggtcggccaccttcgaccacgagcaccacagcacaattgtctcgacgcgacattaccgcgcgccagaggtcatactggagctggggtggtcacagccgtgtgacgtttggtccattgggtaagaaacggcttggcattgcaaatatgcgcatatattaaatgatcgacgaaatttcgcctacaggtgcatcttgttcgaactgtatctgggaatcacgctcttccaaacgcacgacaatcgcgaacacttggccatgatggagcgaatcttgggacaaataccatatcgcatggcacggtaatacaatgcagctcatgcttttatttccaaaggcgcagttcccttcaccgaaatcgtttaacgtgtagcaatcatactctttatagcaaaaccaaaacaaagtacttctatcatggtaagttagattgggatgagaagtccagtgcgggtcgctacgtccgtgatcactgcaagccgttgttcctgtgccagctgagcgacagcgaggaccactgtgagctcttcagtctgatcaagaagatgctggagtacgagccgtcgtcacgcatcacgttaggtaaactgccgcccacttgttggttgattccaatgctaaatatatctatttttgctttgtttcaggtgaggccctgcatcatccgttctttgataggctgccaccacaccatcgagtaggtgaggtcagcaacaagcagcccctttcgtcgggcagcagcagccgcgaacgatcgcatagcctctccagatgagaattacagcgatttggttattgttgacagacagcgctaattaagtactcactcatgcaaacatacactcaaggcagtcgtccagcaacgtcttgcacccgactcgtagagtagaccagcaactttacgacgaaccctattttaagagcaaaagtcttattttaaatttttgaacttgacttgtatagatgtttattatacaaaaatccattgatcccttttgatcctttgtttccaaatacttcgagcacatgttgctgtgcattatatttagagctgtgtagcgccatgctgcgcttgtgcattgtaccatacccgccaacagtgtttgttctgtaatgataaccaaatcgtgtatattattgaaagtgcggtgcgtcttcccgacaccagaacctaattgtaaatgtcttgcattgtgcacaccccaaggtggaggagactaattgaaccgactgcaaaccgataattggaatatacaaatgtagttgtaaaataagaaagtcgcttaagcgctagttggaatgcatccccatgtctacacctgtcactgaaccgggagccgactaatttgtaattaatgcaccatttcgagagcgtgaactgaaagctaatgcaagccattatgtacaccgcccacgaatgtacggattattgtaaatgtaaagagcaattgttatgccaccatgtgtacacttcagcgatcgcagcgcattttgtgtaaattcagtagcagccccagagtcatctctcttagaatacgttttcaaatgtgtagaaccgttgccggcctgttttgttcgttttcgtttacaaccgaatatcgaaagatcaacccatttacacattgctacacacaaagtataattgaatatacttatacatacttaattcaaatgattgtgagttagtttaatattacataaatattaattataaattacattatttgcaatttaacccgatcaaccagcatataagataaaaaccaatattgtca

SEQ ID NO: 1847 - DNA, 1992 bp, DROSOPHILA
cactaaccaagtgcaattcaatttaatccgttgcaaatacccgcgtattaatcatatttgttggactgcaggctgctgaaaagagctgctaaaaagagcagcccagccaaacgggcaccgccatgcggtaattttatcgcagacgagctgctagaggcgaactgcgcgcggtaagcgaaaaagagcgccaaaaggtgaacattcccatgcaaacactcgcacctaagcagaaacaacagtacaaaacccatgcaactaccctcgctgaaggacaagctcatgcccagcggcagcgtgcagcaagcgaaagcgaatttctcctggcaatcgctaacgcaactcttgagcggcctgtggcagcgcctctatttgccgcgttcgccgtttttggctctgccagcgccgcccctcgccacgcccccagctaatactacgcagcgccgcgcgaagaaagagatgcccagaacaaggagactccaccactcaagggatcgctcctcggcgggcacacgagacaagcgccgacgacacgatactgccgatcattcgccacccctagctgaggccccatcgccgccgcgcatcaccaacacacatcacacaagatcggcggccaagcgaaggcgacacgagctcgatgccaagaaggcccagatatccaaggaacccactttcgatgacagcatctcaacccgccgacgcaaggagcgttcgaagcgttcgcaccgcaagtcgcccgccgccagtcgacggcagcacaaataccgctacagggacgagacgtcccattcgagctcccgccggcggcaccgtgatcgcgccaaggacgaacgcgacagcggacgcaacaaccgccagtcgcaggctaagacagcaaagcccgtcattcaagatgatgctgatggtcacttaatttaccacaccggagacattctccatcacagatataagatcatggccacactgggcgagggaacttttggacgtgtggtcaaggtcaaagatatggagcgtgattactgcatggctttaaagattattaagaacgtggaaaagtaccgcgaagctgccaagctggaaataaatgctttggaaaagattgcccaaaaggatccgcattgtgatcatttgtgcgtcaaaatgattgactggtttgattatcatggacacatgtgtatagtttttgaaatgttggggctcagtgttttcgattttttgcgagagaacaactatgagccatacccgctggaccaagtgcgccatatggcctatcaattatgctactctgtgaaatttctacatgacaatcgtttaacgcacacagatctcaagccggagaacatactcttcgtcgactcggattatacttctcactataatcataagattaaccgcgaggtgcgccgcgtcaagaatacggacgttcgcctaatcgacttcgggtcggccaccttcgaccacgagcaccacagcacaattgtctcgacgcgacattaccgcgcgccagaggtcatactggagctggggtggtcacagccgtgtgacgtttggtccattgggtgcatcttgttcgaactgtatctgggaatcacgctcttccaaacgcacgacaatcgcgaacacttggccatgatggagcgaatcttgggacaaataccatatcgcatggcacgcaaaaccaaaacaaagtacttctatcatggtaagttagattgggatgagaagtccagtgcgggtcgctacgtccgtgatcactgcaagccgttgttcctgtgccagctgagcgacagcgaggaccactgtgagctcttcagtctgatcaagaagatgctggagtacgagccgtcgtcacgcatcacgttaggtgaggccctgcatcatccgttctttgataggctgccaccacaccatcgagtaggtgaggtcagcaacaagcagcccctttcgtcgggcagcagcagccgcgaacgatcgcatagcctctccagatga

SEQ ID NO: 1848 - protein, 511 aa, DROSOPHILA
MPRTRRLHHSRDRSSAGTRDKRRRHDTADHSPPLAEAPSPPRITNTHHTRSAAKRRRHELDAKKAQISKEPTFDDSISTRRRKERSKRSHRKSPAASRRQHKYRYRDETSHSSSRRRHRDRAKDERDSGRNNRQSQAKTAKPVIQDDADGHLIYHTGDILHHRYKIMATLGEGTFGRVVKVKDMERDYCMALKIIKNVEKYREAAKLEINALEKIAQKDPHCDHLCVKMIDWFDYHGHMCIVFEMLGLSVFDFLRENNYEPYPLDQVRHMAYQLCYSVKFLHDNRLTHTDLKPENILFVDSDYTSHYNHKINREVRRVKNTDVRLIDFGSATFDHEHHSTIVSTRHYRAPEVILELGWSQPCDVWSIGCILFELYLGITLFQTHDNREHLAMMERILGQIPYRMARKTKTKYFYHGKLDWDEKSSAGRYVRDHCKPLFLCQLSDSEDHCELFSLIKKMLEYEPSSRITLGEALHHPFFDRLPPHHRVGEVSNKQPLSSGSSSRERSHSLSR

SEQ ID NO: 1849 - DNA, 3440 bp, DROSOPHILA
tgagaagggcgagtgtccagcgacgaattcaaagaccagtaccccaaaagcccaccagtccacgctggttccgtaaggcttcgattggataatctctggcggcaggtactccggagttccgcacaatgtcattgtacgggtttccactttctgtgggccagaaacaaacaacttgaatagatttctgatgtgttagcaaaataagataaaaaacaaaccttggcaaatccgaaatctgtcactttcaagtatccgttcttatccatcattatgttctccggtttgaggtctctatagagcaaactgcaatgatgcagatactccagagccaaaaacacctgggcagcatagaagcgggcctgtttttccgtaaactttcgcactctttaacagtcggaaaatggaaaattatttgtggtcgactactgagatttactcactttcggtggtaggtgaagagctctccgccaccaattaggggcaggacgaggtaaaggctgtcgaagtccttgtaggaggctatcaggttgaccgtgttcgggaacgtcatcgaacgcagcacgtttttctcgctcatcacgtggctcacctgtttagtcttcacgatctgatccttgctgagctgcttggaggcgtaatagacgccggactcgcgctccctcaccaactgcaccttgccgaaggatccggatccgagggtcgccttaatctcgtagtcatccagacccgtactaggcgacggcgtgttggtggcgaacttcttgttgaagtcctcgcgcaacttgtccaggatgagaatgtagtccaccttgggactgaagtgcatctgcgcttgctccggctggggacccattgcgacaacaactcgcgtattagagttctgagtgatcgcgtcaattaactataccagaatttcgaatttttgtctaaagcattacgaaagctcggattgaaaatgacctgacgctccagggctgctatttatttatcaaaagaccatttatgaatgtaataagagagctgtattgcgaaaactacttttacaaaatccaatcacgatagcaccccttgaaattaagcaaacactaaagaaaacgacgatttcgaaggacacattgacatttaaaaattcgcaaacaattcgggatggcggtttattcgggacttgtaccgatccttgaactcgaagttctcgaagttcgacagatcttcggcgccggaaatggtgggctggtagggggcggtgacttcctggttgagaatgccaaaccaatctacgccctggaaccacggatgactcttcacgtcgctggagccgtcgttcgagtttcctaaactgagaaggggtggcatgagcactgcattggaagcaccttgacccactcccactccactcaccgctttgaggtgtccacctgcatgaggctctcgacaaggctcctcagctgggacgtaaagtatgagggcatcttgtagtcgcatatgcagatcttggagtacatcaggattacatctcgattgtgaatggcaaagggagaccgccctgccacaaactcgtacactaggataccaaaggcccaccagtccaccgatttgttgtagggccggagttgaacaatctccggggccaagtattccggggttccacacagcgttgatgtgcggccatccacacgctgtgattatttgaggatgaaagcaatgggaattatgtgaagtcttttccccaccttagtgaaaccgaagtccgttattttgatatagccgcgctgatcgagcagaatgttctccggcttcagatcacggtacatgaggtgcatcttgtgcatatactcaagagcaagtgccacctgggcggcatagaatctggcgtgcttctcgttgaacttgcgaactcttttttatgggggggggaaacccgttggaacccagtctgtgatcagatgaaatgagcactccagaaagggaatactcacctgcgatggtaactgaacagctctcctccattgaccagcgggaggattaggtagagatagtcgaagcacttggtcgagtccaccaggtagatgaggaacgggaatcgggcggcgttcaggacgtgcttctcgttgtgtacgtgggccacctgcttcagccgcaccagatcctccttgctcatcatcttggcggcatagtagttcttgccactcttctccctgaccagcatctgaagattattatatttcgaaggtgtagcacatctaagaaataccctttaactcaccacagtgccgaaacttccgttgccgaggacggcccgggttatatagttttccagattggtgtagggcgactgggtctggtgattccaccgctcttcgaactcgcgactcatgttgtctaggattacgttgtagtcttccttggagttgaaaacgtactgcgaagtgtgctggctcataacagcataacatccggccaatcgcgcatcttacggcgcctttgcgagtgccttccgttgcaaagctggactagcgaaacgattttgagtggcaaatctattcggtaatcggcgcttgatacactagaaatttggatttcagtaattttactcattaatcagataatcggtgacggctgagtcaaagccacaatgcaaagtccacgctgtggaggacatgggtgtcacaaccatgactgcattttcaacaccctatatttgagccatctttcattcttgattgatccattactggtcacattctaaggattctccatttgtagtttctaatttgtttgtctattttaagtaaactacttcataaatcgtatcccagcaatttagcagtttagcttcaggtaaagtgaacttcatgaatctgaagttccaggaatgcctaaagtcaaggaacgatcctttcaattagccgactgagcccttctccaaggtatgacaaatttacctccatctcctcccaggacgactgctgagaaatggcaatttcctgcgactgtgactgagtccacacacatgtgcttctgagtccgacttctcgacatgtcctggagtctggacctctcgtcctgttttccgtctgcctcctggccgcaaaagtaagaaaaattgcaaaacgtccgcttgataaatgatgctaaccaagattacataagttggtaattttctagtacatttatttccacatgtcaggccagtcaagttggtaactccagaccgcatcttcatgttgatggacatgtgagtgggcctccatgagatgggacagtggtaggcttacgaaccggatgccggaattgttgcaggcttttaaggtaactgtcgaccgaaccgtttattggccatttcgggccagtctgttgtcattgtgccacctaaattgacaattaatcattatctttcggccgggtcggcattcagattggcagattgggtcagccctggt

SEQ ID NO: 1850 - DNA, 1182 bp, DROSOPHILA
atgagccagcacacttcgcagtacgttttcaactccaaggaagactacaacgtaatcctagacaacatgagtcgcgagttcgaagagcggtggaatcaccagacccagtcgccctacaccaatctggaaaactatataacccgggccgtcctcggcaacggaagtttcggcactgtgatgctggtcagggagaagagtggcaagaactactatgccgccaagatgatgagcaaggaggatctggtgcggctgaagcaggtggcccacgtacacaacgagaagcacgtcctgaacgccgcccgattcccgttcctcatctacctggtggactcgaccaagtgcttcgactatctctacctaatcctcccgctggtcaatggaggagagctgttcagttaccatcgcagagttcgcaagttcaacgagaagcacgccagattctatgccgcccaggtggcacttgctcttgagtatatgcacaagatgcacctcatgtaccgtgatctgaagccggagaacattctgctcgatcagcgcggctatatcaaaataacggacttcggtttcactaagcgtgtggatggccgcacatcaacgctgtgtggaaccccggaatacttggccccggagattgttcaactccggccctacaacaaatcggtggactggtgggcctttggtatcctagtgtacgagtttgtggcagggcggtctccctttgccattcacaatcgagatgtaatcctgatgtactccaagatctgcatatgcgactacaagatgccctcatactttacgtcccagctgaggagccttgtcgagagcctcatgcaggtggacacctcaaagcggaaactcgaacgacggctccagcgacgtgaagagtcatccgtggttccagggcgtagattggtttggcattctcaaccaggaagtcaccgccccctaccagcccaccatttccggcgccgaagatctgtcgaacttcgagaacttcgagttcaaggatcggtacaagtcccgaataaaccgccatcccgaattgtttgcgaatttttaaatgtcaatgtgtccttcgaaatcgtcgttttctttagtgtttgcttaatttcaaggggtgctatcgtgattggattttgtaaaagtagttttcgcaatacagctctcttattacattcataa

SEQ ID NO: 1851 - protein, 393 aa, DROSOPHILA
MSQHTSQYVFNSKEDYNVILDNMSREFEERWNHQTQSPYTNLENYITRAVLGNGSFGTVMLVREKSGKNYYAAKMMSKEDLVRLKQVAHVHNEKHVLNAARFPFLIYLVDSTKCFDYLYLILPLVNGGELFSYHRRVRKFNEKHARFYAAQVALALEYMHKMHLMYRDLKPENILLDQRGYIKITDFGFTKRVDGRTSTLCGTPEYLAPEIVQLRPYNKSVDWWAFGILVYEFVAGRSPFAIHNRDVILMYSKICICDYKMPSYFTSQLRSLVESLMQVDTSKRKLERRLQRREESSVVPGRRLVWHSQPGSHRPLPAHHFRRRRSVELRELRVQGSVQVPNKPPSRIVCEFLNVNVSFEIVVFFSVCLISRGAIVIGFCKSSFRNTALLLHS

SEQ ID NO: 1852 - DNA, 3490 bp, DROSOPHILA
ctatttttgtaattttcttaattttttgtttcgcgcagcccagcggaatctttttgtgtagatttggtttggctttgcgggcgctgactctgatttctttcgattgtcttcccggggttcaaccccaccaccgcccgccttgtggcattcataattttcgtttgggaatcgagggtggagtgtagtgggtaggggagggtgtaggtgtgggtagaaatgttggtcatgctgcgggcaagattttcaagtgacacgagcagttaccgccacacacgcacacacaaacagaccgctttgtgcattaatttgctggtgtgaagtgctaatcaatatatggaggcagcagcatattaaggaaatgcaatttccacaggctgcgttggcttgtggatggggggtgaatgggggcggaaaaagtcacaaagttcccctaatttataagtcaaacatgccgggaaattccagaaggaggaatgcattctgcagttaaagaggggggatcaatgacattttcatcggtggcttaataatggaatggtcaaatgtttggaattataaattaaagccacgtgacgaaattaagtgtttatacataataaatgacagtagataaagttaaactgaattttaataacaattgagctgcaactgcctgctgaaacataaaatgtgaataaatcgatattgatttccacactttactttaagtcaattttttggcttagcttttaaagtcaattaacatttatagcaatatttgtgggtatatttgggaatttagctcgactcacctggtgatccatgacggttgcgcggtccttcggtgcgcacggcgagcagggtttccaggttgctgatggccacaagggccagtagcagcagcgccagggttgtcaactggccgcgctgacgatggtgctgcggtgattggtggtgctgctgctgctgcagcctccgatcgatggcgctgctgctgtgatgctgtgaatggcggtcgccgatgggcgaggatgatgaagatgatggtgggcccgatggggcggcatcagtgacctgcagcggatcggcggccgtatggctgtcgccgttggcggggtcatgggtcagcagggttgtcgctgatggtggtcgccagcgagaacgcattctggccttgctgggcggcttgcgaccaaatccgaatccaatgcccacgggcgtcggattcatttttggttcgtcgggcgcttcgcttgctgctccgctcctttctccttttcctgtttggtttctgtgggaatcctcgattcggatttgggtcttgttcgtttcggtttttttttgttttttttggtgaccctctggtgacctcttctctgcccaccgcacttctgtcttttttagggttgcccgctcctctggctttgttgcgttttactttttggaatatttatttttttcttttggtgggctgctttaatgaaataagcggaaaattaacgcgtttaatatttctaatttattattagggggcgtggccgggggggtggcacttgagagagcaattaattaaatttaactccccccattcgttttggcccgctcgtcttattccgtttgctcttttgcctgctaaacttttttgcttatgaaagataattgctcgctgcctcgctcgcactctagccccgtctctctctctctctctctctagctcgcttgctggcgtttggccctatctttttaacactttttacaataattgaaaaacttttttcggctgctttatgtgaacttttgccttcggcgtctttaaacttttctccttttccccgcgattttctttttcgtatttatttttatacaatttttcgtcggttttttctcttcttttttttttttttttttggattttgtcgattggtgtacttcagacacttgaaaaataaaaattaatatggtgtgagagagacggagatggcatcttgtcgcttgttgttgttggctctttcgtttgataaggaaattgcatatccctcggagtttttcacagagctccttcgttttttgcactgcaatcctgcaagtagaaaattgtgggcgaaaagttagcacaatgttgatccagactattttccaattattaagtgcagtgcgattagtttgtggaaagttgttaatcaagaatttgctagagcaatatgctggtaaatttccaaggaaatcattaagaaatagtttctaggggaatgctgtgaattatagtatatttggaaaagaacttttctcaaacacttctatggcgattagacaaatgttctaatactttcagctattatgccattttttcttttgcaataatttctccacataccaacgaccattatttttttagtgcaatttgaagactccggacttggaatcaagtggcattaccgcatcgaaagcgaaagaggaagaaagcggcgtggaaacgaggaagaaaatagaacattgagcagattacattaaattaaagcacaaatgaattgcttgacgaagcgaaagcgaagaaaaatatgatgccctgagatacagggagagaaaaaaagtgagctggaaaacgtggatgcgaatgtacatggatatgaagtaaagtaaagtataaaaaaaaaaaaaacaacgtgagcaacaatccaacacaatagctggctgagatcataaatatgacggggattcggcttagttttggtttcgacgagttggcagatcggagatggcggctgcacacacaagtggaaaatcacgcacatcgtctcagaaaaccgaataagcggacggtggccggtgggcggtgggcggtgttcggtttggcagacacaataacaataagtgggcggtggttggtgggtggctcatgcggttaggtcagagcgaggagagtaggcccgacgatgccaacgagtcaacaaaagaaattgctaatgtgggcaaataaaaatggcacaaaaaaagcagtgcacacgcacacacacacacacagatgccctggtagtattagacaattgaaattgaaaatcagtgaaacctgttttcacacacaaaagctcacgcacgccaagcttaggcgcacaaaattgaaaaaaaaaaaggaaaaggaaaaaccaaaaaaaaaaaaaaaaattattgcaaaaaagcgaaatgagaaaatggcacagagaaaatgggaaaacaaaagaggaaaatccaatgcaaaaacacagcgcaaaagttggggtcaaagatgaaatgcactcgaacagcagaaaagaaaaggaaggaaaaacattatataaattgtcaacaactccgggaaattttaataaggcggaaaaatatgtacataaaggtatttttaaatgagttaaattggttaaataaatactttttcttttataactttttactacagttcgcaaggcttgaaagcgaaacaatgcaactactaaatactatatatataacttgtattataaagtataaaatctttcaa

SEQ ID NO: 1853 - DNA, 561 bp, DROSOPHILA
atgggcgaggatgatgaagatgatggtgggcccgatggggcggcatcagtgacctgcagcggatcggcggccgtatggctgtcgccgttggcggggtcatgggtcagcagggttgtcgctgatggtggtcgccagcgagaacgcattctggccttgctgggcggcttgcgaccaaatccgaatccaatgcccacgggcgtcggattcatttttggttcgtcgggcgcttcgcttgctgctccgctcctttctccttttcctgtttggtttctgtgggaatcctcgattcggatttgggtcttgttcgtttcggtttttttttgttttttttggtgaccctctggtgacctcttctctgcccaccgcacttctgtcttttttagggttgcccgctcctctggctttgttgcgttttactttttggaatatttatttttttcttttgtgcaatttgaagactccggacttggaatcaagtggcattaccgcatcgaaagcgaaagaggaagaaagcggcgtggaaacgaggaagaaaatagaacattgagcagattacattaa

SEQ ID NO: 1854 - protein, 141 aa, DROSOPHILA
MVVASENAFWPCWAACDQIRIQCPRASDSFLVRRALRLLLRSFLLFLFGFCGNPRFGFGSCSFRFFFVFFGDPLVTSSLPTALLSFLGLPAPLALLRFTFWNIYFFLLCNLKTPDLESSGITASKAKEEESGVETRKKIEH

SEQ ID NO: 1855 - DNA, 3063 bp, DROSOPHILA
atgccttgagagagaattaagaaatgcaaacctttatatatagagatctacatacatatatgtatgcatgtacatttaaagctaaacaataatggcgttgaagcgagttttatattgagcaaaagcaaatgtgaaatgagataaatatacttattgtgtactctgtaagctgcagtagaaaccaaaatatatttttactaaacgcaacattgcgctattttcaaataccatttataagaaatgacaaaagcaaagcaattatttaatatgtaattatgtattatgtatacctatatctacctacccacaaccttaaatcaaaaaacccaaaacgattcaacaaaagctgatcaggtaaagcaactctcgccagtttccacactaaattctcagaatattcaaaattttaatctatacaaaaccaaaccgattgatagcaaataaatgcacttataagggcagaaaaacaccaaaatttaaaaatgaaatggaataaaatagaaataaaaagaccgacaaaacctaaagacgatttgtggaattatttctgaagttatagcgattcacatgacttgcaaatgggctggctcgtcgtcaggtaaacatatcaggtagattagggtggaccaacaaaggctgcattctcaatttctgcagacttcttcaagcgatttgaagtacttacttatggaagtaaacctcattgagaaaatggctctaatgtgaaaatgcgatcattcaagttatgaaaacattatgagatagaaacacctagttgctgccataaagaccagtctgaagggcaggtaaacgcagccgtgttcttccactcgtctgataatggcacaaacgagtatatatgtacatacaacacacgctgcatatattcattttcgggtttgccttattttgcatttttttttgttttttttgggatctgttgctttcggtgcagccacgaatcgcggatctctgtttcagttactcgagaagcggcgatatgagcggcagtcaacttcttcgcgccctgcgacgatccctgggattgggcaggcagcagctgaaggtcgatagccggcatgtggtgctcatcacgggctgcgattcgggattggggtaagctaagcgaagcgggagcaagtggagcctaataacgcaatgatctcgatagccactccatggcagtttactgccacgaatcgctgcacatgaccgtgatttcctgctgccacaacatcaagtcggaaggagctaaactgctgcagggcctagcctcggccaaggatggactgagcagaatgcacaccttggaactggatctattggaacccgattccattcgcctggtgcatcgccagctaagggacatactggccaaagaccccagctatcggctgacggcactgataaacaatgctggagtaatgtgcttcggggaattcgagtggcagctaacggagcagatcgaggcgcagatcaactgcaacctgctgggcaccatgaggctgacacatgaactgctgcccctgctccggcagcagcagggcaggatcatcaatgtgaccagccactgcggattgcaggctctgccggcactgggtccttatgccgcctccaaggcagcccttcgcttctggacggattcactccgcgtggagctgcagcagtatggcatggaggtggtcaacttcataccaggctccttcgtcctggacagcaacattgcggccagacagcagcagcatgctcagaagatgcgcgaagccttcagtgcggagcaacacgctctgtacgacacttacttcgaggccttcaatggttatctgaaagtactgagcggcttcaagccgcccaatcgcctgaggaacgagtcgctgctggcaaagtttaaggatgcattgaccagctcacaacccttggctctgtacatcgaggaaccccgtagatatcgcctctatcgctggctctttacgctctgccccactccgctagtggattggctcacggtgcgtttctgcgcgatgcccacctacgagtcaacgaacaggcaggagaagatttagattaatccgtagtctatacattttaaatatacattgtagcacattggaatacttggctaagggctgtggcaaataaaacgagctgaatccagggaatggaaaacgccaaaatgtgatcacagaacgcaactgggtggtggtgtctagaagacatagccgcgacagcgctcgaacaccgcatcgttgagcagctggaaccactcgctggcataggtggagtcctccgctgcccggaacagctgaagcttttcctgcgcgggcagcgcggagcagagataaaagctgatggcagtttccgtcaggtcggcatggtagttcttcagcgcccactcgagcaggcgcaggcagttgtgtgagtccaggtactggatgagtctttgctgcaataccgcctccatatcgggcatgatgtacacgcgggccatctcgtaggcctgcagcagggcggggtaatccggctcggttagatgccgctcctggcacacgattaaatgcagaaagtagcgcagtccactggcagtgtaatctggcagctgaatctcgccttggtgaccctcgcggaaatcactgttgagcatcttgttgaacacttcgctggtgtcgcagagcagctgcttattaaacccaatggaggtggaatccgctccatgaccaacgaggaatcgcatgtcgcagttggcgtgcagcggtgcggtatcatttgcaatttggttgcagattcctgctgtactctccgctggttcggcttctggcataacgatgcccagggtatatcgcgccatcgatgtcaccgcatccgccgcctcatctgcgtagtggtcctcggtcttcttgcgcagcatcatgtcgaatagcatattcagcgcattgccgtcgtacaggaactgatagagcaatcgatggcttttaactatgtaggccaccgaaatggcggctctctgttgggatatcacatcgtcgcagcgcaggagacgcactagctcctccttgccataattcg

SEQ ID NO: 1856 - DNA, 1008 bp, DROSOPHILA
atgagcggcagtcaacttcttcgcgccctgcgacgatccctgggattgggcaggcagcagctgaaggtcgatagccggcatgtggtgctcatcacgggctgcgattcgggattgggccactccatggcagtttactgccacgaatcgctgcacatgaccgtgatttcctgctgccacaacatcaagtcggaaggagctaaactgctgcagggcctagcctcggccaaggatggactgagcagaatgcacaccttggaactggatctattggaacccgattccattcgcctggtgcatcgccagctaagggacatactggccaaagaccccagctatcggctgacggcactgataaacaatgctggagtaatgtgcttcggggaattcgagtggcagctaacggagcagatcgaggcgcagatcaactgcaacctgctgggcaccatgaggctgacacatgaactgctgcccctgctccggcagcagcagggcaggatcatcaatgtgaccagccactgcggattgcaggctctgccggcactgggtccttatgccgcctccaaggcagcccttcgcttctggacggattcactccgcgtggagctgcagcagtatggcatggaggtggtcaacttcataccaggctccttcgtcctggacagcaacattgcggccagacagcagcagcatgctcagaagatgcgcgaagccttcagtgcggagcaacacgctctgtacgacacttacttcgaggccttcaatggttatctgaaagtactgagcggcttcaagccgcccaatcgcctgaggaacgagtcgctgctggcaaagtttaaggatgcattgaccagctcacaacccttggctctgtacatcgaggaaccccgtagatatcgcctctatcgctggctctttacgctctgccccactccgctagtggattggctcacggtgcgtttctgcgcgatgcccacctacgagtcaacgaacaggcaggagaagatttag

SEQ ID NO: 1857 - protein, 335 aa, DROSOPHILA
MSGSQLLRALRRSLGLGRQQLKVDSRHVVLITGCDSGLGHSMAVYCHESLHMTVISCCHNIKSEGAKLLQGLASAKDGLSRMHTLELDLLEPDSIRLVHRQLRDILAKDPSYRLTALINNAGVMCFGEFEWQLTEQIEAQINCNLLGTMRLTHELLPLLRQQQGRIINVTSHCGLQALPALGPYAASKAALRFWTDSLRVELQQYGMEVVNFIPGSFVLDSNIAARQQQHAQKMREAFSAEQHALYDTYFEAFNGYLKVLSGFKPPNRLRNESLLAKFKDALTSSQPLALYIEEPRRYRLYRWLFTLCPTPLVDWLTVRFCAMPTYESTNRQEKI

SEQ ID NO: 1858 - DNA, 4259 bp, DROSOPHILA
tgcggtaataagcgttcttaatttcgttgattggatactctgtattaaaaataaatatatttaaaaatattatttataactgcaaaaaagatttatatattttgaaagttttataggaatatgttatgtttattaattttacttatgtatgtaaatatatcgatatgaccttaatgtctatcacattgagaaaaaaaacataagaaatacgaggaatttttacaatagagcataacaaccttaatatgtaacccgcaaaagccgattgcaaacttatcaagtcatacggtaaaatctcaaaaaagaacggtagcgtttgtggctccaattgtttagttattggattgcaacggattttattttcggtcgatacggtgaaaccttataaataggatctccgaaagaagaagctataagtcggcttaaacgtatttttaaagaaattgtcgattcccatagattcacatatccattcagacggaggataaataagtcagaaaagagcgaattatgagatttctctaataaactagaaaagaagttaaggtgctatacaatgttaagttaaaatatttaattgctgatttttacacacgttactcgtagaataaaagggtatactagattgtgtaacaggcagaaggaagcatttccgactatttaaagtatatatattcttgatcaggattaaggattaggagccgagtcgatctagccaaactttataaattttttctaattttattccccaattagctattgatatcccagaaaaatgatgaaatttcgcgttcgcattcacactagctgagtaacgggtatctaatagtcggggaactcgactatggcattctctctttttatttatttaatttaataaatggaatatattaaattttttttaaaggtatttgcttacctttaaaagtagatttcaataactgtttaattcaactatcgataagccgataaagtcgccgataattcaatggaccgatgcctcgctctttttcttgttgggccagaaaacgtgcgctgcgcattttccagcgtttttttttataccgtcgcccaccatgagccagatgacccagaaaacggtgcaattccacgagctggagctggatcagcgcatccttaaggtgagtgcccggcttgcgaccgacagttccagattttaaagtgttgcgctcatctttcaggcggtggcccagctgggttggcagcagcccacacttatccagtcgacggcgataccgctgcttctggagggcaaggatgtggtggtgcgcgcccgcaccggatccggcaagactgccacctacgccctgccactgattcagaagatccttaactccaaactgaacgccagcgagcagtatgtgagcgctgtggtcctggcgcccaccaagaagctatgccggcagtcccgtaaggtgatcgagcagctggtcgagtcctgcggcaaggttgtacgcgtggcggacattgccgatagctccaacgacacggtgacccagcggcacgccttgtctgaaagtcccgacattgtggttgccacacccgccaatttgctggcctacgccgaggctggtagcgtggtggatctgaagcatgtggagaccttggtggtggacgaggcggatctggtgtttgcctatggctacgaaaaggacttcaagcggttgattaagcacctgcctcccatctaccaggctgtcctagtctccgctactctaaccgacgatgtggtgcgcatgaaaggcctgtgcctgaacaacccggttacgcttaaactcgaggagccggagttggtgccgcaagatcagttgtcgcaccagcgcattctggctgaggaaaacgataaaccggctatcttgtacgccttattgaagctgagactcatacgcggcaagagcataatctttgtgaacagcatcgatcggtgttacaagtgagtaaaccatacgaatcccgccttagatgcacaggagccaatgatgattaaaccacaaatgcagggagtgggcagctggcaacagttggcgcacgcatgaccagcaactaatcttctcgctgacggcattcccatccgcccctaaatacttactataattcgttctaattattacccatttaaatgtttcagggttcgattgttcctagagcagttcggcatccgtgcctgtgtcttgaactccgagctgcctgccaacattcgcatccacacaattagccagttcaacaagggcacctacgacataatcattgcctccgacgaacatcatatggaaaagccaggaggcaaatcagcgactaaccgaaaatctcctcgaagcggcgacatggagtcgagtgcttcccgcggcattgactttcagtgcgtgaacaacgtaatcaacttcgacttccccagggatgtcacgtcttatatccatcgggctggcaggacggctagaggaaataacaagggctccgtcttgtcctttgtcagcatgaaggagtccaaggtaaacgattcagttgagaagaaactgtgcgatagttttgcagcccaagagggcgaacagatcatcaagtgagtatagaataacatcttcaaaattgtaatattgctaagtgtgccatcacttcaggaactaccagtttaaaatggaagaagttgagtccttccgttatcgtgctcaggattgctggcgggccgcaactcgcgtagctgttcacgacactcgaattcgagagataaagatagagatcctcaactgcgagaaactaaaggcatttttcgaggagaacaaacgcgatctgcaagcgcttcggcacgacaagcctctgcgcgccatcaaggtacagagtcatctctctgacatgcccgagtacatagtgccaaaggccctgaagcgagtggttggaacgtcctcttcccctgtcggagcctcggaagccaaacagccacgacagtcggccgccaaggctgccttcgagcggcaggtcaatgatcctctgatggctagccaggtggacttcgggaaacggcgtcctgcccaccggagaaaaaagaaggcgttgtagggtagcaaatggtatctatagtcgcattagtcaataaggaaataaagttaatattgttaatgtaagccaaacataaaagcggccgttgaagatgtttggaattttaaaaatgttattttaccctaaattagaaatgagtaaaattaaacgaaaaatatacctatgttggagatagctgcagattgacaaacccaggttattttctttatatatatgaaaattctgttaatttagaattttgtaatagggctgtaaaaataaccaattgcacatgcacattaacaatgtagtttgttaactctatcgatgatatatatatatttatttgcatgcccgccaaatgtgtatgtttgtacttatccagccgataagcaagtaagtgaatgtctttttaaactcagaaacttgacaagtatatgcttaaaacggccgctgttcgggtggcggtaagtggtaaccacttacccaaatagaggcagaaggcactatatcatttgctcaacttttctgacagcggacggaaaatgaaaataaaaaatatctacgagtcagtcacattacccaaagtgccagtagttccgtaggtcacagcgacgattatgcagcagctggataccatttaaagtccattacaccgagagtcccaggaaaaatagatcaccattaggggcgaaatataagcgatgcatgcgtattcgtttttaacattttattattgtcattgaaatagttaacattcatacaattatttattcatttatttatagcgtttatgcaatacaataataatcatgagggtaataatgaaaaactagtcggttcgatctgcgcggcttagtatatggccaagtctgactgtctatatctgttgttgtctgagaaatcgaaacgcgaaatcagatatggatattgaaacgtattgaaaatagggggagagtttttgtagcgggctctaatccatcgactatcatagtaatgacttttataatatcgctccgttaagtgctaaattaaacgtaaacatttaagttaatttagcataatcgtaataaaactcgctaggtttaggtataggtatgcgcggttggctatcccaggctcctatgaacagtattatttgactattttagatcggatggccacgagatggaggaacaaatgctctgcacactccataactcgctgcc

SEQ ID NO: 1859 - DNA, 1946 bp, DROSOPHILA
ctcgctctttttcttgttgggccagaaaacgtgcgctgcgcattttccagcgtttttttttataccgtcgcccaccatgagccagatgacccagaaaacggtgcaattccacgagctggagctggatcagcgcatccttaaggcggtggcccagctgggttggcagcagcccacacttatccagtcgacggcgataccgctgcttctggagggcaaggatgtggtggtgcgcgcccgcaccggatccggcaagactgccacctacgccctgccactgattcagaagatccttaactccaaactgaacgccagcgagcagtatgtgagcgctgtggtcctggcgcccaccaagaagctatgccggcagtcccgtaaggtgatcgagcagctggtcgagtcctgcggcaaggttgtacgcgtggcggacattgccgatagctccaacgacacggtgacccagcggcacgccttgtctgaaagtcccgacattgtggttgccacacccgccaatttgctggcctacgccgaggctggtagcgtggtggatctgaagcatgtggagaccttggtggtggacgaggcggatctggtgtttgcctatggctacgaaaaggacttcaagcggttgattaagcacctgcctcccatctaccaggctgtcctagtctccgctactctaaccgacgatgtggtgcgcatgaaaggcctgtgcctgaacaacccggttacgcttaaactcgaggagccggagttggtgccgcaagatcagttgtcgcaccagcgcattctggctgaggaaaacgataaaccggctatcttgtacgccttattgaagctgagactcatacgcggcaagagcataatctttgtgaacagcatcgatcggtgttacaaggttcgattgttcctagagcagttcggcatccgtgcctgtgtcttgaactccgagctgcctgccaacattcgcatccacacaattagccagttcaacaagggcacctacgacataatcattgcctccgacgaacatcatatggaaaagccaggaggcaaatcagcgactaaccgaaaatctcctcgaagcggcgacatggagtcgagtgcttcccgcggcattgactttcagtgcgtgaacaacgtaatcaacttcgacttccccagggatgtcacgtcttatatccatcgggctggcaggacggctagaggaaataacaagggctccgtcttgtcctttgtcagcatgaaggagtccaaggtaaacgattcagttgagaagaaactgtgcgatagttttgcagcccaagagggcgaacagatcatcaagaactaccagtttaaaatggaagaagttgagtccttccgttatcgtgctcaggattgctggcgggccgcaactcgcgtagctgttcacgacactcgaattcgagagataaagatagagatcctcaactgcgagaaactaaaggcatttttcgaggagaacaaacgcgatctgcaagcgcttcggcacgacaagcctctgcgcgccatcaaggtacagagtcatctctctgacatgcccgagtacatagtgccaaaggccctgaagcgagtggttggaacgtcctcttcccctgtcggagcctcggaagccaaacagccacgacagtcggccgccaaggctgccttcgagcggcaggtcaatgatcctctgatggctagccaggtggacttcgggaaacggcgtcctgcccaccggagaaaaaagaaggcgttgtagggtagcaaatggtatctatagtcgcattagtcaataaggaaataaagttaatattgttaatgtaagccaaacataaaagcggccgttgaagatgtttggaattttaaaaatgttattttaccctaaattagaaatgagtaaaattaaacgaaaaatatacctatgttggagatagctgcagattgac

SEQ ID NO: 1860 - protein, 560 aa, DROSOPHILA
MSQMTQKTVQFHELELDQRILKAVAQLGWQQPTLIQSTAIPLLLEGKDVVVRARTGSGKTATYALPLIQKILNSKLNASEQYVSAVVLAPTKKLCRQSRKVIEQLVESCGKVVRVADIADSSNDTVTQRHALSESPDIVVATPANLLAYAEAGSVVDLKHVETLVVDEADLVFAYGYEKDFKRLIKHLPPIYQAVLVSATLTDDVVRMKGLCLNNPVTLKLEEPELVPQDQLSHQRILAEENDKPAILYALLKLRLIRGKSIIFVNSIDRCYKVRLFLEQFGIRACVLNSELPANIRIHTISQFNKGTYDIIIASDEHHMEKPGGKSATNRKSPRSGDMESSASRGIDFQCVNNVINFDFPRDVTSYIHRAGRTARGNNKGSVLSFVSMKESKVNDSVEKKLCDSFAAQEGEQIIKNYQFKMEEVESFRYRAQDCWRAATRVAVHDTRIREIKIEILNCEKLKAFFEENKRDLQALRHDKPLRAIKVQSHLSDMPEYIVPKALKRVVGTSSSPVGASEAKQPRQSAAKAAFERQVNDPLMASQVDFGKRRPAHRRKKKAL

SEQ ID NO: 1861 - DNA, 3222 bp, DROSOPHILA
gaatcgagggaccggaaaacttcgaatgaggacgactcgtcggaaatctccgaattggatgtgggcagtgataggtttaatcctctgcgagcgttatacgaacccaattttagggtgaccgatgctgttccaaaggtcatctaccagaatctggctgccttcgagagtgcacttaaaaaattcggcatctggcagctgaacaagcgccaaaagccgggatccgcagaaggaggagatcaggggacatcgaaaaaggcttccacttccgaggctgtagatattctacctcctgagcgacgttttgagccgcaccagatgcctaccactagtagcagaaagaagcatcatcgaaatattttcacctacatggaggcagctgtcggtccattggaactcctaacgaagtgtatatcccctgctagccacaatgaatccaacgaaaggagaagagttcgggtggtgattcgcaaacacggatcggtgggcggcagtgtcgagggtgaactgttggcctttgacaagcagtggaacctcctactgaggaatgttaccgaaacctggaagcgacgaaagtacaattacggagagcaaaacatatgcgacacacctgttgattgcacaggccgcctcaaggagttgggtatcactcttcccaggactgtagtcaaaaatctaaaccgaaaaaacgtggagattcggcgagagctcccacagattttaatacgcggcgagaatgtggttctagttagtttaataccaacaaaatagtgtatagcttattaaaagtcacctcagataaaaatcgcgtagggttctacttaaaaaactacagcagtctctattaaagtagctaagaatatatgtaaattattgatatatataattaagttacgctacaatgtatacaaattaagttatatgatatatttccatttaaggtttgaaatcgttttacttttaaagaaatttaaactactattttatatttttcgaaacgtacttaactaacgaatctgttcaattcctctggatcatcgtcctcatatgattccatttcttcgctttggaggtgaaccagtttatgaagcttcagcaactccagcgtcttgaatctccgccagcaaaagtcgcaggagacctgccgcgcactgttaccgtcgtgaattttccggatgtgactcttcaaggtgctattctctcgaaattgccggctgcagtgcggacaacatagtttcggttggtcgtgagttcgccgatgaacggccagggcggagctggtcttcgagctgtgcccgcacagctcgcagatatagttcctttgccccgcgtgcatggcctggtgctgttggaagtcccacttggaaggtgcattgtaatcgcatctgctgcattgccactccggccgcttaaagtggtaccgtgcctggtgttgttctagcttggaggcgagtggaaagctctggtggcacacatgacaaacattcggattgggtcccccatggacgcggaatttgtgcagccgtagcaggcgctcgttaagaaaccgtcggtcgcactcctcgcaaatggtcactgatatgtggttcgtgggcatgaatttcagcaaactgtggtagtactttggatagcgacagcggaagtcggagctgctcaactgcattacatactgtcgctcaaaccagacttgcaggaaacgggcactggcattgaccacctttgggtccaactggaagtgaaatcgatggaacagggcctctgccactttttgggaactatccatgcgatcttttttattgatcccgtgctcagttatccagaagaatttgtgtctccgcagttgctgtatgaagtactgaataactccggggctggtgcgctgcaggctgtagaaggctttgtggggttggttcgagatgtagtcctgtggaaatcaaagaatcgaagtcaagcaagtgtcattaataaccaaggctgcttacatggtggctattgcttgcgagctcatcatggccctgctctttctctggtgaaaagtttggttccacctcctcttccataaattctacatttttgaaagattcctgtacctccgccaacttggattcctgagcaatagacgccgccaagagattggtcatctccacctgaacctcgtcctggatctcatcctcatctgcattaaatccactttcgtttccatgcctttgaaccaggtgcttcatgaattccttccatttgtcaccgccaaaagtgtccacattacaaaggcagcatttgattaaaattgaggagtcacttctcatgtatacgcgtgcactttctacataatgcttcttatttgagtgttttggtatcatgtccttagaatctgcatgcaatttattccgaaaactacacattttatgaactaagtatcgttttcaggtacgatttgttttccgataagtattctcatttacaagcgcaagtgttggaaaattcgacttgggccatagacttatcgataggtagttgcacgtcttattcgaattcaaatggcagacgacactcggccaaaaagcaatttttgttttcgctttgttttgctcttcttttgtgtgtgaactcaaaggacgggctttgttgccttacgcacaaaaagtgcatattgttggcctgacaaagcggtaaaaacttgcgctttcattcattaaaactgggactgttgctgcttggagcgtcgctgctgctttcggaactgctgttggcgcagtcgcgatcccgagctcagtcgaaaacacgttacgcgcctgtgcagagcgtttttgctctatccaaacgtttccgatcccatccgatccaatccgatacgatacgatccgatccgatcccatacgatacaaagccagcggattcgaaagttttacaccgcgtgcagcagaagcagcaacaacagcagcagcaaaaaaagcaacagcaataacaattcgtatgtttcgtttgtgtgttgaagatttaattttttatgcaaagcaaacgacgacagacttttcggctggtcaacaatttctattttaattggcagtagcgcccagcaatttaccataagcgaatggaaagctgacaaaagtcaccgactccggtttattgtgcataatcaagccaatcaatgtgttttctttcgtccacattatttgccatttttgccatttgcgattagccactcgcagatcacgcagtggc

SEQ ID NO: 1862 - DNA, 1164 bp, DROSOPHILA
atgaagcacctggttcaaaggcatggaaacgaaagtggatttaatgcagatgaggatgagatccaggacgaggttcaggtggagatgaccaatctcttggcggcgtctattgctcaggaatccaagttggcggaggtacaggaatctttcaaaaatgtagaatttatggaagaggaggtggaaccaaacttttcaccagagaaagagcagggccatgatgagctcgcaagcaatagccaccatgactacatctcgaaccaaccccacaaagccttctacagcctgcagcgcaccagccccggagttattcagtacttcatacagcaactgcggagacacaaattcttctggataactgagcacgggatcaataaaaaagatcgcatggatagttcccaaaaagtggcagaggccctgttccatcgatttcacttccagttggacccaaaggtggtcaatgccagtgcccgtttcctgcaagtctggtttgagcgacagtatgtaatgcagttgagcagctccgacttccgctgtcgctatccaaagtactaccacagtttgctgaaattcatgcccacgaaccacatatcagtgaccatttgcgaggagtgcgaccgacggtttcttaacgagcgcctgctacggctgcacaaattccgcgtccatgggggacccaatccgaatgtttgtcatgtgtgccaccagagctttccactcgcctccaagctagaacaacaccaggcacggtaccactttaagcggccggagtggcaatgcagcagatgcgattacaatgcaccttccaagtgggacttccaacagcaccaggccatgcacgcggggcaaaggaactatatctgcgagctgtgcgggcacagctcgaagaccagctccgccctggccgttcatcggcgaactcacgaccaaccgaaactatgttgtccgcactgcagccggcaatttcgagagaatagcaccttgaagagtcacatccggaaaattcacgacggtaacagtgcgcggcaggtctcctgcgacttttgctggcggagattcaagacgctggagttgctgaagcttcataaactggttcacctccaaagcgaagaaatggaatcatatgaggacgatgatccagaggaattgaacagattcgttagttaa

SEQ ID NO: 1863 - protein, 387 aa, DROSOPHILA
MKHLVQRHGNESGFNADEDEIQDEVQVEMTNLLAASIAQESKLAEVQESFKNVEFMEEEVEPNFSPEKEQGHDELASNSHHDYISNQPHKAFYSLQRTSPGVIQYFIQQLRRHKFFWITEHGINKKDRMDSSQKVAEALFHRFHFQLDPKVVNASARFLQVWFERQYVMQLSSSDFRCRYPKYYHSLLKFMPTNHISVTICEECDRRFLNERLLRLHKFRVHGGPNPNVCHVCHQSFPLASKLEQHQARYHFKRPEWQCSRCDYNAPSKWDFQQHQAMHAGQRNYICELCGHSSKTSSALAVHRRTHDQPKLCCPHCSRQFRENSTLKSHIRKIHDGNSARQVSCDFCWRRFKTLELLKLHKLVHLQSEEMESYEDDDPEELNRFVS

SEQ ID NO: 1864 - DNA, 3248 bp, DROSOPHILA
attcaaatcgatgcgaggcgaagacaagaaactcggaatttattcaactttttttgccccaaaaaaaaaaggaactcgactttgttgccatccacatggcattgaatcgtatcttttgttcgcttagttccattttttttatttttttttttttttttggcaactttcattatcaatgtcaagcacaattctaattaaacaccctcgaaatgaaaagagaaggaaaaccagataaggtctgtgacagttgctctcttcattaatggatatgagaaggaatctaaaagagctcccgatcttcgatagtcgttcccatgaaagtggaggactggatgacgtgttgtcaaaatattttcatgatatgataagagtctttgagatgtgcctctaatcaaatcctatatatatttaataaaaaacttcagtttgcttgccttttagcgattaagattaagtaacaccacagtttaatgatacattttcgtattttatttgataaatgtacacgttttttgccagtgttatcatctctcgcattgctaattaatttctatgaaagtcaaatcgccaaaatgggcaattcgtgtgttcacttatagaatagaatccctcacgtgtccatctatatttatagctatacattttctaatgatgcgtccactggcttcctatcactggcatggttatttttcctataaattattttaagaccgctgccaagcagagcttatcaggtgaaaacaactgagaaggtaggcttggcatcgcctccaatctcaacgcatcacatcgcatcgcatgtttgttagcccgactgttgctacagggaaaatcttatcgcctttgacgaactggacgtgcgtcatccgcacgggcttccttttcgcaattccatctctctgtttagttcgtcctcttgtggctaagcctctccactcgtttgccagccgacaagtgctaccaaactggttggtaatttacaataattcacaatttgttagtctctgtacacgggctcgtctgtatttacaaggtttgcgatttggtaacaaatagttacaaggaaatgaggaggctggccagaggctggcgctgggttagggaatcttcttcagatgcgaatgcgactgtttgtgcttaaccttcgaggtcagcacatcgtagcccaggctgatgatgttgtcgtagaagatgcggtaatgggtggggatccagtagaagttgacgaactgcgccaccggccacacagtccactcggcggcgtacagcttccaggccttctccttgatctcctcccacacttcgtgcttggtcttttgctccagcagacccagcgtgacgaagaaggcactgatgtagatgggcgagcagattagctgatcgagcacgatcttcttggccaccacgcgcatagtgcgtccaggcatccgtttgtccagcatcttgtaccagtagtgacagatgacgcccaccgtcacaccactgatggccatgtgggcagtgcgcgtggattcgaagcgctcgatttcgccgcaatagatttccaggtgctgttctaggacgtcacccacacagctcagggtcagcgagatgcccacgttggtgaagaggaggaagcggctactgaatgcactcgcatgccattcccgcagcttctgaagcgctccaaagccgatggtgctggtggtggtgctgctgcctccaccgggcgcagctcctccggctcctccagtcgcgctgctgttccgtggccaactcattcgcaggctgcgctggccgcgaatggctctggacaggattaggccacgggccgggcagccacgcaaggattgcatgctgtccggcacggatttctaaatcttagaggtcggttgtgttgtgttcttctattcgctagccggttatgcgatatctatatgcccaccatttgcgggccttccattatgttagcggtataaaaaaatttgatgttctttcggggttctggagttagcttagaaagttatacacattgtttttcgaatttttttgcctgatttgacttttgaaaggttgttgcaacagcaacaacaacaacaatcacgtgtagggaacagctgttacgacgagggctagttggcttaagttatcgatagtttaacaatcgtagccaattgaattttaaaaaatttaaataataagcccttgatatgttaaagacaaaaaagatatcaaaacaacttaaatttgtaaaaaaaaagtgtaattttcaacaaagaattttaaaagagaccgataatgccttgcttgtctggttgaaaatattcgtttgatatataaacaataaaataaaacagaaacgtagcacaaatgaccaatacttaataaattcaaatattttgcaatactctattcgccagccctaagtccacttgtattcgatagccttgcatcgatagcgcagaatgcagtgacaaccctaggaagcattccacagtgttttgttgtttttttgtgcaagcgacgcattaaccgtgttctatatacaaatcgggcatatatatttatatatatctaccatatcggattgcaaagaccccaaagctcaaggaaaatcccctgacaccggacacctgaccaggattccccaagtggagtcatcttcaaacagctgtgaaaaaggtactgcgttgtcgttgttattcctgcgtttcgcaagtggagcccaaaatagcaaaaagcgcatcgcagatatatttatagataaggagtattacaaggccaggtagtaatcgaaactacccgtattataacccgcatttgataggaacaaaggaggagcacaacaaacacacgcatacacacgtacgtactcgggagagcgagcgagacggggtgcgaccagaagagcgagtgaggtagaggagggagcacaatgggacgcattttcttggaacatcttgggggtctgaaactcttcaattgcgcccaatgccacacgaacctgaccaaccgcagtcaattgatcagtacccgattcacaggcgcaacaggtgagtccaacaagtgctacagacacattatgattatgcaataataatccaatcgaatgcccacaggacgcgcctatctgtttaagcgtgtggtcaacctgaccttcagcaacatccaggaacgggtcatgctcacgggtcgccacatggtgcgcgacgttatgtgcaagaattgtggagccaaacttggctggatgtacgagttcgccaccgaag

SEQ ID NO: 1865 - DNA, 1248 bp, DROSOPHILA
aaattacactttttttttacaaatttaagttgttttgatatcttttttgtctttaacatatcaagggcttattatttaaattttttaaaattcaattggctacgattgttaaactatcgataacttaagccaactagccctcgtcgtaacagctgttccctacacgtgattgttgttgttgttgctgttgcaacaacctttcaaaagtcaaatcaggcaaaaaaattcgaaaaacaatgtgtataactttctaagctaactccagaaccccgaaagaacatcaaatttttttataccgctaacataatggaaggcccgcaaatggtgggcatatagatatcgcataaccggctagcgaatagaagaacacaacacaaccgacctctaagatttagaaatccgtgccggacagcatgcaatccttgcgtggctgcccggcccgtggcctaatcctgtccagagccattcgcggccagcgcagcctgcgaatgagttggccacggaacagcagcgcgactggaggagccggaggagctgcgcccggtggaggcagcagcaccaccaccagcaccatcggctttggagcgcttcagaagctgcgggaatggcatgcgagtgcattcagtagccgcttcctcctcttcaccaacgtgggcatctcgctgaccctgagctgtgtgggtgacgtcctagaacagcacctggaaatctattgcggcgaaatcgagcgcttcgaatccacgcgcactgcccacatggccatcagtggtgtgacggtgggcgtcatctgtcactactggtacaagatgctggacaaacggatgcctggacgcactatgcgcgtggtggccaagaagatcgtgctcgatcagctaatctgctcgcccatctacatcagtgccttcttcgtcacgctgggtctgctggagcaaaagaccaagcacgaagtgtgggaggagatcaaggagaaggcctggaagctgtacgccgccgagtggactgtgtggccggtggcgcagttcgtcaacttctactggatccccacccattaccgcatcttctacgacaacatcatcagcctgggctacgatgtgctgacctcgaaggttaagcacaaacagtcgcattcgcatctgaagaagattccctaacccagcgccagcctctggccagcctcctcatttccttgtaactatttgttaccaaatcgcaaaccttgtaaatacagacgagcccgtgtacagagac

SEQ ID NO: 1866 - protein, 245 aa, DROSOPHILA
MQSLRGCPARGLILSRAIRGQRSLRMSWPRNSSATGGAGGAAPGGGSSTTTSTIGFGALQKLREWHASAFSSRFLLFTNVGISLTLSCVGDVLEQHLEIYCGEIERFESTRTAHMAISGVTVGVICHYWYKMLDKRMPGRTMRVVAKKIVLDQLICSPIYISAFFVTLGLLEQKTKHEVWEEIKEKAWKLYAAEWTVWPVAQFVNFYWIPTHYRIFYDNIISLGYDVLTSKVKHKQSHSHLKKIP

SEQ ID NO: 1867 - DNA, 9466 bp, DROSOPHILA
aaggctaccgcgataccgagtcgtacacccgcccattgataaagacttctattggtggtcggcgattagcagaatgacacaactgattggccaatcgaagggtgcaaagttaaaggaggttgccaatcgtaattctgtgcgatttaataggaaagagcatcgtatcttatcgtcgagcccctcgtgtgataatctgatccaaaaggggtataatacaagaaagtctgtagtcaactggctttatatttgattcgcaactctacacgtgttcgtgcgatttaaatttattaatagatcatattcatctttatatttcatttatcgacttgcaaatgcacttagtaggtatggatatgaaggattagggatacaatgtgctttgactggatgaacatgtggttcttaaaatcttaaaaccaaagggtcaatgggttccaatggggaattttgagatttagcagaaaggcactttaaacctagtgacttatttatgatgtaacacaactatattgcgggactttaatcacttatcaatagaatcgaaaatgcttgatttggttcgttcttggcttgctggttttcgagggaattgtgcagaagttagggattgtaatgcttcgataaggcattgattaattttgtttagcatctaaatatattacttaaattcgtataaattgttttccgggcttgccttcctcttgaggctttgacaatttttgttgcaaaaatgtgcgacttcaaccccatctaaatcacaggcttctagagtacaggagatttaaaaataaaatcaaattttgaccgaaaatgggcactgcttacaacgaaacttaaaatataatttaaataaggttacgcggttggcaaaccgatgaactaaaaactaattaagtcaactggccctaaagttacaaatataaaacaagacattattttaagaccagcatgagttcgggggagagaaagtggggaatcgatgggcgcgtgattgtggcatctattcctgcttgtgggctggaatcctgtggtgcttggtgtggcgatgatgatggtgatggtgctggtgcagctggtgatgcgggtgatggtggccggtccgatgtcggtggtggttcgaaatcggctccatttgctgttcactgttgctcgccgaggacatcagctcctccgcctcgatctcggcctcgagttgtgcggactcggactccgattccggttgctggtggttgtggtggtgccgccggtggtggaccaggggggcatgcacacgctgctggctctcgtactcgccgctctcgtccagctggttgtcgatcgtgggtgagttggatgtggtggattcgataaacgctctgctcttgggggtgttgtagctgttcttcatggagttgctaccgttgaagaagatgtctagccttggttttctgtaaaaaatatggtatagttaacaaataatttgcttggcgagatttcattttaactatagttataattaatatatttcaaattttttaaatatacactcctaattcttaatactgctggctagattagatttcgatcacctttcaaaacgatttttaaataaaaaggaaatgaattgaattttaataccttaaatttttcgtttttaaaaagtataacagaagttcgaatattggcgggaaattttatttcaaacggtggttcttgttcaagtacggtcacacacttattagtgttacgcagcgatcgtttgtacaaagcagttggcaagcagtacaacgatcgatacgcgagcaagcagtgtatggcgcaaaactttgaaatggaaacccaaatttaaatgaattcgaatacaacacttaccttggcaatgtccaactcgccagatgagacttaaacggttctgttcggtaaacgctccatgggacagcaatgtctgaaataaacgtgattccaaagggaccattaaaatcggagtacaatatgccgtaggtcatgcaatgcaaattgaaaaatgcgcacatgaagggcatgcaataagcatcaaaaacaaaccaacggcaagaagtaagcggagcaaaaaacacaacaactgaacgacaaagaaagccgagcgcagcgcacaacggtgcgaatgagcaattttgattagtagcaccttgagctgaatctgcttctgcgatgttgtatcttaccgatccagggcaataactttcaagacatgagtcaatccaaaacagatattcgggctttcgttacttccgctccacttggagccaacccaacccaatccaatggatttcaaatatacggacggaagcatttcgaatggaaaacgtgcggggtatgaattgtaaattgacacttagattctgctgacggcagaatcagacgactaggtatttttgtgttacgtctaccgatattcgcagtctggaattacattgaaagtacgtttttttgccagctcaatttacgtctggctgctggccggcccccgaagttgcctgactaatgaccttttcgcgaatgtaaataaattctgattgccgtgtgctaaaggtgtcaaaaggggcctgtcgccaccgattcggttgggataagagatttgtatgtatgtggagagtgagagatgatggataaagtgactgatggggaggacgagatacctccactccgttcccgggcggttagttgaacatggcaaacaacacgcttacctgcctggtcgcaagtgggtggcgcgaagtagagccccggcctcagcagattctcctcatcgtcgtgcacctcgatcatcaggatgcccaccacgctggcggtcagctggggctgcagcggctgctgctggcgaagctgctggcggtgctgctgctcccagtaggcgagggcgcacttcacgtcgatctccacccagccggtggaggagctgctcagcatggcggtgttgcaggtgcgcttcttgcgctctgaggatggcaaacagattgggttttctcagtcggcagttctaggccatttaaaaatggatcgaaaacaattttatgttgggtcagcaaaatgttcgggagtgcaagtttaagccgcatttaaaatttacataactcgttatgtacaacatttacattttgctgagatggccttatggcgaagtcaagacaattaatgaggttttaaaaattaataataggcattttaatatttgaaagctcaagctgtgttataaaaaaatcatttttttttgcaataactattgttattattttgttaataataaaatttgcatagttggattattgagtgatcaaaaattgcattttctaagtttgactttctggattcctcctacctaacttacgtttcttcctctgctggtggacaatggagacggtgacacggatttgaggacccacgggtggctgctccgcgcaatttggagccgtattgcccgggttctcagtgctgatgggctgagtcgaagcctggccgggattgtgctcgcgagtctggccaggattggtcttgtagaggcggagaagggcgctgctcagacggtcgtcgttattggatatgaaaacactgctggcaaactggagcgtcacattgttgcccagggaccagtcctccgggttggttgtctccgcattgcaaatgggaaagccggccttctccttggatgcgctgccgttgggctcgtttgagatggccttctggacgcgcttaaagatatcgttgagtctgcaaaaaattgagaaataaaattaaatttatataaacgttttaaagagtactctttcactaacagttcgaaaagttctgatgataatttctttatacagaattccaccccatcttgggtgcgggatatcaagagctggcatcttttgatggttcatctagcagctatttgtatgcctaagctgcgccgcccagagaatttagttcaagtgtttatgtaagactcacttaattgacattagagcgttacattcggacattcgcaattcaacaaagaagacaggagatgggatgcgaggaaaacgtgctcgtttccatttgctgggaatttataacattgattcaatttagtccgacgacagcgaccaaactagttcccgttgaggaactggtaaatctgtcgccgaattggtagtgtccaagttttgggaagcacccataatgagtaaactattttcaataaaacgcttgcgtcgctaaaaaaaaagctaaagttcagtggactgtttgggccataaaactatttcccgataccgagtgtggtgtatttttagcctttatcaagcgataatcagcatttaaagttcctcgatagcccaactactacattggactactgacgcccgatattcgagattgctattgagattgttattcaaaaacacaaatacctcattgcgatagatattcgagtgggtggcccaacatcgctgcgtaaatataacatactcatgctagtgtgctgggcaatttaaaaataatgttgaccactaatctggtcagttagccgaggaacggcgatagccgcttatcccaagagcaatcatccgacttggcggatagtcaaactacttttttactaaatgcgaccggcccaagtcatctgcgctgattaaatgccttcacatgattcgctcgtcgggatatttcctaaacttgattatgagctaagtgcgcgtagtggagctaacgacagacccgtgtcacttaagaacccattgagatcgagacgaaaatcagccagtgcacggggaaaaaggctgcctataagaactgacttttgatctaccttatgaattcagaaagtgcttagcatttcagtaaagagcatttaagtaaacttttttatctcatcaatattgtgtgtaaactacgcatatatatatattaaacaaaccaatttgcaatttcatttggtgtatctaaaatatgtatgtaaaaggtgaagatacaacgtattaatcccttaagatacgacaaactcttgtacaaatttctccaagtgcacaatcttcggaagagtggcagacaacaatagttagttagctatgatctaatctggccgcactcactcgcctggaaattggacaattgtatgcgtctggatcggcaattgagacgcgcctgtcgcttcgtcttgttccttttcccacacacgaaatgcacaaagagatcaaaaagtgaagaaaaaaactgattaattgttttggcttttggtctggcccgcggcgcagtttgtctagccaaaaaataattatgaaacccagttttcgggctcttggcatttcggccgtttggtccgttccgaaagtgaaccaagcccctgactgattatccgttcttgtttatgtttatgtttacgctgtgatcgcatcgatcgaaccgaaaccgcaccgaatccgtctggctagctggctagcatgctaggggactagagggctagcgggctagcgggctagcgggctagcgggctagctgggctggccaaggaattccagcatgcggagtcgtctggagttggctgtgtggcatgaacttgaaaactcgttgagtcgtgccgtttgtctggccaccgtctagacagattgtcggtccgtcagacaggcggtctttccgtccgctcgttgtttgctcgctgcctctatgtctgcctgcctccctgtctccctgtccctgtccctgtccctgtccctgtctgtctgtctgccggcctagatgctgcaccgaaaaaaaatacacggaatcggggtcaatctgaaactgattcatgtcgaacagcaggggtctttgcaatatggataattttggaacagacctaaaggagtaaatcaataaatgtgggggtacagggggtagcactttagttactattaaatttataaaaatattacattcatcagtgtatagttattgttcaagctgaagatgcatttgagacacattactcaatggaccgacccatcataggaggttggcttagagtcttactgcttaatgaagccaacagcgactgccacttttctcccagtgtactgtcgatgctaacgtgacaatctgtccgcttagacactatttgagttcatgcgtgagtcacgcatgcgcagaggcagggtgccattttggggggtagttgcctttggagtcagggggaaatttgcattggcctccattcgcttggggcagacatctctgaatgcatcgcctcagtgtctgcgtctgcggttttgcactccgttgcctcaggccccagcagcagcaacagtggcagcaacaccagtagcaattgctactgctgcagcaacagtagcaacaacggctagacagtgtctcgccggctgcacttcattatcatgcaaccaacggcgaaactgcagccagtcgaaatgcacacgcctactgccgttcgccctgcaacaaggcaccattgcaccattgcgccagttgctgggggcgcagacatgtctgctgtcccgatgacattactcatacgtcataggttttttgcctcttttcttttttttttcgccgtctgtacgtctgtacgggtacggaactctgccaaagcaatcaaacgagatgaaacaatttagatatcagctgttggcccccacgagtccccgacttgcatagcaacgacctacaaaaagttcattaccggatagccgcagccggagacacagacacagacggagccgcagtcgcattcgcattcgcggacggagtcgcattcggagcccggatagctagacatggcccagactgctcccagacatcagccagacagccatagaaagaaacagaggtcgccgacggaattcgatgcattctgcagttgtgtgttgcagtgtgcctgtgtcagtgtgtccgcattgtgcagcggcgtcgcgactgttgcactacagtatctgatggatacaacagatagcattgatggatctgggctggcgaccccccgcccctctgatctacttagatattgtgtggtcagttggttggaagttggttaaagggttattcagatccacacgtttgtttgtgtggcagatacaaaagcataagcatcgcctgataaattataatataactaatgttttattaatgatgcatcttggctggcaggcctgtgtaatttctctatttgatctattttaatctatttggtctgatagtttggtctgatagttaagggactttgaagtaatgtgcataattttctcactatatttgagcaatatctctatatcaagatcgatttgctctgattatgtcatttatgtttcaactagaacaccactagatttgaacgtttataatttaaaataaaacatgcatatctacaacagcttaatcattggttaagctgttaagcccgttaatcacaacctaatatttaaagattctaatcactctagttttcgcataatcaaaacaaaagacgcaatttgtgggcacgcttctcgtatgtagctaaattattttattgatcctaagtttcggtctgctaagcgaggccattacatttatgacttttggtaggaacttcatgcacttggcggagcattcaatcaataaataaataataatcaagtgcacatgtgggaaatctcacgggaaagtattaattttcacaacttatttttattaattcgccgaatcggtttgcatggggaaaatcgtgttgaagataaaccaaatggagcagagcgtgtacaatgtacttttgagaatacagtatactcgatttcatacggcgctatagatttttttggccgagatgcacaaatgtttttagccttgaatgaaagtggcccgtgtttggacaaatctctcacttaatgaacggatggagaattttaaaacaaaaatttgtgaaatttggcagcaggaatgatgtttaaacacaatgtatgtatgttcgaagctgattgagctgatttaattgcacagtgcactgttttcattttttgtttacataaaggcagctttttaaaatgtttgttttttttttagccagtcttttgttcaagtggagcgtgtatttttagagagacttctatttgtggaggatagattctattctcgccatgatgcgacattgattgacagcgcgtgtttttgtttttttttttttttttttggccatttcgaggtgcttggcacttaccgctgagtggcgacctgctgcagatactgctggttggaggactgggcggagtcgtcgcgcatgttcggattgctgcggttctggatgctcaggatctgttcctcggtcaggttgaagcgattcaggatggtgcggttgaacggattaaccacctccgactgcacgccctctatgaagaaggagggatcgaagggagtggccctcgagtcgccggccatggtgatcagcgacaggatcaggacgagctctcgaatgcggctcctttcgcacttttcaccacgcatagcacttgccatttttgtgttctgctcttggtctgttgccaaactaaatgttttcacacggaaatagttgtagttttcttcttcacttaaattcaacgtttgttcactgcatttttgccagcaattaaaatgctatcttttacacttcagctggatacggacatgcgaatttgttaatttttgtagctgttgtgttcagcttctcgatgtgttcgctctaagaaccaagtatgaagtgatttgcccgagtcggttttttagtcttaaataagaaaaatttggttgtgccgggcatatctactttgttatggtcgtaaacgctgcgttgcggccggcactgtgagaaaatgcgaccgccttaaaaagaacaacttacttttagctgattgcaaactattaatatcttaataaaattacattaaataatacatgtaatatcttaacataacatttatctatataataaaaggcttacttaaataaattggcacaaaataaatattttactactggattaatattatataataatattgagattgaaaggtactattcaaggtgacctgagcttgaaagcgtacattaaatcttagcttagttctttatactagtttttttacattatatattattatcgcatttgttcgccactcaaaaccccccaactaagtttgcagtgtagcgcttggggccttcggctggcggttcggctggcgctcggatacacggtggccgaccaatcaacgccgcttgaggatctgccggcgctgctgacgtcgacgtggtgctctacagtggccgtgcgtgcgatacgtacgaaacgcggctgtatgggtgtatctgtatctttggcctgtgcctgcgcgcctgagatggggcttatctttagggccgaaagcgatactccggccctaacctaggtttgtttggcgacttcctttcaagtggctgctatcaaacagggccatcaaccgaaaactgctaggcatatcaatctatctatctattactc

SEQ ID NO: 1868 - DNA, 1425 bp, DROSOPHILA
atggcaagtgctatgcgtggtgaaaagtgcgaaaggagccgcattcgagagctcgtcctgatcctgtcgctgatcaccatggccggcgactcgagggccactcccttcgatccctccttcttcatagagggcgtgcagtcggaggtggttaatccgttcaaccgcaccatcctgaatcgcttcaacctgaccgaggaacagatcctgagcatccagaaccgcagcaatccgaacatgcgcgacgactccgcccagtcctccaaccagcagtatctgcagcaggtcgccactcagcgactcaacgatatctttaagcgcgtccagaaggccatctcaaacgagcccaacggcagcgcatccaaggagaaggccggctttcccatttgcaatgcggagacaaccaacccggaggactggtccctgggcaacaatgtgacgctccagtttgccagcagtgttttcatatccaataacgacgaccgtctgagcagcgcccttctccgcctctacaagaccaatcctggccagactcgcgagcacaatcccggccaggcttcgactcagcccatcagcactgagaacccgggcaatacggctccaaattgcgcggagcagccacccgtgggtcctcaaatccgtgtcaccgtctccattgtccaccagcagaggaagaaacagcgcaagaagcgcacctgcaacaccgccatgctgagcagctcctccaccggctgggtggagatcgacgtgaagtgcgccctcgcctactgggagcagcagcaccgccagcagcttcgccagcagcagccgctgcagccccagctgaccgccagcgtggtgggcatcctgatgatcgaggtgcacgacgatgaggagaatctgctgaggccggggctctacttcgcgccacccacttgcgaccaggcagacattgctgtcccatggagcgtttaccgaacagaaccgtttaagtctcatctggcgagttggacattgccaagaaaaccaaggctagacatcttcttcaacggtagcaactccatgaagaacagctacaacacccccaagagcagagcgtttatcgaatccaccacatccaactcacccacgatcgacaaccagctggacgagagcggcgagtacgagagccagcagcgtgtgcatgcccccctggtccaccaccggcggcaccaccacaaccaccagcaaccggaatcggagtccgagtccgcacaactcgaggccgagatcgaggcggaggagctgatgtcctcggcgagcaacagtgaacagcaaatggagccgatttcgaaccaccaccgacatcggaccggccaccatcacccgcatcaccagctgcaccagcaccatcaccatcatcatcgccacaccaagcaccacaggattccagcccacaagcaggaatag

SEQ ID NO: 1869 - protein, 474 aa, DROSOPHILA
MASAMRGEKCERSRIRELVLILSLITMAGDSRATPFDPSFFIEGVQSEVVNPFNRTILNRFNLTEEQILSIQNRSNPNMRDDSAQSSNQQYLQQVATQRLNDIFKRVQKAISNEPNGSASKEKAGFPICNAETTNPEDWSLGNNVTLQFASSVFISNNDDRLSSALLRLYKTNPGQTREHNPGQASTQPISTENPGNTAPNCAEQPPVGPQIRVTVSIVHQQRKKQRKKRTCNTAMLSSSSTGWVEIDVKCALAYWEQQHRQQLRQQQPLQPQLTASVVGILMIEVHDDEENLLRPGLYFAPPTCDQADIAVPWSVYRTEPFKSHLASWTLPRKPRLDIFFNGSNSMKNSYNTPKSRAFIESTTSNSPTIDNQLDESGEYESQQRVHAPLVHHRRHHHNHQQPESESESAQLEAEIEAEELMSSASNSEQQMEPISNHHRHRTGHHHPHHQLHQHHHHHHRHTKHHRIPAHKQE

SEQ ID NO: 1870 - DNA, 6994 bp, DROSOPHILA
tcaaacgttccaccaactcgggctatgataatggaaaaatgattgtttaacatttaactcagtttgtgcataaggcgcaacacttacatattttcgagcgaagtacatcatggacctgccgcccatgctgtgacccatgcaggcggcattcggatgactgcgctgctccataaacaaacgcaaatcctcgctcatcgctttggaattgtggacactcgaatgtggactctcgccatgattcctcacatcgatggcgtacacctgtaggttaaaataaatacacattggcttgagcattgatactttggctaaacgcataaattggtaagctcacctttcgggaaacttttcgcaccagagccttgctaattcctcgccaattttgcttggaaccaaagagtccatgatatgtgagcagtggtggactcgtctctggattctcgccggtgtacgaatcgaagcttagttcaacgggatccggtatttccgaggagtactcccttctgaccaccaattgggttcgcaggatctttcccgcgggaaatggaagtgaacgtaacgatttcgtcaggcgctgcatttggtggccccagtgtgtacacacgccaccggcgggaaaactaattgggcagtggtatgttgccgccgaggggggttcgttgctttgctaaagttgcgtaattattgttaatttgcagcaatttcgataaatttcaacattttgccaattgtgtacggagtccagctgaccggtgttttatttttcgacaacatgtagtttggcaattgtcaagggcgtagatgaaaaaactaattatacaaattttaagtcatgaatataaatatacaatattttttgtagtcgttgaaaatggtttggttataaatagattagaaacacgtttttcttataaatttatctttgacaattaaccgttatcatactctgtaattttttgcatacacctaagccattttatcataaataagcacataaaatatgtgcaagtatttaccaaatattaatggggctcttaaccccttacgaccccttccaaacgatggctctgttgacaaagtggcaacactggcgcgcaaatatctcgatgctagccatggcatgaaccattttggatatttacttagtcatgtctgtgcgtcagccacataagctaagataacatcaccgactaggcacgcacgcttttcgccgtatttccgggcacgccatgcacagtcacactggcagctgccatattctttaggcaaacgttttctgtcggaaacagttttttcattaacacaaaaaaaggcatccagagcatttgctgtagcacaaaaacatcgaatttccaacgctaccaggtaaaccagtcgccgccgagccgccggaaaaacgggctttccagttcgtctttagcggtaaaaagattgaaggaggaaagcgcggcgctgacgtcggcagcggtagaggcagcgcagcggcgctcttgctcgcattcacactactcaaacataggtaagcagcaacaagaaatcaagcatattgtcaaaatcagagcaacaaattgatatattttcaagtattctatttttcccctccaaaaaaaaaaaaaaaaaaaaaaaaatgaaatgaaaactgaactagagaatgtaaaaaagttaagttgcaaaagtaacacaaaaaaccagttaaacgttcaagtaaaagtcagtaagtgaataaaagtggttaaagttgttaagaaaattcaatttcggtcgcgaaaagtgcgaaaaagtccgcaaaaatgcaaatacttaactctcctctgtgtgtgcgcctgtgtgtgtgtgcgtgtccttaactgtgtgtgtgagagggaaagagagcgccagaatagaaagaatttttcaaattgcactgcgcttacaatctcgctctccctcgctctttgttgtccctcgttcgcgtcaagaaaattaatcaaaaataaagtataaagagaaataaaaaaagaaaaaaagatactggcacacacacaatataatcaattaattaaaaaacataaaagcttataaaagaaatgaaggtaagaaccccactaaaagttaaaagcaaaaaaaaaaaaacttattctgtcattcccacaaatataaaaaaaatcctatatcaaaatcgattgttatcgcgttatcggagctatcggcatttgtttgggggcttttgaccttgactttcgtttctatcccctttctattaaggccatcccctatctgctcctcctcctattcacaattattagttatcgacccagtgcgatgctcgcctcgattattgcgattacataatattagttctatcgattttcttatcgattcttttgtaattgacaattagaatacccacgtggttacaatcaacatgaatcgaaactggacagacaaatgtctttattccttgccgacttagtatacttgctgtttcgattcaaaacttgtccactcaattaaccggtaatcgtcgccagaagcccccaataaaatatcgacttgcttcgctagttttgccccggtgacattcccctcccaccaggacgtggtggcttttaatcgtctgagccttgtccaaagcgttgagtatatttagccatgccagaaaaactaattctcgatctgttcgaatctcctgcagaaacgccaaggaactagttggtcgcaccggcgtaaggcgaacccatggtccttgacatggaatcggacgattctcatgccagttcggcgtccaattcctcggagtcacggtcgaattcgcccaccaacgacaaggatgaagttgtcgcggatcatggtggcgaatcgcctggcggaggtggcgaccccatactggatcggtccgatcgagccccctccaccagtagctcatcgtccaactccagttccagttcgaatcgcagtgacctgtccaagaagcagaagaagagctcgagcagcagcagcggaagtggcagtggcagtggcagtagctcttccagcggctcctctagcgaggatgagggcgatcaggaaccggaacaggaggtgcagcgtctttccgagcagcaacgggagcagcagcagcattcgccgataaatgagcgagagtccgagtctgctgctggaacgcctgttaatgcggatcaacctggttcgccaaacgctaagtcacagcctagctcgttcctctcatccgttcgcagtcgaagcgtcagtccccagctgtacaatcaggctgccgtggatctgaatatcagtcacgacgaccttagcgatgtcagcgacatcgagggtgaggagaagcgaacctcatccaaaaattcaatgcgtccggcggatgagaacgaggatggcgccatttccaatgattcactgcccactctcggcgaagaggatgaggttgagcaaaagcagtccacgcctaacggcaaagcgtcaagcggggatgagaaggagcctttcgcaaaagaaacccatgtgagctctagtttcgaattgtagtttctaatctaaatagcttgaatcattaataactcaaatgtatttcagaccgacgacgcgtccaatggacttgcaccagcgaccgctttgcaggaggacttggtcaaaactcatgacgacgacgccttggacttcgaggcggaagagggcgagtgtccggagcaggcaaaggagccttcaccgatggagagcacagccaacgaaacaaaccagaccaagagtacgaccaaggtgtcgcaagacgagggcgatgacgacggcgaggtggataaagacggcgatgataaagacggcgatgacaaagacacacgcaaggatggcgctggcaatggctgcttggaggatggcgcaggcaatgacagccggaaggacgacgcaggcaatggctgcctggaggaaggcgaggaggaaaaagatatagtgtcggtgtcgacttcatccagccaggaaaaagtggaagagggggagctggaggagggcgaggtgtccgatgaggatgaaaagcgaccggaggagactgaaccgaagccggtgtgtcgattctacactcggggtcagtgcacctgggggatgagctgccgcttcctgcatcctggcgtcacagacaagggcaactacacaatgttcgacaacgttatacggccggtcccgatgcagggaggttcaactggagccagcgccccagcagccccatcatcgaccgctgcccctcgtgccggagggagtgcctatagttcccacgcctcggcgactgctgactatcatgattatcgaactgagcggccattgcatcaccgaccgccgctccttcatgcgcccagtatttatggtgcacccgtccacgacgcccgcactcttttgcctgacggagctccggtggtggtggagaatgcctgggagcgcggcctgcgcaccgctaaggagatgatgcgaaaagccaacaaacgcaaggagcaggacatggactttgaggacaagaagatgaacctaacactgtcgcccgatgaaatggagaaggattcgtactacctcaaggatcggggcggtagcagcgcccgatcaccgccgcctccttcggccaatgtgcgcgaacagccactcaatccactcagtatgcctctgtccatgcatccgcatgccgttgcccatgcaaatcctcgtgctcttctgcccttgcagtactccgtttacggaccgccacccgatcgctacggccgacctcagtatatgccaccgcagtacgatgatgtggatgcgtacggccgtatgactagatatcgcgaattgccgccccaccggatgccgcactatgaggacgatcgccgttcgagaccaacgcgcgaggtcatcgtacagcgtgtggaggccgctggacgtggtgatgagtggagtgatccctggatgcgatccaagtccgttggccggggatcatatgaacgcgaggatcgccgccgtcgagataggcgcagctacagcagcaactcgtcgtattccacctcgaacagttcgcagagtgactccagctcggactcgtcgcgctcaagcagtccgtccgatcataagcggcgctacggttcgcacaaactagcaaccgcgaccgctacttcacgccgccatggcggtcgtgcggcccgttcgcccagccagataccgcgacgcccccggcgcacttccagtgagtattagttgaagtctcttaattgctaggagtaccttcatttgtcaattttctcattttagagggaagcctttcgccttcatataagagaccagctgtggacaagcgtggcgttggacacagtccgtcttccaagcgtaagaagctgtcgtcgccagcacccaagaagtttgacaagttgcgacgccgtcgcagctcgagttcttcagactcaggtaagggggattatcgtacttaaccaataatctaattctaatatggatatgaatcatttctagactcatcggatacgtcgtactccgattcggaatcgggatcgtcgtcgtcggacagctcgtcgggatcaagagaaacgccccagaagcgtgtgagggccaccgacaaggcgctcaacgagcggaagcttattagcaagcgtaaggatggctttcaatttattttgttcttaatattatcaagtaataatatgcattgttttcatcttcacagcagctgaacaatcaaccaagaagcgctcgcctatttccattgagattaagaaaacatcaaacatggttggtgtttcggcgttggcctcagccagcaactcagccgactccgatgcggagaaggatcacgataacggtaaggacaaggaaaaggatcacgttaaggagaaagacaaggattgcaaagagaaggacaaggataaggacggcatgaaggacaaagaaggcaaaaagtcacgccgtgaggagctgctgaagcaattgcgcgccgtcgaggatgcgatcgccaagaagcgttccaagctaaactgatcaagctatctgctcacttacacttacacttacacttacacaccaccccccaatcagaccacttgctcccttccactccctggcaaatagcacctccctaaatcatccatacacaaaactaaacatatccgatggatatcggaacggcatcaaaaaatacttagaggttacacaacattcgcatcgtattcgatattgccttcgcctgggtgcagccgctcgatcgccatacaattcaatgcatttagatttaataatcattatccattttcctaccctgactattgccaactgaagagcatcaatactatgtttataatagaatataaataaatgccaacactaaaaacatgtgccatacttttgtctattcaactacgaatcatagattaagaatactttaaacatttaaattacgcatatttgggatgatgctgaaccattttgaaattttgttggttgggttgggtaaccccgttctctataaacctgcccagctgcctggtattttttcccatagattggacaattttccccggccagcgtgtgcgtgtgcgtaatgcgtggcaatttcgcgcagtgcttgtgtgtgtgtgtgatggtgggtgtgtggatgggggcagggggaaaacctatttagatgacgaatcacagaaatttggcctcatcaatgtctgtggctcgtggatcggagtgcgtgtaagagtgtattacatttcggggtttcattttttatacatgcacatatatattatggtttattttttatttttttttgtccttttcgttttgcaatctcttgtgcccgtcatcgtgtgtcccatttttggcaatcactggcggcagcagaagctgtcacaagacattgtcatcatccagagaccaagtcaagagcgacaccaccacagacgcaatggaggagtgggggcaattcatccacctggtcacgtctccatgtgcgtgaaacgaccatacatgtgtccataatcgacggagttcg

SEQ ID NO: 1871 - DNA, 3246 bp, DROSOPHILA
atgtgcaagtatttaccaaatattaatggggctcttaaccccttacgaccccttccaaacgatggctctgttgacaaagtggcaacactggcgcgcaaatatctcgatgctagccatggcatgaaccattttggatatttacttagtcatgtctctgccatattctttaggcaaacgttttctgtcggaaacagttttttcattaacacaaaaaaaggcatccagagcatttgctgtagcacaaaaacatcgaatttccaacgctaccaggtaaaccagtcgccgccgagccgccggaaaaacgggctttccagttcgtctttagcggtaaaaagattgaaggaggaaagcgcggcgctgacgtcggcagcggtagaggcagcgcagcggcgctcttgctcgcattcacactactcaaacatagttgtcgcggatcatggtggcgaatcgcctggcggaggtggcgaccccatactggatcggtccgatcgagccccctccaccagtagctcatcgtccaactccagttccagttcgaatcgcagtgacctgtccaagaagcagaagaagagctcgagcagcagcagcggaagtggcagtggcagtggcagtagctcttccagcggctcctctagcgaggatgagggcgatcaggaaccggaacaggaggtgcagcgtctttccgagcagcaacgggagcagcagcagcattcgccgataaatgagcgagagtccgagtctgctgctggaacgcctgttaatgcggatcaacctggttcgccaaacgctaagtcacagcctagctcgttcctctcatccgttcgcagtcgaagcgtcagtccccagctgtacaatcaggctgccgtggatctgaatatcagtcacgacgaccttagcgatgtcagcgacatcgagggtgaggagaagcgaacctcatccaaaaattcaatgcgtccggcggatgagaacgaggatggcgccatttccaatgattcactgcccactctcggcgaagaggatgaggttgagcaaaagcagtccacgcctaacggcaaagcgtcaagcggggatgagaaggagcctttcgcaaaagaaacccataccgacgacgcgtccaatggacttgcaccagcgaccgctttgcaggaggacttggtcaaaactcatgacgacgacgccttggacttcgaggcggaagagggcgagtgtccggagcaggcaaaggagccttcaccgatggagagcacagccaacgaaacaaaccagaccaagagtacgaccaaggatggcgctggcaatggctgcttggaggatggcgcaggcaatgacagccggaaggacgacgcaggcaatggctgcctggaggaaggcgaggaggaaaaagatatagtgtcggtgtcgacttcatccagccaggaaaaagtggaagagggggagctggaggagggcgaggtgtccgatgaggatgaaaagcgaccggaggagactgaaccgaagccggtgtgtcgattctacactcggggtcagtgcacctgggggatgagctgccgcttcctgcatcctggcgtcacagacaagggcaactacacaatgttcgacaacgttatacggccggtcccgatgcagggaggttcaactggagccagcgccccagcagccccatcatcgaccgctgcccctcgtgccggagggagtgcctatagttcccacgcctcggcgactgctgactatcatgattatcgaactgagcggccattgcatcaccgaccgccgctccttcatgcgcccagtatttatggtgcacccgtccacgacgcccgcactcttttgcctgacggagctccggtggtggtggagaatgcctgggagcgcggcctgcgcaccgctaaggagatgatgcgaaaagccaacaaacgcaaggagcaggacatggactttgaggacaagaagatgaacctaacactgtcgcccgatgaaatggagaaggattcgtactacctcaaggatcggggcggtagcagcgcccgatcaccgccgcctccttcggccaatgtgcgcgaacagccactcaatccactcagtatgcctctgtccatgcatccgcatgccgttgcccatgcaaatcctcgtgctcttctgcccttgcagtactccgtttacggaccgccacccgatcgctacggccgacctcagtatatgccaccgcagtacgatgatgtggatgcgtacggccgtatgactagatatcgcgaattgccgccccaccggatgccgcactatgaggacgatcgccgttcgagaccaacgcgcgaggtcatcgtacagcgtgtggaggccgctggacgtggtgatgagtggagtgatccctggatgcgatccaagtccgttggccggggatcatatgaacgcgaggatcgccgccgtcgagataggcgcagctacagcagcaactcgtcgtattccacctcgaacagttcgcagagtgactccagctcggactcgtcgcgctcaagcagtccgtccgatcataagcggcgctacggttcgcacaaactagcaaccgcgaccgctacttcacgccgccatggcggtcgtgcggcccgttcgcccagccagataccgcgacgcccccggcgcacttccaagggaagcctttcgccttcatataagagaccagctgtggacaagcgtggcgttggacacagtccgtcttccaagcgtaagaagctgtcgtcgccagcacccaagaagtttgacaagttgcgacgccgtcgcagctcgagttcttcagactcagactcatcggatacgtcgtactccgattcggaatcgggatcgtcgtcgtcggacagctcgtcgggatcaagagaaacgccccagaagcgtgtgagggccaccgacaaggcgctcaacgagcggaagcttattagcaagccagctgaacaatcaaccaagaagcgctcgcctatttccattgagattaagaaaacatcaaacatggttggtgtttcggcgttggcctcagccagcaactcagccgactccgatgcggagaaggatcacgataacggtaaggacaaggaaaaggatcacgttaaggagaaagacaaggattgcaaagagaaggacaaggataaggacggcatgaaggacaaagaaggcaaaaagtcacgccgtgaggagctgctgaagcaattgcgcgccgtcgaggatgcgatcgccaagaagcgttccaagctaaactga

SEQ ID NO: 1872 - protein, 1081 aa, DROSOPHILA
MCKYLPNINGALNPLRPLPNDGSVDKVATLARKYLDASHGMNHFGYLLSHVSAIFFRQTFSVGNSFFINTKKGIQSICCSTKTSNFQRYQVNQSPPSRRKNGLSSSSLAVKRLKEESAALTSAAVEAAQRRSCSHSHYSNIVVADHGGESPGGGGDPILDRSDRAPSTSSSSSNSSSSSNRSDLSKKQKKSSSSSSGSGSGSGSSSSSGSSSEDEGDQEPEQEVQRLSEQQREQQQHSPINERESESAAGTPVNADQPGSPNAKSQPSSFLSSVRSRSVSPQLYNQAAVDLNISHDDLSDVSDIEGEEKRTSSKNSMRPADENEDGAISNDSLPTLGEEDEVEQKQSTPNGKASSGDEKEPFAKETHTDDASNGLAPATALQEDLVKTHDDDALDFEAEEGECPEQAKEPSPMESTANETNQTKSTTKDGAGNGCLEDGAGNDSRKDDAGNGCLEEGEEEKDIVSVSTSSSQEKVEEGELEEGEVSDEDEKRPEETEPKPVCRFYTRGQCTWGMSCRFLHPGVTDKGNYTMFDNVIRPVPMQGGSTGASAPAAPSSTAAPRAGGSAYSSHASATADYHDYRTERPLHHRPPLLHAPSIYGAPVHDARTLLPDGAPVVVENAWERGLRTAKEMMRKANKRKEQDMDFEDKKMNLTLSPDEMEKDSYYLKDRGGSSARSPPPPSANVREQPLNPLSMPLSMHPHAVAHANPRALLPLQYSVYGPPPDRYGRPQYMPPQYDDVDAYGRMTRYRELPPHRMPHYEDDRRSRPTREVIVQRVEAAGRGDEWSDPWMRSKSVGRGSYEREDRRRRDRRSYSSNSSYSTSNSSQSDSSSDSSRSSSPSDHKRRYGSHKLATATATSRRHGGRAARSPSQIPRRPRRTSKGSLSPSYKRPAVDKRGVGHSPSSKRKKLSSPAPKKFDKLRRRRSSSSSDSDSSDTSYSDSESGSSSSDSSSGSRETPQKRVRATDKALNERKLISKPAEQSTKKRSPISIEIKKTSNMVGVSALASASNSADSDAEKDHDNGKDKEKDHVKEKDKDCKEKDKDKDGMKDKEGKKSRREELLKQLRAVEDAIAKKRSKLN

SEQ ID NO: 1873 - DNA, 7416 bp, DROSOPHILA
ccaacccaagctgcgccgccagctgtgactgcgactgcgacgccggagttgggttgtcatagctatatagctccatatcaattctagaaatatgtctcagccagcgagccagccagccagccagtactcgcattcggtgtatattgtattgtgttgaatacaataagtatatgtatagctccatgtatgcctgtgagctgtacaaacaaaccattcacattccaaacaaccaaccagccagccacccacctcaatgcccccgttcgaaactctatgttcccgagaatgtcaaatccgatctgattcccgctttgaaaacagtcacagtcatcatctttattttcaaatgggaaccactggccttgtcgccttaacggttccatttgcccatcgagcaggtgcagcgtgtcaactcaaggctgccattgttgtctgtggcctatttggtggcactattcaaagttgcaacgtgacaactaatgtcaaaatccttccaagaggattgtgtgctatgatcttcctttggttcatttaaaaaaaccaaatgggccattaacagcttaaattgggcacccttatatagagcttttaactaattagcagaattagtcccaaaaaaaatataaataaatacctttgtagttaggaccaaactttatttaaagatcctatgacacatcaactttgcggggaaattcaaatacacaatggttgtaaattaataaaaacacaacaatttgtcatttttgaatgcgatatcacgagggggtttatgttgttcgtatgttttagtcaatggaaagttagggttaaccatatcgaggcaaccaatagacgcaaaagagccaaaatatacatataatcgtatacagctaatgcccgtaataaataaatttatcgcattaatgcgcaatgaatgagtgggctagatgtgtgctgtgactgttcgcggacttatctgcttgatactgttgatatgaatagggtcgagtggattggcatggtttgtggcatcatcgggatggataagtgggtagtgggtgctgggaactatgagctggtagctgggcagctaggcagcattcacacgatcattatacgcatacgacccccctatcactgtgcccgagtgtaaccgaagtgatcctataaattgaattacctaccacttattccagtgaatctctgaagcacatagcaccatggtcatatatatggcgcacatgtgtacgtacatatatatgtatgtacgtctggatgcgatgcagtcagtccgattagatagccatcgaccaatattaataataataataataacattaatagccaagtgaccgatattgcgtatcgctgaccttcggtgtcagaggaagtggtaactcgtttccactctctcctcgttttgcatccacctctgtttgccgtacactcactcatatccggatataagtgcacgtaattaaatcactgaaggcttgaatgataagactgctccgcccacaaaaaaaaaaaaacgttgcaattaggtgatgagttccacgcatagctctgctcaatggcatgccaatcagtaaggtcatatgtgtacacattgatagaacaacaatattatacatattatataatgtatatagtagaaagtgatttaagttcagagaagatttcagtaagctaactgaataaagtcaaatattattgcttacatctacagacgtgtacgtgattcttcctatttttagacatttagagctatctctccgttttacacactccattggatgatctatcgcagaaccaacacgaaatatggagcactgctggcaaaacatgagttcatgagttggccgatgagataatttcggtcgctgctatctgtgcaccatataagtttatataataatcgacagacgacgtctaatggtttccctttttccgcatttttctttttgcagttacaaaacgcccagatatacgaaaaggaaacactcttgagtgctctattggcagcgatgtcgccacatgtctttattcctcaatattggcgagtggagcgaaactgcgtaatcttctttacggacgactacgaggcagccgaacgcattcaacatctgggcaagaatggccatcttccagatggctatcgtctgatgccacgagtacgcagcggtataccactagtggccatcgacgatgccttcaaggagaagatgaaggtcacaatggccaagcgttacaatattcaaaccaaggcgctggatctttcccgttttcatgcagatccggatcttaagcaagttttctgcccactctttcgtcagaatgtgatgggcgctgccattgacattatgtgcgacaatatacccgatttggaggcacttaacctgaatgacaactccattagcagcatggaggcgtttaagggtgtggagaaacgcttaccgaacctcaagattctctatttgggggataacaaggttagtgttgattgaagatagtcactttatcaataactaactgacgaccattaccttttccagataccatctttggcccaccttgtagtgcttcgcaatctgtccatcttggaactcgttttaaagaacaatccctgccgttcccgctacaaggattcccagcagtttatcaggtatactatggtgtgattcgttgatcttctaacttttctagtggatgctgccgcatattcgacgtgggatttgtcgcgtctggagttacagaggaattaggattaccacatttccattgttctgttgtctccattccttttctttgaagcaaatgcgctgcagaattggggaccaaggtcaggtgttgccttcgtccaaagtttaaagcagctgagcaggcaaaggcatttgggaaatattttccttatcagctgtcttaaagccaggacagatcgtatgcagcggaatggattttgggcagagcaaaaaaaaaaaaaagaagaaagaaaaaaaaagatttgaagttaaaaaaaaaaaagaaaaaaaaagaagaaaaaaaaagaaaaaaaagtacaagcaaaaaaggcccaagccaattgcagtaaactttcgacgatgtggcaacgctaaactaagaacgcaactgtacttttgacacacacacaccggcaccgttcgtacttccaattgagcaggcggacgtgcagcagtcccaaagcgaatcacattaacgcattaacatcgacaaatataaattattttacgaataacaaataatccaccgaacccacccaccgcgcaccccgctacaacacacacacgggcgcacgcatgtagccactccacgccagcgcacgcacgcatgcgcatgcgcatatgcagttgtgtacgtgccacatctaatgctgcgtgccctgtgcgcgccgttgcgccttgcattgtcgtgtcgccgcttgttgattttgcggtggttgccaagtagtggaggcagagtggagtgcataggctcaccattcgggtgcgcagcgtccagcaggaagcagaaacgactaccaagacgaaggacacaccactgactgactcacgtgctaacggacattctgctggcgccagcggccggcgcgttgttttgccagtcgattacaatttacaattagtattttcggctttgttgggcgcatgagccgcctgcggatgcgacgtgcttgaacatgacgagacgaacagaagttacacagcagtcagctttgaaagccactttttgcttgtggccactgaaagaaaaaacaaaaaaaaaaaaatgaaaaaaaggaaaagaaaaaagtgttgataaaaaaaaaaaaacaaaaaatacaaaagagaaaataccacaaaaaagatgccccggcacaatgcactgctcaattgtacttttccgctgtacttttcacatcgaactattgaaggcacaacaatggccaagcacctagtgcctctgcctcttcagctgatcaaagctccgccaatttgtgtgtgagccggtcgagtaacggtgaagctatatcaaagatacaaacatatatactccgcgtgagaagaagaaggagtcacatctggccactgactaatctgcaattcctgcagcgcatacatcctaaacctccccccccccccaccaacgcacaaatttaaaaaaaaaacccccatttaattattatttctcgctatttaactcgcatatctatcatcgcctccctgtgctaatgacaacaaaaatacggccgaatgtccactatttacagcgaagtacgtcgcaagtttcccaaactggttaagttggtaagttctatttgtaagtgccccttccgttagcaaaaagatgggaattccataaaaatcgtatacatattccatggattacatggatctaaggtttggaatatccttaccgattatttggctcatcaattcccatcacagctaggcaatcacacgaccataaccaaattaaatcccatataggacggagagaccctggagccgcaaatcacatttgatctatccgagcagggacgtcttctcgaaacgaaggcatcctatctgtgcgacgtcgctggtgccgaggtggtgcgccagttcctggaccagtacttccgcatatttgactcgggcaatcggcaagctctgctagatgcctaccatgagaaagcgatgctctccatatcaatgccttcggccagtcaggcgggcaggtgagcatattagtgcttgataataaatgaataccaccaatgcattaatcgcattcatgtccttcagattgaacagtttctggaagttcaatcgcaatctccggcgcttgttaaacggcgaagagaatcgcacccgaaacttgaagtacggacgcctggcatgtgtttccacattggatgaatggccaaaaacgcagcacgaccgacgcaccttcaccgtcgacctgaccatctacaatgtaagtaaagatttcaaattctattagcttgaactaaatgcatctcttcccatccagacttcaatgatggttttcaccgtgacgggattattcaaagagctgaacgacgagaccaacaatcccgcctccatggaattatatgacgttcgccactttgcccgcacctacgtggtggtgccacagaataatggcttttgtatccgcaacgagacgatcttcatcacaaacgctacgcacgagcaggtgcgagagttcaagcgatcgcagcaccagcctgctcccggagctatgccctccacttccagtgcagtgaccagtcctcaggccggggcagcggcgggtctgcagggtcgtctgaatgcgttgggcgtggccactggaccggtggctatactatcaggagatccgttggcggccaccgcaccggttaacagcggcagtgccgccatatcgacaacagcagtggcacctggcgcccaggatgagagcactaaaatgcaaatgattgaagccatgagcgcccaaagccaaatgaatgtgatctggagtcggaagtaagatccaagtggcaatctatcaatagctagataaataagtaaacccatttcttcatttaacagatgcctggaggaaacgaattgggactttaaccatgccgcctttgtgttcgagaaactattcaaggaaaacaaaataccgcctgaggcttttatgaagtaaatcgcataggagtttccgtaggacagagccgcgtgccacatccacataatcgaatgctgtttttttttttttggttttgtaattaaattttaaaattattagagaaacctctatataataataataattaatattattaagctgcgaagttgtgtgcacattcgggcagtagcaattattatcccagcactgcgggcaatgtgcatcaacgatcacagttcttcgatagattagtttagctctctttaagttccgtccgcagatccgctggtctacattgaggccaggacgagtctgcgaacggtagtccctttagagttaaagttgttttagattcctaagccaaacaccttcaaacacacacaacacgacaacactattaaacgtaatgcaacaatgttgtcgaatcgaaagaaacccaatttttattttaatatatacgacgataccgaaaccaaggcgatggtcgaaaagcatggatcgcgccaataattctatattccccgctttcccagatcctcgactcgccttacattttgtatacaaataccatagaataaaaagaaacattttgaccactgtaaaaattttgtaacgactcggaaaccaaaattacctttatttcttaatagaaaaaaattattcgatttacaatacacgcttagccgtaaattcaattgaatttaagtgtaagatatataaaaattatatacattaagacaaaagtgtagattcataaataaatttttcagaatagaatgtgcgttgtattttactatttgttgttcaatggaaccaagtgaattggagctcacaaatatgaatcattcgaatattttcttatgaattgagtttaaactgcaacgtaagaataaccgacaatgcagtttttaacggtaggtgtcgccaacaggaaactgactcgaaattgcagctaggtggcgctattaagctatgtaagtaacgtgtcgaatatgtactggcgctagatggcgctctggccgagtaaataagttttttatatcaaaatagcaatttaagattacagtattgtttttatattaaaaaaaaaaccatttaagaatatttattttttagtattttcaaataataaaagcaggtaatttaaaacattctcgcaaatagtaagagagtaagaaattaatacagaaaaattattatctgtaaagtttaaagttttttattgaacttcaattaaagttgatttactatcaatggcttgaaattcgtgtttagataccatcttcttgggctatgataatatttaaataataaatagactttgagggtcaacgaatatttcaatggccataatctgggaagtcgagattcttttatctagcctacgtcattaatggtaaccagttcggggcgcctgggagcaactccttgggctcattgtcatccttcgcgcttagacgagacagcgcccaaatatcgaaagtgtctggaaatagggcccatagttaccaggaccaggacctaggcccattgtgcgaatgcctttgagagcgactgccggggcagggacaataaaggagtcgaataacaaaaagcttttctagtttcacagctttccacacacgtagccggatttgcattgtctgcggtgtcggctcctcggtttttgggccacagctgtccggcaattgggtgggactgaacaattggtcagcaactggttgccattggtggcgaccactggtcagtgggcagcgtgagaagcggcaggcgtcc

SEQ ID NO: 1874 - DNA, 2459 bp, DROSOPHILA
atggtttgtggcatcatcgggatggataagtgggtagtgggtgctgggaactatgagctgttacaaaacgcccagatatacgaaaaggaaacactcttgagtgctctattggcagcgatgtcgccacatgtctttattcctcaatattggcgagtggagcgaaactgcgtaatcttctttacggacgactacgaggcagccgaacgcattcaacatctgggcaagaatggccatcttccagatggctatcgtctgatgccacgagtacgcagcggtataccactagtggccatcgacgatgccttcaaggagaagatgaaggtcacaatggccaagcgttacaatattcaaaccaaggcgctggatctttcccgttttcatgcagatccggatcttaagcaagttttctgcccactctttcgtcagaatgtgatgggcgctgccattgacattatgtgcgacaatatacccgatttggaggcacttaacctgaatgacaactccattagcagcatggaggcgtttaagggtgtggagaaacgcttaccgaacctcaagattctctatttgggggataacaagataccatctttggcccaccttgtagtgcttcgcaatctgtccatcttggaactcgttttaaagaacaatccctgccgttcccgctacaaggattcccagcagtttatcaggtatactatggacggagagaccctggagccgcaaatcacatttgatctatccgagcagggacgtcttctcgaaacgaaggcatcctatctgtgcgacgtcgctggtgccgaggtggtgcgccagttcctggaccagtacttccgcatatttgactcgggcaatcggcaagctctgctagatgcctaccatgagaaagcgatgctctccatatcaatgccttcggccagtcaggcgggcagattgaacagtttctggaagttcaatcgcaatctccggcgcttgttaaacggcgaagagaatcgcacccgaaacttgaagtacggacgcctggcatgtgtttccacattggatgaatggccaaaaacgcagcacgaccgacgcaccttcaccgtcgacctgaccatctacaatacttcaatgatggttttcaccgtgacgggattattcaaagagctgaacgacgagaccaacaatcccgcctccatggaattatatgacgttcgccactttgcccgcacctacgtggtggtgccacagaataatggcttttgtatccgcaacgagacgatcttcatcacaaacgctacgcacgagcaggtgcgagagttcaagcgatcgcagcaccagcctgctcccggagctatgccctccacttccagtgcagtgaccagtcctcaggccggggcagcggcgggtctgcagggtcgtctgaatgcgttgggcgtggccactggaccggtggctatactatcaggagatccgttggcggccaccgcaccggttaacagcggcagtgccgccatatcgacaacagcagtggcacctggcgcccaggatgagagcactaaaatgcaaatgattgaagccatgagcgcccaaagccaaatgaatgtgatctggagtcggaaatgcctggaggaaacgaattgggactttaaccatgccgcctttgtgttcgagaaactattcaaggaaaacaaaataccgcctgaggcttttatgaagtaaatcgcataggagtttccgtaggacagagccgcgtgccacatccacataatcgaatgctgtttttttttttttggttttgtaattaaattttaaaattattagagaaacctctatataataataataattaatattattaagctgcgaagttgtgtgcacattcgggcagtagcaattattatcccagcactgcgggcaatgtgcatcaacgatcacagttcttcgatagattagtttagctctctttaagttccgtccgcagatccgctggtctacattgaggccaggacgagtctgcgaacggtagtccctttagagttaaagttgttttagattcctaagccaaacaccttcaaacacacacaacacgacaacactattaaacgtaatgcaacaatgttgtcgaatcgaaagaaacccaatttttattttaatatatacgacgataccgaaaccaaggcgatggtcgaaaagcatggatcgcgccaataattctatattccccgctttcccagatcctcgactcgccttacattttgtatacaaataccatagaataaaaagaaacattttgaccactgtaaaaattttgtaacgactcggaaaccaaaattacctttatttcttaatagaaaaaaattattcgatttacaatacacgcttagccgtaaattcaattgaatttaagtgtaagatatataaaaattatatacattaagacaaaagtgtagattcataaataaatttttcagaataga

SEQ ID NO: 1875 - protein, 566 aa, DROSOPHILA
MVCGIIGMDKWVVGAGNYELLQNAQIYEKETLLSALLAAMSPHVFIPQYWRVERNCVIFFTDDYEAAERIQHLGKNGHLPDGYRLMPRVRSGIPLVAIDDAFKEKMKVTMAKRYNIQTKALDLSRFHADPDLKQVFCPLFRQNVMGAAIDIMCDNIPDLEALNLNDNSISSMEAFKGVEKRLPNLKILYLGDNKIPSLAHLVVLRNLSILELVLKNNPCRSRYKDSQQFIRYTMDGETLEPQITFDLSEQGRLLETKASYLCDVAGAEVVRQFLDQYFRIFDSGNRQALLDAYHEKAMLSISMPSASQAGRLNSFWKFNRNLRRLLNGEENRTRNLKYGRLACVSTLDEWPKTQHDRRTFTVDLTIYNTSMMVFTVTGLFKELNDETNNPASMELYDVRHFARTYVVVPQNNGFCIRNETIFITNATHEQVREFKRSQHQPAPGAMPSTSSAVTSPQAGAAAGLQGRLNALGVATGPVAILSGDPLAATAPVNSGSAAISTTAVAPGAQDESTKMQMIEAMSAQSQMNVIWSRKCLEETNWDFNHAAFVFEKLFKENKIPPEAFMK

SEQ ID NO: 1876 - DNA, 3259 bp, DROSOPHILA
tgccgatactatatagtgtgatatcgcggggcaccacagtgctggcgaagtttgcggagtgcgtcggcaactttgccgaagtgacggagcacataatcggacggatcggggtgcataaccacaagatgacctacacacacggagactacctgatccactacacctgcgagaacaaactggtctacatgtgcatcaccgacaacgtgggtgaacgaaccactggcccaattagccacctcagttgcttattgcccaatcgataacgtatcgtttctttgtaggagttcgaacggtcgcgggccttcctcttcttggcggatatcaagcagaagtttatccagacttacggcctacaggtggccaccgccatcgcctactccatgaacaccgagttctccaagatcctggcccagcagatggtctatttcagtcagtcccgggaggtggacaccatttcgcgagtacatggtcagattgacgagcttaaagacattatggttaagaatattggtatgaaggaaggaaaatccgtatgttctttttgtttactattcccttttcatcccatttgcagacagcttgcgggatcgcggcgagaaactagagctgctcgtcaacaagaccgaaaacttgagcaataatgtaaggtgatgccaagcagagacttttaaatgtgtttttcatttgatctctcttacagtccgttgcattccgtaaggcctcccgaaatttggctcgtcaaatgttttggaagaacatccgcgtctacgtggtggtgggtctggtgataaccttcatcgtttacgtgattgtgagcatggcctgtggtggcctcgcttggcagtcctgtgtttaggacaagctttaaagttgtttatattgttataggctcataacacatgtatatttgcatataaaactctacagtactctcatctatgttctatgtaataaacttcaatgtataccggataaagtgttagaagagataatggaatattcacttgtcctccacatacacgacgtcgttggccttcacctttcccggcagccgaagtcccatatgaacgcccagagccggcgaactgtagttgaacaagcgatagctgtggattccagatatgagggtcgggttttgtaagtcgtacttctcagatatttccatgggtagtgactcaccttctgagcgttttgagaggctctccttcggaactcctctctgcggtcttcgcattaatgttggtaaaaatacagcgagtgcatggcgccaccgtacggaaaacagcatcttcgcctatacgcacccactgccaattgtcctcggcatagggctcatcaacatccattttcagttcgaagttacctcggaactgcagtgcatccaccggattctttaaccgagtattaagatcggcgaccgacgaaaggttcatcagcataaagctggtggcatcgttaaaagtgccctatggaaagaattcaaatcaagggtgatctgggtcctaacacttcgaattgcgcatcaggaacataccgagtcctcctgtctaatgaatggcatggactttaggcggggattggtgcatctcactggtttcggatagggatagtgaactagcttgaggccgctctccttcttcaggatggcctgggagaaccacgtgttgatccgatctccgcagggcatcacgtctatggaaacgccccaaacggaagttttcacatccttgccaggaccgtccagcttctcgaagtccagctccaggtctggcatgtcctgggcgctgaacacaagcttgctgggcgacaccttcttcgacttgatctgggtcataagcggatacacccgagccgtgatcatttcgttcttttcattgaccaccatcaaggtgcgatcccttattccctcaaaggacatgctcagtacatcgcagtcgtactccactccgggcttcgagatgtccataggggcacaggacttgaccggaaaaaagtgtatcctctccacggtgcccacgcgtcgccacttttggggaaccacatcgcgggtcagatggcggtacagtaggaagctagccccgcccaccgccaccaggcccacgcccacggccgccagggtcttgggactgaggtcaaaggtcgagttatttccgccggctgcaggataatccacgttacttaaggatctcccagctaatcccggtttttcactcacttgccatctcctttgcgctgtaacacttgttgctttctctgagtcaaaagctccactgattaggtttattggacaaaaagctctcctttgatgaagatctcttaccaaggctggacaacacatgcatctatgtatatcagcggtcattttgacagtagcaactgatgataaggaatgtaacctggttcttagtgctatttttcagtgatagggtagacttaatacatttatttttaaattaccatccccgctccctccaggttaatcgataactgttatcgggcatgcagccggcgaattcgtgctcctttgtttacataacaattgcaagaagcctgttgccttttaagcggaaaaagaaaaaaatttaaggttctttgttctatcagacttctatcggcagacttcgggaatcagtgtcatggaatcgagggaccggaaaacttcgaatgaggacgactcgtcggaaatctccgaattggatgtgggcagtgataggtttaatcctctgcgagcgttatacgaacccaattttagggtgaccgatgctgttccaaaggtcatctaccagaatctggctgccttcgagagtgcacttaaaaaattcggcatctggcagctgaacaagcgccaaaagccgggatccgcagaaggaggagatcaggggacatcgaaaaaggcttccacttccgaggctgtagatattctacctcctgagcgacgttttgagccgcaccagatgcctaccactagtagcagaaagaagcatcatcgaaatattttcacctacatggaggcagctgtcggtccattggaactcctaacgaagtgtatatcccctgctagccacaatgaatccaacgaaaggagaagagttcgggtggtgattcgcaaacacggatcggtgggcggcagtgtcgagggtgaactgttggcctttgacaagcagtggaacctcctactgaggaatgttaccgaaacctggaagcgacgaaagtacaattacggagagcaaaacatatgcgacacacctgttgattgcac

SEQ ID NO: 1877 - DNA, 1039 bp, DROSOPHILA
actcagagaaagcaacaagtgttacagcgcaaaggagatggcaaccggcggaaataactcgacctttgacctcagtcccaagaccctggcggccgtgggcgtgggcctggtggcggtgggcggggctagcttcctactgtaccgccatctgacccgcgatgtggttccccaaaagtggcgacgcgtgggcaccgtggagaggatacacttttttccggtcaagtcctgtgcccctatggacatctcgaagcccggagtggagtacgactgcgatgtactgagcatgtcctttgagggaataagggatcgcaccttgatggtggtcaatgaaaagaacgaaatgatcacggctcgggtgtatccgcttatgacccagatcaagtcgaagaaggtgtcgcccagcaagcttgtgttcagcgcccaggacatgccagacctggagctggacttcgagaagctggacggtcctggcaaggatgtgaaaacttccgtttggggcgtttccatagacgtgatgccctgcggagatcggatcaacacgtggttctcccaggccatcctgaagaaggagagcggcctcaagctagttcactatccctatccgaaaccagtgagatgcaccaatccccgcctaaagtccatgccattcattagacaggaggactcgggcacttttaacgatgccaccagctttatgctgatgaacctttcgtcggtcgccgatcttaatactcggttaaagaatccggtggatgcactgcagttccgaggtaacttcgaactgaaaatggatgttgatgagccctatgccgaggacaattggcagtgggtgcgtataggcgaagatgctgttttccgtacggtggcgccatgcactcgctgtatttttaccaacattaatgcgaagaccgcagagaggagttccgaaggagagcctctcaaaacgctcagaagttcgccggctctgggcgttcatatgggacttcggctgccgggaaaggtgaaggccaacgacgtcgtgtatgtggaggacaagtga

SEQ ID NO: 1878 - protein, 333 aa, DROSOPHILA
MATGGNNSTFDLSPKTLAAVGVGLVAVGGASFLLYRHLTRDVVPQKWRRVGTVERIHFFPVKSCAPMDISKPGVEYDCDVLSMSFEGIRDRTLMVVNEKNEMITARVYPLMTQIKSKKVSPSKLVFSAQDMPDLELDFEKLDGPGKDVKTSVWGVSIDVMPCGDRINTWFSQAILKKESGLKLVHYPYPKPVRCTNPRLKSMPFIRQEDSGTFNDATSFMLMNLSSVADLNTRLKNPVDALQFRGNFELKMDVDEPYAEDNWQWVRIGEDAVFRTVAPCTRCIFTNINAKTAERSSEGEPLKTLRSSPALGVHMGLRLPGKVKANDVVYVEDK

SEQ ID NO: 1879 - DNA, 3248 bp, DROSOPHILA
gtttcctgcgaaaaccaccgaaaacgcatgcgaaaagcaaaacacaacacggagaaaatgtgtctggatgcctgaagccatagaagaaatgtatatgtactatatctgaggaggggaggggatatctgggggaccgaaggtctggagctgaaagtggcgccggcctggcgggcgccaaaaagcagaggtaaaaacaggagtaaatgcgtgccatgattacagcgatgacgacttccaccccgaaggaaaagcaaggaaagctgcgacgcagacgatgatgtttcatcttttccacatgaaaactcacgtaacaaaaattatgataatcataacttttccccccacgcatcctctgcccacgagtgcctttgttttgttagccggacaaaggacccatggaaaggtagaccttggaccatagaatggcgtctagtttttctgccgtctggccattgctctatttttattaagtctttgcatataaatcaatgtgccccgatatgcagaagagcagaaaaaggtataaaagatttatgactctggtccgccggcgagagagctcgtttaaatattgtttaacataatttcgtgcaaacccaaactcggaggcgaactctttcagcgaaagctacacccacatggagataagtaaacagagtggccataaatccatccatccacttgcagcagcgacaaacgcacaagatttatggcactgcctcaagtctaattacaagtcaagtttgtcgaattgagaattggggaaaccagcgcaacaagtgtgggaaatcaccaagtcagcaggcccagctgttttccgagaaaatctccaaaggaaaagcactcccccatctgaaaattcagagccgttgacatcatacatgtgagcagcagctgtcgtctatcaaaagaatggggggatctagagtataatgtttagctaatgctgccgaaaatttacagagtcaaggggtctatcacaagtacaaatctatcttcgttaaaagtccgcgaaggcttcctcgtgtcgcatggttttcgccttgggtcgcggcttatcagagaccttatcgaagttggatatatcctcgggattgctgatgttgggcacatagggcgcgttaactgtctgattgaggagggggatccactccacatccttgaaccactcgtgctcctttatgtcccgattgccgttgatcaggttgccaaaactggacaagaaacccgtcacgttaaagtgaaagattcttgaataacaatttaccgcttcgagagatccacctgcagcaagtggtccaccaaatgacgcagagctccactgaaataactgggcatcttatagtccgcctcacagatcttgttgtacatgctcatcacatcgcgattgtgggctgagaagggcgagtgtccagcgacgaattcaaagaccagtaccccaaaagcccaccagtccacgctggttccgtaaggcttcgattggataatctctggcggcaggtactccggagttccgcacaatgtcattgtacgggtttccactttctgtgggccagaaacaaacaacttgaatagatttctgatgtgttagcaaaataagataaaaaacaaaccttggcaaatccgaaatctgtcactttcaagtatccgttcttatccatcattatgttctccggtttgaggtctctatagagcaaactgcaatgatgcagatactccagagccaaaaacacctgggcagcatagaagcgggcctgtttttccgtaaactttcgcactctttaacagtcggaaaatggaaaattatttgtggtcgactactgagatttactcactttcggtggtaggtgaagagctctccgccaccaattaggggcaggacgaggtaaaggctgtcgaagtccttgtaggaggctatcaggttgaccgtgttcgggaacgtcatcgaacgcagcacgtttttctcgctcatcacgtggctcacctgtttagtcttcacgatctgatccttgctgagctgcttggaggcgtaatagacgccggactcgcgctccctcaccaactgcaccttgccgaaggatccggatccgagggtcgccttaatctcgtagtcatccagacccgtactaggcgacggcgtgttggtggcgaacttcttgttgaagtcctcgcgcaacttgtccaggatgagaatgtagtccaccttgggactgaagtgcatctgcgcttgctccggctggggacccattgcgacaacaactcgcgtattagagttctgagtgatcgcgtcaattaactataccagaatttcgaatttttgtctaaagcattacgaaagctcggattgaaaatgacctgacgctccagggctgctatttatttatcaaaagaccatttatgaatgtaataagagagctgtattgcgaaaactacttttacaaaatccaatcacgatagcaccccttgaaattaagcaaacactaaagaaaacgacgatttcgaaggacacattgacatttaaaaattcgcaaacaattcgggatggcggtttattcgggacttgtaccgatccttgaactcgaagttctcgaagttcgacagatcttcggcgccggaaatggtgggctggtagggggcggtgacttcctggttgagaatgccaaaccaatctacgccctggaaccacggatgactcttcacgtcgctggagccgtcgttcgagtttcctaaactgagaaggggtggcatgagcactgcattggaagcaccttgacccactcccactccactcaccgctttgaggtgtccacctgcatgaggctctcgacaaggctcctcagctgggacgtaaagtatgagggcatcttgtagtcgcatatgcagatcttggagtacatcaggattacatctcgattgtgaatggcaaagggagaccgccctgccacaaactcgtacactaggataccaaaggcccaccagtccaccgatttgttgtagggccggagttgaacaatctccggggccaagtattccggggttccacacagcgttgatgtgcggccatccacacgctgtgattatttgaggatgaaagcaatgggaattatgtgaagtcttttccccaccttagtgaaaccgaagtccgttattttgatatagccgcgctgatcgagcagaatgttctccggcttcagatcacggtacatgaggtgcatcttgtgcatatactcaagagcaagtgccacctg

SEQ ID NO: 1880 - DNA, 1071 bp, DROSOPHILA
atgggtccccagccggagcaagcgcagatgcacttcagtcccaaggtggactacattctcatcctggacaagttgcgcgaggacttcaacaagaagttcgccaccaacacgccgtcgcctagtacgggtctggatgactacgagattaaggcgaccctcggatccggatccttcggcaaggtgcagttggtgagggagcgcgagtccggcgtctattacgcctccaagcagctcagcaaggatcagatcgtgaagactaaacaggtgagccacgtgatgagcgagaaaaacgtgctgcgttcgatgacgttcccgaacacggtcaacctgatagcctcctacaaggacttcgacagcctttacctcgtcctgcccctaattggtggcggagagctcttcacctaccaccgaaaagtgcgaaagtttacggaaaaacaggcccgcttctatgctgcccaggtgtttttggctctggagtatctgcatcattgcagtttgctctatagagacctcaaaccggagaacataatgatggataagaacggatacttgaaagtgacagatttcggatttgccaagaaagtggaaacccgtacaatgacattgtgcggaactccggagtacctgccgccagagattatccaatcgaagccttacggaaccagcgtggactggtgggcttttggggtactggtctttgaattcgtcgctggacactcgcccttctcagcccacaatcgcgatgtgatgagcatgtacaacaagatctgtgaggcggactataagatgcccagttatttcagtggagctctgcgtcatttggtggaccacttgctgcaggtggatctctcgaagcgttttggcaacctgatcaacggcaatcgggacataaaggagcacgagtggttcaaggatgtggagtggatccccctcctcaatcagacagttaacgcgccctatgtgcccaacatcagcaatcccgaggatatatccaacttcgataaggtctctgataagccgcgacccaaggcgaaaaccatgcgacacgaggaagccttcgcggacttttaa

SEQ ID NO: 1881 - protein, 356 aa, DROSOPHILA
MGPQPEQAQMHFSPKVDYILILDKLREDFNKKFATNTPSPSTGLDDYEIKATLGSGSFGKVQLVRERESGVYYASKQLSKDQIVKTKQVSHVMSEKNVLRSMTFPNTVNLIASYKDFDSLYLVLPLIGGGELFTYHRKVRKFTEKQARFYAAQVFLALEYLHHCSLLYRDLKPENIMMDKNGYLKVTDFGFAKKVETRTMTLCGTPEYLPPEIIQSKPYGTSVDWWAFGVLVFEFVAGHSPFSAHNRDVMSMYNKICEADYKMPSYFSGALRHLVDHLLQVDLSKRFGNLINGNRDIKEHEWFKDVEWIPLLNQTVNAPYVPNISNPEDISNFDKVSDKPRPKAKTMRHEEAFADF

SEQ ID NO: 1882 - DNA, 2896 bp, DROSOPHILA
tatatatatatatatatattgtacatatccgatatatgcaagcatatagacacatgcacaataaacgaaacaaattcgagcacattggcgacccacaaaacacttggcactaaatcctactaatacacggtaccgggaaagggatgcggtaaggtaacgggaaagggtaacagctctggggttggatgctttctggctgggatcggctgggagatcgacttagtcgatcaccaccgcccacggatgatccacccgaccgtactgaatgtcggtgagcgtttcgcggatcagctcgtgaacgggcttctcctgctccatggtgggtatatacagatcctggccaaggtagctgatcctgttcacggggctaaccacgcacgccgttcccgcaccaaagagctccagcagctgttgcaagagaagtaagtgtcgcatgagtttcgttcgagggggaaatgctctgttagattacttacccttccctggttgaggagctcacagaccatgggcatggtgatgttcgcctcgctaaccttaaacttgccccactggcgggtcatgcgcaggatggagtcgcgggtgataccgggcaggattagaccgctcagcggtggggtaaccagttcttgttctgcaaatgacatagatatatatatataagcaatcccattcgttttgctgctgtattagacaccaacctccttgatcgttcacgaagaacataaagatgttcatggtgcccacttcggttagctgatgatcctcgccgtagagccacagcacctgctgcagtcccttggcggccgcctccttctgcacattgattgtgggtgcgtagttggagcccattttgcgattgcccacgccgcctggccaggcacgaacataactgggatcggccagcagggagacggcaccggacgagcctgtcttaaagtaactgcccacggggctgaggatcgtgtagagcagggccgagtcggaggaagcaactcccagtgtgggctgcaagtcgaaatcaaaacaggtaagctcatgatattccaaagtagatacggttaattagatatactcacatcaatgccgatcagtgtggggcggatgtacaagctggcggtgtccgtgtgaggaacccactcggaatcaatggacagcaggcgggacaggcactggacgaactccttgccctcgaaggtgggcagaccggatcgctgggcggccaggttcatgcggttcatgttcatgtccggccggaagatgcggatcttgccatcgacgccgcggtacgccttcatgccctcaaagagctgcaatggaatggatggcattacagaggtgataagacaacatcgcaccattggcaacagtcgctgatttcgatttgggttctgactacactatatgtacatatatactataaatctgcatgacgttgcttcacaagtcacacgtgcgacttgtttacagagattgcggtctggggacttggggattacgaagcgttttcaagtcacgtaaatatttgcactcaacaaggaattctagttacattgttcaacttttttctaagctatgctttttgttgctgttactgatatgttcttagtgtgaaaacgcaggaccgatggcttacctcaacggcgtagtgcaggaccttggcggcgggatgcatcactagattctccagcggcgtaatctccggtcgctgccatccgcccaaactcttgtggtagtagatcttgagcatgtgatcggtgaataggcggccgaaacccaattcctcatcgttgtccggcttgggctgcagttgctccggtgcggccagtcgcacggaaatctgtgaggcacggaactgatgacccagattcttgtcatgcttaatgggctccggggcactggtgtattgggcgtccagcgaggcggtgatctcgaagtccgccgacgatttctgttgcaactgtgccgcttgggcggctttcagagactggttgctgcacaaccggatcgactgctcgaggaagcggatcaggcgatgctgattgcggaaaatatcctgcaagtgtgaaaaaattgaacacataagtcgatttgatcatgctctgctgacagctcttgaagagcaagaaccttgaccctatttaatcccaattcccgaattgtaaagaagtgtagttaatggcaccttgcatctctgagtatatagttttataccgaaaactatcaaaaacaactagacttatttgactttccttgcagaactataactatgttcttgtcaataaaagcgttaattaaatccacatcgctcatcgatgattgtatgtacgtatgttaatttgggtctagaccctagccgaaatcgttgatttgccgaaaatgatttgcacactaattaatactcaatttgcaaggcagacaaagtctcgttttgcggcgtttggcttggactgatgtaaccccatatagtctaaattgcaggtcagacgagaagtcagcggtttagatttgattccggctctgcttagattccgaacctaatcttcggtagcatattttatttgattacatttcagatggctgatgaaatcggccaaactggcgactaagccaaaaagctgacagccaaaagaaaaacgccaagttgacatccatggtcgccattgcatcagccaaaaatgttgatttaaactactcgaaaaactagcaaacatgcgcgttcaaaaactcgttcgaaaatcgaaaaacaaatgaaacgaatatgtcgtctataagtctgactgcccatagtacttatcgctgttttttttcttttttggtgcgaagcggtatgggaagcgataagaacaggccataaatgtccaaaataaagtattaatgggctctattctatttatac

SEQ ID NO: 1883 - DNA, 1125 bp, DROSOPHILA
gtgccccggagcccattaagcatgacaagaatctgggtcatcagttccgtgcctcacagatttccgtgcgactggccgcaccggagcaactgcagcccaagccggacaacgatgaggaattgggtttcggccgcctattcaccgatcacatgctcaagatctactaccacaagagtttgggcggatggcagcgaccggagattacgccgctggagaatctagtgatgcatcccgccgccaaggtcctgcactacgccgttgagctctttgagggcatgaaggcgtaccgcggcgtcgatggcaagatccgcatcttccggccggacatgaacatgaaccgcatgaacctggccgcccagcgatccggtctgcccaccttcgagggcaaggagttcgtccagtgcctgtcccgcctgctgtccattgattccgagtgggttcctcacacggacaccgccagcttgtacatccgccccacactgatcggcattgatcccacactgggagttgcttcctccgactcggccctgctctacacgatcctcagccccgtgggcagttactttaagacaggctcgtccggtgccgtctccctgctggccgatcccagttatgttcgtgcctggccaggcggcgtgggcaatcgcaaaatgggctccaactacgcacccacaatcaatgtgcagaaggaggcggccgccaagggactgcagcaggtgctgtggctctacggcgaggatcatcagctaaccgaagtgggcaccatgaacatctttatgttcttcgtgaacgatcaaggagaacaagaactggttaccccaccgctgagcggtctaatcctgcccggtatcacccgcgactccatcctgcgcatgacccgccagtggggcaagtttaaggttagcgaggcgaacatcaccatgcccatggtctgtgagctcctcaaccagggaagggtaactgctggagctctttggtgcgggaacggcgtgcgtggttagccccgtgaacaggatcagctaccttggccaggatctgtatatacccaccatggagcaggagaagcccgttcacgagctgatccgcgaaacgctcaccgacattcagtacggtcgggtggatcat

SEQ ID NO: 1884 - protein, 283 aa, DROSOPHILA
MLKIYYHKSLGGWQRPEITPLENLVMHPAAKVLHYAVELFEGMKAYRGVDGKIRIFRPDMNMNRMNLAAQRSGLPTFEGKEFVQCLSRLLSIDSEWVPHTDTASLYIRPTLIGIDPTLGVASSDSALLYTILSPVGSYFKTGSSGAVSLLADPSYVRAWPGGVGNRKMGSNYAPTINVQKEAAAKGLQQVLWLYGEDHQLTEVGTMNIFMFFVNDQGEQELVTPPLSGLILPGITRDSILRMTRQWGKFKVSEANITMPMVCELLNQGRVTAGALWCGNGVRG

SEQ ID NO: 1885 - DNA, 3702 bp, DROSOPHILA
tacacctgtcactgaaccgggagccgactaatttgtaattaatgcaccatttcgagagcgtgaactgaaagctaatgcaagccattatgtacaccgcccacgaatgtacggattattgtaaatgtaaagagcaattgttatgccaccatgtgtacacttcagcgatcgcagcgcattttgtgtaaattcagtagcagccccagagtcatctctcttagaatacgttttcaaatgtgtagaaccgttgccggcctgttttgttcgttttcgtttacaaccgaatatcgaaagatcaacccatttacacattgctacacacaaagtataattgaatatacttatacatacttaattcaaatgattgtgagttagtttaatattacataaatattaattataaattacattatttgcaatttaacccgatcaaccagcatataagataaaaaccaatattgtcaagttattaaaaagtgaaataaatcttaaataaaaaagaatttaacctgttttaaattaatacggtaatgacggtatgacggtagtaatggaaacttcttgtcagactttagcgcaattcaaatgtagataaatattgccttgcatgtccgaaagagctgtatacttttaggccttgcttgcggacagtcgtgtccatgtcatctcatcatatgtgtattacctgaacaaatgaaaatttcatggttttaaataagcacaaaaatgctctcagattagttcacattcagttatcatcatgaacctatgttggtcgattttccttctcggagtcacgactgcaatcgaaacacaatactatgccacatcaacccgcgaaatggcatctctgctgcaaattgaggacgaactaattggatatatgcgtcagtatgcgatggaattgcaacacaaagtgaacacaatgcggacgtaggtgatttgtttaacttattagcaacaattgtaagcatcgatatataatagtttccaggaggagtggatgaccaggagggcgctgggacccgctgatcctacgtcctatgtggctaatccgttgataagttttccgctcatgcgacgcacgtatacggatgttcccaagttgctggaattagctcgtgaggagttcaaaccgggcaagtagtagttatatatccatttcataaaagattggttttgaagattggattgcaggaccgtttcaaaaatttattgattatgatctgagtagtatttctgacgtagaacttgaaactgctgtaactggtatgttgcggtttcagggcgtttacggtatggatgaaagcgaaatggctaatggaaaactacatgggaaacagtacaagtgggtttctataataccttggacagttttatttcttaattttaatctctcaatagctccagaatgagtgctgcagattgccttgctgtggccactcatctagagaatgttgataagggcaaactggcatgcaaatggtttaaagtcgccatcgatcagtatgaagagaaattggatcctgtaaatagactacttcaaacaggacgctctcaaatctacgagaaattaggtctaactttgctcgctatgcgtaagtaaaagtagacctaatctgaatatgaccaatatacttgtcactttttccagatgatttaccagccagtcaggctgcatttagggattctatagggtgggcctccaaggaggataacactgatctggccaaacacttgaaggataaactagcccacatgtttgtgcatgtggacaactgccgaggcaaaaacctccttcccagcaaatcctacctccgttgtcgttacttaagagatggttccccgtttctccgaatggcccctgttaaactggagcagctcaacattgaacccttcgttgggctttttcatgatgctatctcaccagcagagcagaaggacttgttacatctcacggattctaggttagagcacaggaaaaaagatagttccagtgtagaggccaaagtggacacaaatgcctctgatcatgtgagacgaatacaccaaaggattgaggatattacaggattcgatttggaggaaagcgaaccactgaccgtttctaactatggcattggaggtcaggatttcatccacttggactgcgagcagcccaaagtgagtttggtatctaatgtattccatttgatttacaaagcaggtttggttttctaggagtttattggatactacccaaaagaataccgctcggcatctgcgatgttttatgtaagtatttatctttaaatttagcagattatcaaaagaagtgttagacaaaaaatcagagcgaatgctgctgatgtttataagccccaggaaagcaaaataatatgtgtatttaaactgtataaatttctgtttcccagctcagtgatgttcaaatgggtggctatgcctcttttccggatctgggctttggctttaagccccgtcggggatcggccttggtttggcataatactgacaactccggcaattgtgatacccgaagcttgcaggccacctgcccggtgctccttggaaatcaatggggtaagtcgttaaagcagcccatcgattcttctctcttctacttaccgttcaccatccggaaaacagtggccaaaaagtggatcagtgggtcaggccagtggcgcaggaagtcgtgtcggaagtaaagaaaattcagttttccattcggtttttatccacttttgcgataatttattcaataattttgtcgttatttatattatgataataaattttatgcactattttatagtattcatatttaatttatatgcaatgtaacattatttggggctggggagaaatggtagggcttggcattcaattgtccacttttgatatcatccttactttcattagggagcagggagtgggagtttggcaagggctttgagggtttcgagcgggtgggaacaacgcgtttcctgatacgtatgcaaatgatatttgaggcagcgggaggcgcctccggcaatatgtatgcgtgcgtgggcggctggggtccaatacattggagatgggaccacggaaccggaaacggaaacgaacaacaagaacgcaggcaagagagaaagagatgtcgatgtcggtgtccgagggaatctgtaggaatacttgattgccggctcttcttctctcagttttgatatcacgctcccccggttctcagactcagcctcatccacagaagcatcagcatggcgagcaggggctgccacgtcgtccggttgctcctgcccgcattccgagcagcctcctcgagacctgtggcgataaaagcaaaaaaatagttcagattatacagaaaagagttaaaaatcgcttgcttttgtattttttttaatattttcattttaaataactccacacgaaagatttatccttccatatacgtgggactcacctccgatgtaattcagatgatcatcgttgctggcggaggcgcccggatgaagcttgatttctgcaacacagaaccacaggcatcgagaaaaaaaaaaacaacagggacaaacaaaacaaattaaaccctgtgatggcgggagatggtggagtagagattgcgtatacgcaccgtataaccgcaatgtgccctcggcacggcccagcgagtttgtgctgacgcagtgataggtgcccacatcg

SEQ ID NO: 1886 - DNA, 1134 bp, DROSOPHILA
atgaccaggagggcgctgggacccgctgatcctacgtcctatgtggctaatccgttgataagttttccgctcatgcgacgcacgtatacggatgttcccaagttgctggaattagctcgtgaggagttcaaaccgggcaactccagaatgagtgctgcagattgccttgctgtggccactcatctagagaatgttgataagggcaaactggcatgcaaatggtttaaagtcgccatcgatcagtatgaagagaaattggatcctgtaaatagactacttcaaacaggacgctctcaaatctacgagaaattaggtctaactttgctcgctatgcatgatttaccagccagtcaggctgcatttagggattctatagggtgggcctccaaggaggataacactgatctggccaaacacttgaaggataaactagcccacatgtttgtgcatgtggacaactgccgaggcaaaaacctccttcccagcaaatcctacctccgttgtcgttacttaagagatggttccccgtttctccgaatggcccctgttaaactggagcagctcaacattgaacccttcgttgggctttttcatgatgctatctcaccagcagagcagaaggacttgttacatctcacggattctaggttagagcacaggaaaaaagatagttccagtgtagaggccaaagtggacacaaatgcctctgatcatgtgagacgaatacaccaaaggattgaggatattacaggattcgatttggaggaaagcgaaccactgaccgtttctaactatggcattggaggtcaggatttcatccacttggactgcgagcagcccaaactcagtgatgttcaaatgggtggctatgcctcttttccggatctgggctttggctttaagccccgtcggggatcggccttggtttggcataatactgacaactccggcaattgtgatacccgaagcttgcaggccacctgcccggtgctccttggaaatcaatggggtaagtcgttaaagcagcccatcgattcttctctcttctacttaccgttcaccatccggaaaacagtggccaaaaagtggatcagtgggtcaggccagtggcgcaggaagtcgtgtcggaagtaa

SEQ ID NO: 1887 - protein, 377 aa, DROSOPHILA
MTRRALGPADPTSYVANPLISFPLMRRTYTDVPKLLELAREEFKPGNSRMSAADCLAVATHLENVDKGKLACKWFKVAIDQYEEKLDPVNRLLQTGRSQIYEKLGLTLLAMHDLPASQAAFRDSIGWASKEDNTDLAKHLKDKLAHMFVHVDNCRGKNLLPSKSYLRCRYLRDGSPFLRMAPVKLEQLNIEPFVGLFHDAISPAEQKDLLHLTDSRLEHRKKDSSSVEAKVDTNASDHVRRIHQRIEDITGFDLEESEPLTVSNYGIGGQDFIHLDCEQPKLSDVQMGGYASFPDLGFGFKPRRGSALVWHNTDNSGNCDTRSLQATCPVLLGNQWGKSLKQPIDSSLFYLPFTIRKTVAKKWISGSGQWRRKSCRK

SEQ ID NO: 1888 - DNA, 3707 bp, DROSOPHILA
cgattgctacaaagaaaaaccttatcgctcacagctgatgcatttcgcgccatttgttgtactttattttggttttaacgacgcacgactggaatttcagtctattgttaataactacaatgactaccttaatagaacagttaattacgaaaatgggcctaagggaggagccaaacgtgctagagtaagcgataaataaatagttttaaaggtttacccagtaagatcgaatcctttcaggaaaaccaccgaactagtacgcctcctggaactgcgctccacgaatgtccctctgcagatcaacgagtacggaaagatagtgctgtgtgcggatctcgcttcctgcatgattgggatcgctttcgacaaggagcaggcactgaaattgtcaggattgcgaaagagccaatacctcaacaacaagcggatgttcgagaagctactggacctaaacaaactggctagcgtgaatgacatctgtgtccagctgggtctcaacgaagttgcccgcaaggcggaagagctaatgactctcttcaagggcgtagcggccaccgaggacatgggtaccgacaccagccatcctcagtacgccaccatggccgtgttccaggcctgccgcctgctcaaaaagaaggtttcgaaatcaaagctcatgcccttcagtaatttgcgaccctcccagtttcaactgctcgagcagcagtgggaacgcatgatagctaagcaccacaaggagagcaaagtaccatctagcaccgatatggagggtaaacttaaggagaaccagaatgagaatatcaagggtcatgaggcaaaaaaggcacataagcccccaccggaggactacgaaatatggaaggcgcgaatgttggccaaggcgcaggccaaattgaaggaattagaagcatcccaatcgcatatggatagccagcttctcgaggcttaggcatttatattttacatctttaaacatttcctagtgaaatccagtttgaattaattacttattatataacttatttattaaactgaacattcttattagttttaagtaaaacaaagagcgcattacaattaaaatttgcatcaattttcagagatattaatatgcccaagggacaactgaaacaactggtgtttgtgtggctaactggcgatgtgtttcgcgataaaatggttagggctgaaaacaggataacatcaatatcataaggaatcattatcatcaatcaatcattaataatcattatcatctatgaatcatttatataccatctcggcccactcacctttatagtcttttgtttgtgtttaatcacaaacaattttatgaatctatgaaactagaataatttggtattactacaatatatagatatatattattaaaaaacgtaatctttggaatcgtttttgatttcaagtcttagttggaaatttcgtcaatagttttggttttgttttgcatatgagctacaagcaattcgccaacatccaccaggttgcccttgctatcatgggctaaaaagaaaatagttatactctagtctacgaacatttcgttttcaagtagtttacaaaaccgttagaagagttgtcaacctacagttatagatgatgagctctacaaggtctcgagtctccggccaagtagtaataagttctttcaggtgcttgtagaacttgatccagatctctcgctttagttcctgcatctgccaggtacccgacaagttagagtacgtcgcatcgaagaaggatatcatgggcgtggcaccctcgacggcaaagtaataggtcctgccattgacctttttgttcattctgtagacatcgtgcttgaaaggacgatagacaccggctcggttgatgaactgggtctccaggggctagaaaacaaaatgctgtatttattgagcaaactttgttagcaattaccagttacctcagctttgtcaagtaagtggctttctagtacgccgttgacaaacatctcatcgggaatgaggataaccagtcgtttaatgccgaaggtaacattattcttgtcctgcgaaatacatttatgttgcttctgtgcacaaaaaaagagatcaactcacctcgtacattgctaatcgatgtttgagcccatcatccttgcgttcgggcagtgaaagtttgaggtagccgtgaaagtagttggaggccattccggccgcatagtctagtccatgggagtcacgtatccagtgcgagtagctcagggtgctttggtccatatcggtaaagctccatatccagtagagcggcatttggaacagaaacagcgtcgtgggcattacgttcctgtaattcccggtaaccgaaattcgaaaaaaagctacgagaaggaatcccacaatcaggtatatcgatctgttgttatacgtgcacgagcgccgcaggattatccacagccgatcctcgggcaaatagtaccgcccattgctcccatattcgacgacacagcggtacaagcgaaggagcagatcagccaagaacacggtggctacaatgcgaatagaggtgtctgcaacgaatcacgaccgtaaagataatttatggcgtccatcggtcatcactcaccaatataatctcctatcatctttcgaaaataaaaatattttctgcctttttccgcgcgaaccgcgttccccgcttcgacaacgttgctagcgattgccatttcgtctgcatacatatgtacgtctcaagggttgccagatcgatttggagatctcgcgaaaacttcgctggaatttcaaatgccgttaaattatatataaatttgtttattgggcttgcataggtatacataactgaatttgggctcctaaatattaattacattgcgtgcacatacaaatgcacatatttatgtatgacggaagcaatgaaggaactacattgttatatctttttattattatttacttttgtgtttgtttatcaggtatcagataagattttatcaatatagcctcaaagattcgttaatcaatttgtattcgaaataaaactttaggtaacaatgtccggttccgactatcagatacatatacagacatgaaatctgctgactgtaaagctctccgccctctggaacaaatattcgtgagagccggagccagctctagactcctcccaaaaacgcatattgttattctagtgtctttggtaagagggtatactagattcgttgaaaagtaagtaacaggtagaaggaagcgttcccggccatgtaaagtatatatattcttaatcaagatcaaaataataaaaaataacaaagataattaaacattaacaatggttaaccaattggtggttaattaaccatcaacaatggttaaccattacgctcttactctgcaacttaaatactgatagctacaccctaaacgaattataagatttgataaatgatcttatttaagcatgcttattgtgttctaatattaaattctatagaaaccttatcctgtaaaaggctcaaaaaagtgcaatcgtgccatatttgtggccagaataaatgagaattctaagtcttttaaaataagtaattttaaatcgaatatttcggcagcatatgcgcatattgaaactacgtatattgtatcttgcgtgtgtacatagtttaagttattacctgcggttttttctgtcaaaacgaatggatccag

SEQ ID NO: 1889 - DNA, 1352 bp, DROSOPHILA
gcaatcgctagcaacgttgtcgaagcggggaacgcggttcgcgcggaaaaaggcagaaaatatttttattttcgaaagatgataggagattatattgacacctctattcgcattgtagccaccgtgttcttggctgatctgctccttcgcttgtaccgctgtgtcgtcgaatatgggagcaatgggcggtactatttgcccgaggatcggctgtggataatcctgcggcgctcgtgcacgtataacaacagatcgatatacctgattgtgggattccttctcgtagctttttttcgaatttcggttaccgggaattacaggaacgtaatgcccacgacgctgtttctgttccaaatgccgctctactggatatggagctttaccgatatggaccaaagcaccctgagctactcgcactggatacgtgactcccatggactagactatgcggccggaatggcctccaactactttcacggctacctcaaactttcactgcccgaacgcaaggatgatgggctcaaacatcgattagcaatgtacgaggacaagaataatgttaccttcggcattaaacgactggttatcctcattcccgatgagatgtttgtcaacggcgtactagaaagccacttacttgacaaagctgagcccctggagacccagttcatcaaccgagccggtgtctatcgtcctttcaagcacgatgtctacagaatgaacaaaaaggtcaatggcaggacctattactttgccgtcgagggtgccacgcccatgatatccttcttcgatgcgacgtactctaacttgtcgggtacctggcagatgcaggaactaaagcgagagatctggatcaagttctacaagcacctgaaagaacttattactacttggccggagactcgagaccttgtagagctcatcatctataactcccatgatagcaagggcaacctggtggatgttggcgaattgcttgtagctcatatgcaaaacaaaaccaaaactattgacgaaatttccaactaagacttgaaatcaaaaacgattccaaagattacgttttttaataatatatatctatatattgtagtaataccaaattattctagtttcatagattcataaaattgtttgtgattaaacacaaacaaaagactataaagccctaaccattttatcgcgaaacacatcgccagttagccacacaaacaccagttgtttcagttgtcccttgggcatattaatatctctgaaaattgatgcaaattttaattgtaatgcgctctttgttttacttaaaactaataagaatgttcagtttaataaataagttatataataagtaatta

SEQ ID NO: 1890 - protein, 316 aa, DROSOPHILA
MIGDYIDTSIRIVATVFLADLLLRLYRCVVEYGSNGRYYLPEDRLWIILRRSCTYNNRSIYLIVGFLLVAFFRISVTGNYRNVMPTTLFLFQMPLYWIWSFTDMDQSTLSYSHWIRDSHGLDYAAGMASNYFHGYLKLSLPERKDDGLKHRLAMYEDKNNVTFGIKRLVILIPDEMFVNGVLESHLLDKAEPLETQFINRAGVYRPFKHDVYRMNKKVNGRTYYFAVEGATPMISFFDATYSNLSGTWQMQELKREIWIKFYKHLKELITTWPETRDLVELIIYNSHDSKGNLVDVGELLVAHMQNKTKTIDEISN

SEQ ID NO: 1891 - DNA, 11426 bp, DROSOPHILA
accaatagcaacaacaactacagtgagtgtgaagaagaaacgaaaataggtgtctcaatttttttcctcgccctgctgttttttctgtttcgtacattttttgtgcagttctgtttttttttttgtcctaaaacggtttattacacgcacacacactgttgaatttcgcgaaaagagaaaaacgaaaatcttggccggcttttcttctcctatcacttctccatcgccctggaaaacgtgcatgtgtttgagtgtgagtgtgcgcgagagtcaacaataaaaatcaatttagataaactgacctacttcccactaaactcgctaaacgcaacagttggcaaccctgctatgcttgccgctaattagccaaacacgttttttccagtaaaaaaaatatatataacggttcaccgatatgtatcgatagtctgtcccgagatcgattgcgctgcattctatctatgtgagtgagtcatttaaaaaggaggcgggaaaggaaaaaatataaaacaccaaaaaaaaagaacacgccgcgcattcagaagaaatcaagaaaaaaaacgagaagaaggaaaagaacagaaagaataaaccaaaatcatatcagcaacagcagcagttttttttttgcccctacttccacacagttttttgtgtgtgattaacaagtgagcgcgtggatcgggaaagtgagacggaagatggtgggaggcgtaacaggagaagtgggaggagagcgacggagagtgagagtgagcgagcgccccaatctcccttccgccgctttcggtgcgtgtgtgtgcgtgttatatttgtcataaacgtgctcctccatctcttcctcttgtttttgccttagttttattttgcgaattgttcgaatagacaaaatcgaaaaagttcatacatacgaaggcagaacaaaaaaacaaccagaaaaaaccaatgccaaattgtgtgaacggttaaaaaaacagcgggaggtgagaaaatcgcaaaaataataaaaccgagagaatagatcgcctttttagagataagagtaaagttttgcttttgcactgcaaacacaaaaaacaacgacagtaagaaagaaactcaacagtcggccagctcaaacaatcaaacacaaaatgcacagcaacaataatagcagcagactcaacaacaacataagcaacaattattatcaacaaaaacaatcgcttatacgctatttggatcggtgagtttaaaagcgtgtaaaccattgcaccccccccccccccaaaaaaaaaatacccacatttccatggtaaacactaaatactttaagcggctcaaataccacacttttgaaccactgtgcgcatatgtgtacttcaatttcaatcatgcccagcaaaaggtgcgaatccatcaaagtcatatgttgcgtatctagatcacatttataagactcccaaacacgaaccccccaccccctcctctttcgtcacacacaatctgcagatctggatttatctggcacacacataagatttattgatcatcactctttctccattaagttaaactggaagaaagttgtcttcattttgtcgttcaaccttaatttactgaaacatttcgattattgggttggtatacagttataacaatcgtatgtagtaattttgtatatttgcaagagtttgtttttgttgcagatggtttcagctatgaaagctcaactgtaagtctctagcgattgataagatatggcctaatttatttatttaggtgtttaaatgccaaagtgggaagcgcaactttgttaacattattttcatgttgaattttttcttttgaaaatatatgctgaaaagctgtttttcgattttcaaatgggtatgcaacataatacgacttcattttcgctttgtttgtttattttctcttattggctggtcacaatgtatatggctgggccacgcccaccgttgcactcggctttcgaccaaccagcctccgcgccccttcatctttttattttttgaccaccctttgtcgttttgtttatgtttgcatgatgatggtaatcgtcaaagcacaaataaaccaacaaacaacgaaataaatggcaattgtacccatgcagtaggaagtggagcaaatttgtcatggatacgaatgtttattatacaattacggcaaaagtaataacacaaaaatgtcaaaatacgtgatttctaaagtttttattttttatgagtcacgaaagcgctctgagtttgattcaaataatctccaatctgagctaaaacattttgagtgtaaatgttgttcatattgtggtgtgggatgctaattttgtgaccgaatctgtattcccatgtgttgcattgtgtaaaatcgccatgccaaactgatggtgacagattcgcgatgtttgcatcgggaggcgttttgtttgtcaagtgatgggcttcactgtgggtgttgcatttgccacttggtggaaaagcgttggacaaggggtagatgttggggggtggtccccacactactgttcaccaatttaggtcaaaccagccagcaacaatgcaatcgttgtgcttttcgctgctatattcgttgcaccacttgggttttcctaccctctttcacttcttttcctatttgttccttcctttgacggaaatacctcttacactaaaactatatgatattttttataatattttatgttctggagcatgtttatatggtagctgaaagtctgattttaagcatatcaaataaattatttatatatttatatgctattgaaatgattaatatccgttttaaagcgatgtgtgtaatattccctaattcatcatattgccatatgtttttctttctgtgcagctgtaagctgaaaacaagtttttcttttccatatgttgacaaaacaaattcctttggcactttattttttcctattttcaccatggtcgtttcaaagaaatgatggagggggaaatgcatagataagcttggcaaaagaaaatgcaagaaaactaaccttagtctatgcgatcgcaaatgtgtgtgtttgtttttcccgacaagcagcaacttgtggaatgtgtcatgaaaatagaacaacaactactcacataaatgcatatgctacaaaacgtacatcacactcccatgcatatatacatatgtgtgtggcacatgcgtcattcagtgcagtttaaataccaagcattcatttattcatgagacaaaaataaagttgcaatcaaaaagaacggaacaaaatcagccagcagatttccgattttttcattcataaaaattatacaaaaaagaatgaaagaaaaacaaagagcatgggatgaaggcaaccacacaacgcattacacacacacacacacacacacacacacacacacacacacacacacatgtccacgcaatgcaatgtgtgtactgataaagcagcatctgtgggtgattgcatgagtgtgtgtactagtgggagtgcacagtgcaccgcctttttatatgagagagataaaagctaaaagaagaaaagaaaacataccaaaaataaatacgcgagggcgccgcatggcgtacacaaccatacatacaaagtatattgattggatttggcggtgtatacatcttttgtgtgcatgtgctacagccgtgttaaaaaaaatagtgacaactacagccttatcggttgcgtatgattgtatttaaaactaggttcatattacccttttagataaaaatcggataaataaactttctatttaattgttttgtttgaccttttttatcgaactctaatatatagataattattaattaaattaattattagtattaattaattttccattaaagtgctagcgataattgcaaaatacctatatttccgcacgcaactgtttcgcattaaggtcgctctttgataacaaaactaaaaaaaacggcaagaaagccttaccaggtgtgcgcgtgtgtttgtgtgattgcgccagaggtcatttgcttagaatcggtcacatgtcaggtaaaagaaacaacattcacacatacacatgtgtgcacacctggttatatgaaaacaaccacggcataaaacaaaaacaaaaatgtaaaattgttgcactgactagtgcctaatgagtgtgagtgggacagaggcagggcgccgtagtgaagagtgataagcgggagcgggagaaaacgatgcgctctcctctcttattggatgcagccggtgtactagacgcagaaaaacgaacaacaacaacataacgcaacgtcaacgaactgcaacttgtcatttgcattgaaaagagcaacaaaaataacaacaaaccacataggcagatgttgtgacgcatgctcagcaattacagttagccgacacagtttgacagccactggatggaaggaatgggaatatcgaagtgcaagattttcagttcagtaacatgaaaaagacgaagaaggcgacgagaagaaatagcaaacggtggcaaaatgtacacgtttcgcatgcgcttcctggaaaaagcgcaacagcgcccagtcgagaaatcgcctgagaaatgtgctggcataaacgaataaaaacaaaaatgaaaaaaccggtcaaagctaagcgggagtgcagggagtgtggagaaaatagcaaacaactcttgtgaatggcaaacgggattggaatgctggaatgtcggaatgcgaatgcatctttcacctatgtatgctctctcgcgtgctctctcttcactctgctcaagtcgtaatttacagttactaagagcagatgatcgctatgttaatttatatacagccaaactaacgaacaagcatttgttaacttacatttatttgtcttgatttttgggcgtcctcattttgtttgtcgcactaattttttgaacacagctgtacatagttggacattcctgcattcggcttgacagctaattagggatcattcatgaaaacggagttaaagccacgagcaaagtgtgtgagaaccgaaaaaatgtaaactgttaattaagaaaagtgccagactcactaaagcaaacgattttacgcagggggaagaacgagaaacgaaatgagccagctccacgcgtcttctcttcttttttcaattttttctcgtctcgtcttgttggctcttctctcttctatcccgtcttattctctttttcccccactttcttgccccattgttgttgtttctatgtgtgttttttttttgttatcctgttggcgacgggagagaaatcacttccaagaaaaataaacacgatattaaatgtgcaacattccaggcgtcgttggcgtttgccctcaccgtcgtcttcctctctcgttcttatttttattttactcttctttttttggactcttcggagatcaacaacaacgggagacaatgttaaaatctaaaatcggaattgaaaaatttcaataatcttcaacttatttatgttacttataacattacagtatagactgtaaatttaaattaataattgtaataatatcgtaaaccccaataatatgcataccctcttatttctgtgtaaacaaattgcttggtcatttgcttttgctctttcccattattattacaattgaatctataaaaatcagacattcttaaaacaccacctatctatgaaattttttttaaagtaagcaattgaattttctgcgggtaggagtatcacattggcagatgaaatgaatagtatttctcttaattttatgcactccatcacaattatgatccttgtgccctgcttcggattttaatatattcattattgcacagcattattgcaaaaacgcatacagcgtcaagatatttgcattcttaacttctgttttgcatctgttggcctaacttcccatcccaaaaatacccactgccatcctaatgatattcatatacatatatgtaaattcgaacccaaatcatttgtaatctcgctcgctaaaaaaaaaactccttaaatgctagttcgctgcttgatctcgctctgtctttgcgttcatctttatctgtattctctcagtgctgccagaatacgggtgaagaatctaaaaattataacgaaatattattcaagctacaaacagtcttcatagttctagacggggttttgttctgcaagatttttgactgatattagagatttttcgaactattttcgcttcaattctggcaccacttgtttagctactcgacattgctctctttaaccgactgctttctcctaactactgctactactactactactactactactaccaccacaactacttacaacttttctttattcgcgcatatattttcttatctaattcattttcccattttccgcccaactcacccacttgcgtccccctcctctcttgtttttggacttctactatcatcactaccactgccactgccactgccacttacttctacttactacaactactactatttttgtttcttttgtgtttgtttgtttttcttgttcttgtgtgtttttacgctattttcttcacagtgttacgacatcaaaaatcttaataagcggcataccgatgcaaacacgtttcgaagacatcgaaccgctactgaagccctatggcatcgtcaaacagtgtgaggctatttctagtaaggatcaaaatactcaaacagtacatataacattcgaaaatcctgagcaggcgcaaaggtatatactcaaaactactcatctaaaactactactattcacctaaattcaatctcttttaaggggatttgcagatctctcatgaaaaaccattgatttctatgaggttttccatgggagtcttgttttgggcttagatatacataggtagttgcatatcgttgcattgggcggggatgcgaagatttggggggctatatttattgggatctgtgcaggatggatgcgttgtgtgtggcttaattacctatgtacctacctacctatattcccatatttagttgtttcttccatcatctaaattggccatggttattccaaattttgatcaagattttgccaaaaaccattattatgtgaaatgaacttttattgattcacatggaatttgtttgcagtcagttctcaaattaaattaaatgtgaaggaacatgatacacctggataaattcatgtaaatacaatttcattaaactaaactttgctgatttcataccatttccatgaatgtcttttaattggatcgctagccaagtgtttaaaaggtgcagacatgcatatttttgtaaactgaattttaaccgaattgctgcatgccttcaccaacatgtgtatactttattggagtatgagacatggcaaatctagataggatattagctgaaatttttcatagaacattgcattgcagctgagttggtggcgaaacatacatgactaatcaattattctcccaacaattccttcgcccacacagagctgctgttggtctgaacggtgtcgagttcgagggcagcaagctgcatgccgagcagctggacaagaaccagcggcgtagccagcgtaaccagcgcaatccgtatccgggtatgcccggtcccggacgccaggcggactttccgctgcgcattcttgtgcagagcgaaatggtgggcgccatcattggtcgacagggcagcaccatcaggacgatcacacaacagagccgtgctcgcgtcgacgtccatcgtaaggagaatgttggatcgctggagaaatcgattacgatctatggcaatccggagaactgcaccaacgcctgtaagcgcatcctggaagttatgcagcaggaggccatctctacgaataaggggtaagttgctgtagcttctaaacgatattatcaaatattaatataactaatagtgaactctccccggaatgcagtgaaatttgcctcaaaatactcgcccacaacaatttgattggacgaatcattggcaagtcgggcaataccattaaacggatcatgcaggacaccgatacgaagatcactgtcagctctatcaacgacatcaacagcttcaatttggagcgaatcattacggtcaagggattaattgagaacatgtcgcgtgctgagaaccaaattagcaccaagctgcgccagagctacgagaacgatctgcaggcgatggcgccgcagagcctcatgttccccggtctccatccgatggcaatgatgtcgacaccgggcaacggcatggtcttcaatacgagcatgccgttcccctcgtgtcaaagctttgccatgtccaagactccggctagtgtggtgccaccggtcttccccaatgacctacaggaaaccacctatctctacatacccaacaacgctgtcggcgccattatcggcaccaggggctcgcatatccgaagcataatgcgcttctcgaacgcatcccttaaaatagcccccctcgacgccgacaagccgctggaccaacaaacggagcgcaaggtgacgattgttggcacaccggagggtcagtggaaggcgcagtacatgatcttcgagaagatgcgcgaagaaggcttcatgtgtggcacggacgatgtgcgcctcacggttgagttgcttgtggccagctctcaggtaagtttaaattttttcgatttttaatgagatagctctttttccgtttaatattgtttcaatatagtttcacttacatggttatttagtttacaacggatggttattaaggaatctttgaaccatcagaatcagacctgattaattctaacttttctaattgccaatccaggtgggccgtatcattggcaagggtggccaaaatgtgcgagaattgcagcgcgtgacgggcagtgtgatcaaattgcccgaacatgcccttgcaccgccatccggtggagatgaagagacaccagtgcacatcatcggactattctacagtgtacaggtaagtgtccaaatgcgtactactgcatgttcttcaacgcaagctaacgccacgattactctcattacagtctgcccagcgacgcatccgagccatgatgctttcgacaaatccgccgccaataaccaaaaaacagaaagctgccaaagaacaattgcaacaacagcaacagagcctagccggagccgcgtccagcggttcccagcagcaacagccacagtcgccatctcaacaacaggcactgccgccgcaattgcatcatcagcctgtgtcgtcggcgtcgtcatcgtcgacgccgcctgcacaccatcagcagcaggcgtcgacggcagcgacctcacaccagctgcagcagcagcagccatcgccgccgccacctggcaatgcaactgcggccgcagctcagcagcagcagcagctggcgagctcacaacagtaaggaggaatcaccgttaaaggagagccggcgccgcagcagcagcagcagaagcagcaaaagcagcagcagcagcaacatcagcagcagcagcagcagcagcagcgaaagcgccaaaaatagccaaggcagggttttctactgttgatactacctccacagcacacccataagattcaataccccaagacccaaaagcacccaccacaatttacaaccctatataactacaagctaaccgtaggcgccacctttgtgctggcacaggcgacggcaaaagtaagcaagcaacctggagcagtaacataagcaaaattttacgcatatagaactgtaggggaaccaccacatcaaaaagtgagctgcgtgaagagctctactagttcatagcagtgtatttcgactttaacaagatcaacataaaacagcagtcacacagcaagaataacaataacataacattcttcatttgcatactaagaaataaagagaaaaagttaatagaaagcagcgcgctatcgttcatagaaaccactaaaaacaaaaccccgcccaaaaatcgaaactttgtgttgttgttctgctagttgtaaacttttgcgtcagctgagaattcggtaccgcctaaactgttgtgaacgttttcaaggcagtaggagtaaaaccttaaatattcataatttgtacaagtaaaccatatattcaacaacaacaacacaaagagtcaaagtaactaaagagaaaaccccttaaactaacactaaatttgattgcaaaaaggggaaataatggataatgaaggaaagtttagtagtgtatgcgttatattttttttaaatatatttaactataaaacgtttatttttaattattttttttaacaaagatttagtaagcttacatttaagtggaatgaatagaagagaagtgagcaaagcgtaagagaatgagattgagaatcaatttaaaacaaaaaaaaaataagtagggacaaccatttcgttgatcccaaaactaccgagaattacacaagaagaaaaagtacacaagcgaaaataagaatcaagaaatattcaaaaaaaaaaaaaaagaaaaacaacaacaatacaaacatacatacatggaaaacaacaaaagcgtcagaaaacacaaaaacatacatattttgagcccacatccgcaacatcaaatgtgaagaaagtttcaaaagaagctctcatctttgggccataagaagaatgtgtataacagttgataatgttatgtgtacaatgtgcaacagttgatgcaactgttggcgccccgctatcgttatacatagtataacagacctcaaccgaaaacccaaaccaccaaaaagaaacaactatctatgtatacaatatcgttaagagctatactgatggatcagtgtgtatattgggactatatattgatagaaagggatatggatggatggaacaagaaacgccagcgagagcaatgtttactgtactgtacagttgtaaaatagttttttgcgatgcctgaaacgttgtttgtataaatgaatggatacgaaaatcagtcccttattatgcgatggaaagagttacatgaaaaattgttgaattatacttagtgcagaagcagccgaaagagaagaaagcaaatgacggagagtggataggaacgctacagcaaatgcaaagagcgagagatagtgttaaaggaactattgtaatgtgtttgccttgaaatgaaaacaaaactaactagaaatgaaatgacggtgctgaaatgttaattttttttaatcgatcgttaacgttaagtgttacgttataacgtttgagcgtgtatgagagacaagctgttatacatggatgggacactgcactacatacatactaaatgcaagaacataaaccagccaatccgtacccaaaacaaagtctaaactgatagccacaaccaagcaatcaaaacagaaggatgcatttcgtagagattgtaatcgtagcgtaa

SEQ ID NO: 1892 - DNA, 2230 bp, DROSOPHILA
ataataaaaccgagagaatagatcgcctttttagagataagagtaaagttttgcttttgcactgcaaacacaaaaaacaacgacagtaagaaagaaactcaacagtcggccagctcaaacaatcaaacacaaaatgcacagcaacaataatagcagcagactcaacaacaacataagcaacaattattatcaacaaaaacaatcgcttatacgctatttggatcgagctgctgttggtctgaacggtgtcgagttcgagggcagcaagctgcatgccgagcagctggacaagaaccagcggcgtagccagcgtaaccagcgcaatccgtatccgggtatgcccggtcccggacgccaggcggactttccgctgcgcattcttgtgcagagcgaaatggtgggcgccatcattggtcgacagggcagcaccatcaggacgatcacacaacagagccgtgctcgcgtcgacgtccatcgtaaggagaatgttggatcgctggagaaatcgattacgatctatggcaatccggagaactgcaccaacgcctgtaagcgcatcctggaagttatgcagcaggaggccatctctacgaataagggtgaactctccccggaatgcagtgaaatttgcctcaaaatactcgcccacaacaatttgattggacgaatcattggcaagtcgggcaataccattaaacggatcatgcaggacaccgatacgaagatcactgtcagctctatcaacgacatcaacagcttcaatttggagcgaatcattacggtcaagggattaattgagaacatgtcgcgtgctgagaaccaaattagcaccaagctgcgccagagctacgagaacgatctgcaggcgatggcgccgcagagcctcatgttccccggtctccatccgatggcaatgatgtcgacaccgggcaacggcatggtcttcaatacgagcatgccgttcccctcgtgtcaaagctttgccatgtccaagactccggctagtgtggtgccaccggtcttccccaatgacctacaggaaaccacctatctctacatacccaacaacgctgtcggcgccattatcggcaccaggggctcgcatatccgaagcataatgcgcttctcgaacgcatcccttaaaatagcccccctcgacgccgacaagccgctggaccaacaaacggagcgcaaggtgacgattgttggcacaccggagggtcagtggaaggcgcagtacatgatcttcgagaagatgcgcgaagaaggcttcatgtgtggcacggacgatgtgcgcctcacggttgagttgcttgtggccagctctcaggtgggccgtatcattggcaagggtggccaaaatgtgcgagaattgcagcgcgtgacgggcagtgtgatcaaattgcccgaacatgcccttgcaccgccatccggtggagatgaagagacaccagtgcacatcatcggactattctacagtgtacagtctgcccagcgacgcatccgagccatgatgctttcgacaaatccgccgccaataaccaaaaaacagaaagctgccaaagaacaattgcaacaacagcaacagagcctagccggagccgcgtccagcggttcccagcagcaacagccacagtcgccatctcaacaacaggcactgccgccgcaattgcatcatcagcctgtgtcgtcggcgtcgtcatcaaataaagagaaaaagttaatagaaagcagcgcgctatcgttcatagaaaccactaaaaacaaaaccccgcccaaaaatcgaaactttgtgttgttgttctgctagttgtaaacttttgcgtcagctgagaattcggtaccgcctaaactgttgtgaacgttttcaaggcagtaggagtaaaaccttaaatattcataatttgtacaagtaaaccatatattcaacaacaacaacacaaagagtcaaagtaactaaagagaaaaccccttaaactaacactaaatttgattgcaaaaaggggaaataatggataatgaaggaaagtttagtagtgtatgcgttatattttttttaaatatatttaactataaaacgtttatttttaattattttttttaacaaagatttagtaagcttacatttaagtggaatgaatagaagagaagtgagcaaagcgtaagagaatgagattgagaatcaatttaaaacaaaaaaaaaataagtagggacaaccatttcgttgat

SEQ ID NO: 1893 - protein, 558 aa, DROSOPHILA
MHSNNNSSRLNNNISNNYYQQKQSLIRYLDRAAVGLNGVEFEGSKLHAEQLDKNQRRSQRNQRNPYPGMPGPGRQADFPLRILVQSEMVGAIIGRQGSTIRTITQQSRARVDVHRKENVGSLEKSITIYGNPENCTNACKRILEVMQQEAISTNKGELSPECSEICLKILAHNNLIGRIIGKSGNTIKRIMQDTDTKITVSSINDINSFNLERIITVKGLIENMSRAENQISTKLRQSYENDLQAMAPQSLMFPGLHPMAMMSTPGNGMVFNTSMPFPSCQSFAMSKTPASVVPPVFPNDLQETTYLYIPNNAVGAIIGTRGSHIRSIMRFSNASLKIAPLDADKPLDQQTERKVTIVGTPEGQWKAQYMIFEKMREEGFMCGTDDVRLTVELLVASSQVGRIIGKGGQNVRELQRVTGSVIKLPEHALAPPSGGDEETPVHIIGLFYSVQSAQRRIRAMMLSTNPPPITKKQKAAKEQLQQQQQSLAGAASSGSQQQQPQSPSQQQALPPQLHHQPVSSASSSNKEKKLIESSALSFIETTKNKTPPKNRNFVLLFC

SEQ ID NO: 1894 - DNA, 20990 bp, DROSOPHILA
tttcgaccacaaaccaaggctgaaccacaaaatatggcccaatgatagtctcttatcacgcctttccttcgctaaaaagaacacatgtcatttggaatccttgttttctttgcgctagcaacaacacacagtttttaattaacactttttgcgataatagcagatttgataagcatgttaagtatcagttttaaagtagattctctgattttcatctctaatatccaaaatgtatctatatgaatacaattttccataagtgcgttttaaatacatgtatgttaaattttaaataaaataataaaaaaaaaaacacaacttatttattttctcatgaaaatctaatcatatccagctcctaaatattttcgaaatttcccggctgaacaagagcgccgctcttaagtcgtcacgctctcagctgattaaagagagcgcgcttaaatgcgattccaattggaagtggttgcagccggtggtggatgaaaatgtgtccaccaatggcgcgcctcaaatgccatgtccacctgaccaatcagaatccgggggcggtgccaagtgcaagggaaacgcaggagcgagcgagagggagagcaactgtttatttgattaagcatttaaattctattatttttagcgaaatttattaaaaatttgatgcaacagcactgcgtggaatggtgacttgtcacaatgcacatactaggccatgcatttacagaagagcaagagagagagagagagagagagagcgagcaacttaagagacccaaaacgccccggccaaagagagtcgttctcgttccaattggctcgcgaggcaagtggaaaaacgattggattcgactcagagccgagctcaatcgtctcgcgaaattcaagcggcgcagtcaaaagttaaaagtcagtttcagttatgttttggagtacgacgcgcgagcattattgtttccattgttagcgaagtttttaatcgactgaaagaaacacaagaaaataacacctcgcttacgtgttaaccctttttttttgtaacttgtgcttaagtcacttaaagaaataccgaagaaagtaaactaagtgtgtgtgtaagtgttaaacaaagtagtaaacaaaaagcgcgccaaaatcggctaacttttagttattaactcgaatttcgtcaccaactaaatttaaacaaaagagcgacacagtttcgccagaaacttgcattcaaacatattgttaaacagttttacattaaactaaacacaaaccaaagtgctattaagtgcagttagtaacaaaataaaagtgataaatggtgacacaaacgaattaaggcaatgtttttatgacaaaaacttaagttcatattttttaaggctttattttgcgactgtgaaataatttgtttactttgttgcttgttctcaaacaaataatatacaatagtaattgtaaaagcttcttatacattgtttgaataaacaaataactgactcttttacaaccatttatgattacttgggagatcagttgtgaacattaaatgtttatattgtactatattgtttttacaccgattcccagaaatatcatcaaagttaaactcgagaaaaggaggcccgtctgcgaatcgggagtcaaacatagagtattactaattagccgagtgaagtgcaaacaataaaaatatccaaatcaaacgaaatcaaatttaattaagttcagaaatcatctggcaaaagcatgctcaaaaaagagaaagaaaaaacaacaatagcaacaaatgcaccgctaattcctgtgactaatttatcaaagtgcgaactagcaaaatgtcgatcgtcgtagtactcgcagttatttaatatgtattcagaaaggcaaacatatttttaatcattttttaaatttatatatattgttttttgcaattatttctttatttaaacgtacgccagtgaactgtttctatatgtactttaattaaattgcttaatatgaaacaaatttgagatgttgtcatggattgtttttaatgaatcgatcggcattttaagttttcaattaaacacgaatctttctcatatcgtaagtgcaattgcaaacaattgttaagtacgcttttttttttctgtgaattcgtttagagattagagtttattgatgagtgaacaaaagacaccgccggagcgaagtgtgataagcgcttgacctgcgacccgcacacactgcaagaaaaaaaggggcaagcgagcggatcaaaggtcaccgccgtcgacgaatgcatttgcatctcctggcggcagagaagacgcctccatctccatctccaaatccaactccaactccatcagcatctccatctgggcatacgggcgctgctggggagtcgcaattggacttggcatcgcaaacggaatcgcaattgcagctgggcttgccattggcttccggatacggactcggactcggattgggactgggcttgggattgggactgggccaggaattggtggcggaccacagcaccactgtggcgcccgtcagcgttgccggtcccggccgcctgggtcgcagcatcaacggcagcggcggcagccaccaccatcaccacctgcaccaccactactcaccgtaccaccacgcccacccctaccacccaccgcatccgcacgcgccccaccaccaccaccaccaccacccaccgtatccgtatccgccggcaggaccacatccgccggccatggtcacatcgtcatccacatcgccgacgggcaacggctggagcagctccaccggcgacttcaagggcatcacagcggtggcgacggccactggcggcggcgtaggtggtgccacccagggcgccactgcatccacgggcgccacagccgctgaggttttggccgtttcgagtagtgccagtgttggcagcagctcgcccacaggtggcgccagcaatggtacagcccatagtgggcatagtggacacaccggcggtcacagcagtagtaccgccagcaacaacaacaacaacggtgccagcaatagcaatagcaacaataacaacgccgttcaccaggatctattgtggatggagcgattggtacagaagcgacaacaggaacatcccggcgaattgggtgagttgttggtgggatattaccaataacctagtagtaacacagtctgcaaaagggttaaggattaatagctaccttaatgtccttcaaaatcaaagtgaatatgaagatatagtctaactggatttgtaatttcccgtgaacaaaattgattgaacagagggatttagcttactaactgtaaatagcaaattctttgctaccagattcccaatatgatctatggttcttgatataatatatcttatgaatataagattgatagatagatatatatatcaaggcaagcctctgcggagacagctcttccattcacaaggtatcagcatctttagctcgtgtcgaggggatctggtggatgctttgcaggtctgttcgataatccgatccccgaaaggtggagcgcacattcttgccacatccttgcacaatgcacttctggggcttccacatcgtggcaatcacgatcatcggacgcagccttatcggattccatgggtatgatgatcgtgatgatgataccgatggcgatgatgatggtgatgccagtgaagatgggactggcatcgccgtcggaatatgcgtaaattgatatcaataattgttattgatatcaacgcacgagtcgttccccttttttattttgttaatgccaccttttttttttttttcttattccttgctgcccgttgaactttcctcccgatttatcaatgatatcaatgacccagagcgaaagctgctaatgaaatctcagctcatcgcaccgtcagtcttgaaattagctggggaatccgcaaactggttatcctatatgattttttttttcacttctgagtcctttcataacttgtgctcaatggatagccttcatatcgaattgcaactatcaggactttacactcttgtcttaaagtaatatttatattccattccatttgagttagtatcgtacctatgggattcaatcaggatctggatgtgcctagtctattacaatttattattacacagtttggttttcagggcagcgcacatttgattcctgacacctatgtaaaacatgatttccaaacctacagcggtgtgacaaattaaatttaatgattatcagcaattagatgtccatatttcggtctattttgcgcgccagtcgcgagtaaataaatcatttattcagccagcccagctctccacactttgctctactttcgacaccaggtcaacagtcaaacgtcatctgataaccgataaccccttccggtccggtccgttcgttccgttccgtttgacatctccccgctcattaattaattatgcaccgccggatggcgagtcgatggtcgaaggacccagtatccagcatcctgcatccagtgttcagtatccacgatgattgatatttatggaccgacacgaaactataaataattgaatatttttgatggccgtgaaaatgtgattttaatcagcgaacccttggctaattaaaaccaaactgatttatcctgatttttttttttttttacccactttcttcattttccagtgcgcacgagcaatccgtacttcctgtgctccgccctgcccgcccattggcgctccaacaagacgctgccgatggccttcaaggtcgtcgctctggcggaagtgggcgatggcacctatgtcaccatccgggcgggaaacgatgagaattgctgcgcggagctgcgcaacttcaccacccagatgaagaacgacgtggccaagttcaatgatctgcgtttcgtgggacgcagcggaagaggtgagttgcagtgctgtccgaacggtcacttgggaattataagctaaaatggagagaagaagtgcaaacggtaggcggtgtgaaaaagaaaggagttggtaaactaactatcttctgtgaatcaggatcagatcaggataatatatagtaatttctaataactgatgaaaatgatctatatataacttatatactttatagcactttatatcacctttgtgttttggttgactatataacatttctgaaaattaaagacttcctcgagcactgcaatcagcacttcctttgccaaatgccgattattgcgagcccaaagaatgcttcccacaacttcaaacgagcggaagctgtaggtttatcctttcaaactttcttcaaattacactgaatgaaaatgatgcgtaatacgttcaattatgtatgcataattaacttaatatggctttaatttctaaagacttttttttattgagagttacttctgtaacgcacacttcatcatcaagtatatgatgataaaactctaacaaaatttgtaacttgaagtatgaattcataacttgctatgtaacttgcatgtaatatttggttggcaaatgcattttctttttgtgcacccgaaaataggtaatgaatgcatcggaagtgcattgattgagtgacaagccagaagttctggagtgactaatgccgcctgcgaaaaggatcaatggtacagcagtcgtcacattaggcagcaagttggcgctgtcctcggggcaacatgccacatacaacatgcaatgtgcaacacagcgttgttcccagcagatccccgaacatctccatgtcggacatggtacattgtacacgggatatgggatatggtatatatgggatatggaaatgcgctggacaggatcggctgggcaggcaggctgatcacgcaatgttccgagcctttttggttctggtaatcgatttgaacccacaattaatgtgcatatgtattgtgttgcatagaattggcagcagcagttggcagttggttaattagctgcaactgttgccgccgcttttgaccctaagtcaacctctggccaggcgcaccacttcctcctcctcatccttctcatcgttgcaaactgaaggctcgtgccgcaaaagggccaagaaatttatactacatacgtatgtatgtatgtgtgtatgtgcatgtataaaaaaataaaaaaaaaaataattacagccatggcaaagggcatgcaaataacaagctaatgatgtaagaacataaacgctgaccaaattgtcaacggcaggcagcagcaacagttcacttcacttaatggccacgccccctcgcgaccccaaaccgcccgccgcactgaccttttggccgaagggtgagagggggcggtgggcggggcatgaaaatcgcggacatcatgcagcgatttctgattagatgacaaagcgaacgaaaacagatggaagcgaaaccatcagcatgtcaaggggcacgaaatgcacaaaaatccaggggtatgcagtggttggatgaacgcagggataccctgggaaaaaaaaaataatgaaaaaatcaataatgtaatcttaaaggcgattaaagctaacatatttttattaaataataagataagcaaatattattttttgtttatactatttcccaccaaatttcaaagatcatagccactaaaattagctaccgtgttgcgtggatgccatggatgccctttcgttttttggcattaaatgggttttgggggcgtggcagcttatcgccttttttatcctggacatggcatgcgtcgacatgttttttaatttaccccacagtccgccgtcaaatcgcaatctaaatacgcatctccatctgattcggacatccaaatttacgtttatcaacctcatttgaggaccgcttaattacatcagccgtacatgagcagcgacattacaatcatcatctatcatatcaaaggacttgacttctcgccggcgacaggattaaaatcgaaaaacaaagcaaatgaaggacacgcgccaccaggaattcataagtcgcatcccaggatttatttctatgcaaaaaaaaacaaaaaaaaaaaagaaagggttggaaagggaaactgatgtcctggctgagacccagatgcccgataaacttgaacaggtctcctgatccgacttagtggtcgcatgggcgcttcaaccggcggaaaggttaataggatgaattcttggaatgttttggcaactgggacaggcagttttccacggaatttgtttattagtatcatagttgtttaggcaggaacacctcaattaagtgaatttttgcattgcagtcagttgaaaggggttactacgaaaaatataattaattagaataataattggagtgtctaagatactgagatactgaatgtttgagatattcgtgttatctttcacatttaatgctacttaatagcatgtaaaatccagttccttttcaaatctgtcagataaaaaagaaactattttccattcaagttcacaaatatagcattcctaatcagcttgggaactcctacgtatatagtacacattgtttttgtactctatcggcgaaggatctggaatttcgcacccagaagttcccagcccaaagagcttgtgccattgtactgaagtaataatagtgatgtaaccatcataaatacatgcatacatacatgcatatatccgtgttccgtgtgatatcgccatgggttttatcgcagtgtagctcggcgaacgcggttcccacagagtctcgtcatgagtaggagtcttgcctagtcttatcgccccacaaaggcgatggctcattggatggttggatggttggatggatggattggtggatgggtggatgggtggatggatggatgggtggatggatattcgccgcgttccgtggacttatgtatatttagacgtgtccccacaaatgttatgttcacatatagaatggagattacggatgccactgactgactgcctgactgactgaatgtccaagtgcgtgcgccgatactccgattcgtatggtcattgttcattgatgatgactaatttgtggagataccaatcgcgggatcccttcaacttccatctccattatgagcgttattgctcccatttcggggtctttagtaccagttgccagttgccagtgggccaaagacaaaaggggcaataacattttccaattactctaacgaacttttacatacgatggatgctccacattttgcggccatttgaaaaatgagcgacccgaaaaggagccaggcctatttaacagtttctttctatccgcagcttctgctccacttgattaatttcagctggagtttggagtttgaagttcgaaatttggggtttgtagtctcaggttggatctttctttcaactacaagtatataatacgaaatatgtccaacacgcacgttacttcattttcgtttgttggctataatgaagacatttcgggattgagtttgagattgagatttcgagagatttcgaggggccccaaaacgctttctaactgatggccattcgtggtttcggttaatgaacccatcaaatcttcaattatctcgaccagtcagtccttcattgtgtctagttttgagggttttacggggatccattgctgcatttctattatttatgacaacgacccgaaaggctgaactttcaaactaaacaataacatatttataatctttctttttttctacattctaataatttctttattgtcgcgttaaaaaaaagaagattattcgttcaattgtattgttaggccaagtgaatcacaagtccttcgattactttacttattcatgagcttgctcaattcataaaattatataaatattcaaactatatatattcgatgtaacatattattataaaccccttttgattctagaagaatattgctgggtgtataagaagttactttttggtatagctatttttaccttgttctcaatttccgcccaaaggagtcgctctttcaccatttgcagttcctaattaaaagtttaatgcaatttccaacaagtaggactcgctcccaatgtctggtcacaagcccagccacccacctggaggtgaaaccctcactcatccggagcgaaaagatagaaatggactttatcgatggggtttggggtctccggttcgaagttctgggtttggggtgatgcgactgaggtttctgcggtcagattggatgggtctctgtctccttcgggcttttggatcccgtcctggtcctgcaacaacaatgtcgctttgttggtgttttattatatgtatgtacatacatacatatatgtcgatgtatttgcattgccagttttactgaccagacagacagaccggaccgatggacagacggaatgctaaaatatcgaagtaaaaaaccgaaattcatttcacattttcccaatcgataaaagctgccgatggctcgcagttgcagtttgcagccgcttcaaacggtgtctagtttaatggccataaatagtgtaaacattcggtcaagcccagaagaaaaaaaaaaacaaaaaaaaggttggtataactctttttggccacaatgttgcccgttcctcggtatgcaaatgtggaaagggggccagtgaaatgaggggcgtggccgagcgaaagacaggttgcaacatttccatattttatgtgcactttaaagactttggcggtagtcattaaggcgggataaaccaaatttatgtcagtggttcgaacaaactgcaccgccgtggcagttttggggctttcaagggttaatcgaactgcgcgatgccctaaatgctattttatgttcattcgagcatttaagatcgcaaactaacacttttcacccaatttagtttggcaaataaactaatttcccttgccatatcttaaccgtatcgattggtaccctatatatgaaacatctatatgcatcgtatcgaccacataccaaaattcataataataactcaaggggttaccgagttcactccagaccacaagcgctcacactttcgcccaaaaacccaaaagaagtgcagccattaaagttgaacgcggtgacgcgtgttgcacggactggactgggcttttggtaattttggaatcgcaaattgattcggtagcccagtgaggtcgtcgcataaatccttgccagacatttacgactaaattctcgaatttgcaccgctctctaatgacgtgccgcttctgatgctttcttattttgtttttttttttttgcagggaagagcttcacgctgaccatcacggtggccacgagtccgccacaggtggcaacctacgccaaagccatcaaggtgaccgtcgatggaccccgcgagccccgctccaagacaagtaagtgttgcagatcgtataatcctgaaaaatatggtcttagaattagccattaactatgtgagatgtgcttgcgatttcctgttgtttggcatcgaatggaatgccgtgtaggatagtagtagtttttttctttctgtgcagcagcagcagcagcacccttctcaaaggtgtaaaatattacaagcagtcatatgtaagtggctgcattgttttgccaattagcaattatcgcttgccacaacaacaaaaggaaaagcggggaaaaactgatggaaagccgtcccgctgcgttttgggttaccgattgcaacatgtggccatgtccgctcttcccgcctgacatcgtaaccgtatatccagccagcacttggacaagtgtttaagccgggccaacagctaagccgatctgcccaattgcccctaatcgtccttaatccctaatccccactttccaagtcgcacagttctagagattccctgatattgattccattgtaatggaaaatgatattattcattttcattgccaaaactaaactgcatcttattcaaaatacatccaaatgatcagaatgatcaagttcttataaaaacccctctttaatatctatgaaatactcaaaatgttcttttccgtgcactactacttcttgagatcctttcgccttctgtcaaggatcgtgtctctgacatccgatgaccgccattttgcgatgttctgtcattcgggaaggtgtttgaaaagtgcagccggttttagtcgactttttggtggatggagggcaacgttgctgcctcttacggtttctgaaaattttgcggtttgcaaagaaaaccttttttgttctccctccctacgtttcttgttctgttttttgtttttttgcaacgtgtttttagttcgtataatgcatatatgaattaattttttcctcttgatatttcgttaatgcatttttaagtcttcgctgcagggaaggtaatactatatacgcatatatgtatatatgtacatgtactttttgagtatatataaaagtgcagcttgagtttgccttgagttaaattcaggtaacgggcaaaatggactccgtatatatatatatatatttatttgtttaaattaatataaatagttgttttcacctatttgtggatcttgaaaagcagtatatagttttgtaatatttgaaggatatttttggtgcgtagcttaactagaggttcacttacccattgcttaatccttgacaggtccgaccggtggtccgcactaccgagctctgggtctgggccagcgtccctacatcgatggcttcccctcgacgaaggcgctccacgagctggagtcgctccggcggtccgccaaggtggcagcggtgacgacggcagcggcggcggcggccacagcggcatccgcggccaatgcggtggcggcggccgcagccgctgtggcggtaactccaacggggggcggcggcggcgttgcagctgggggcgtggctggcggagcaggcgctggactcgtgcagcaattgagcagcaattactcatcgccgaatagtacaatcaactcggactgccaggtctacaagccgaatgcgccgcacatacaaggtaagttgcaggtgcactgtacgaaaatattgcaaaataattgcatactttagatggtttctatacggatcagggattataattaggatattattttagtgtagtaaagcaaaccaatccttgatcattttgctaagattcatatgacattatatagggtatacacgatgaatgttctcagtgcagctagtgacttctcctcccccttttttttccacattaaccctttcaatgaagttgttagcgttgaaaggcggccacgctttggaattcgggaactggtcaacttgtggccgacgtctgacttctgttgtctgtgcagcttcgttgactggcaccaggctgcctaaacgctttaattgagttaatcaacctgacatacacctcatcttgatttatttttggtatttttatggctcgctttgtgtttggcaggcgctcgctaatttatttattttctcaaagcccagcttaaaaatagttcacagccgctggctatatatattgtatatatgatgagatatattcgcgcatgccgctataagtttctcgcattgaaataaagagtgaaatcagaattcggaaaaaccctctacagataattccttacgttaataatggatgtacacaacagtcactcatctggctgtctcaacatttttgaaaaacgcaaaaatcaattgaaaatatggtgctttttttgtgatatttcgtctagaaatggtcaatattttgatcgtaaaatagaaaatagtagtccaaatatggagtgtcatatcgcgttaaactcgtaattaaatttccaatccaactgagttaaaaaatgaaaattttattttttggccattttttgcaaattttgacgatgttaccccttacaaaaaatgcgaaaatttacccaaaaattaattttcctaaaaacttcaaaaagtgacatggatcgttagtattggtaattagctgctcaaaacagttatttttacgtctatatgaacatttttagccaagttatgacgaaaattgcgtttgtaaatatctactttttggcaaaatcaatttttctatatttcgctcatcaaataatcagtttatttgccataactttaaaaataattgtctgaatatggaatgtcatacctcgttgagctcgtaattaaaattccaataaaactgtgttcaaaagagaaaattctatttttatgccattttttgcaaattttgatgatgttacccccttacaaaaaatgcgaaattatgccgaaaaattaattttacaaattccttcaaaaaatgatatggatagttagtattggtaattaggagtaaaaatcggtaatttgataagctttctgactctttttagcccagttatacagaaaacacgaatcggaaatattgactttttaaaaaaaatcgatcctccgtcttttttctgaaaaaaaaatccgtttttttgccacaacttttaaagtaattatctaaatatggaatgttatatatcgttgagtttgtaattaaattcttaatcgaactgtgttcaaaaatgagaattctattttttcgtaattttttgcaaattttgatgatgttaccccttacataaaaaaaaatgcaaaaatttgaccaaaatttttttttttggaaattagtagaaaagtgatagggatagttagattagatcattggctataaaaagcagtcattcttttggctttgagaccgtttttagattaattatgatcattttcttgccttatgttttcatccagacttttggcccaataacattatttatttagtttccactggaagagacagacctctaaaataattaagctttatatcgaggaaatctttgcagactttgataataaagtgttcactttgcaccacactcaaaaccacttgccacgcccctatttggcaaccgcatgtgagagaccatatgtgggatattcgaccgatcctccccagagttgccaactaattttagccatttcagaggcttggccaagagcacgcgctcgaacgcggctataaccagttgagaccgaaccatctgctatatagatatatataaatatatatatatatagggctatagctccgatctattatcatgtgtgtattgctatttttgggttgccatgtcgtccctcgcagacagtggaaaatttcccatctgttttcattcaatttgcattgatttcgcttcggctatgtaaaatcttatcaaaatttttgggagttatgatgcggagcgggggaatttttggatatatagcgaacgtaactggaaccggccactgagtcacggatggatgtggattcggatgccaatgagtcagtggccagtttggaactagacgaatctgagccgcaaatcgccgtgttaggtccagacataagcattttgcttatgctaattaatttataaatgtttcgtcttcgattaccctttccggtttggagggtcgcttgatttcggtaatagtttcgatttaatgttacagaaagattattgctacgaaatggtattcactttataatacgaatgtcagaccacaaaactataatttcactaaattctttaacattaagtgattaatgaattgttgccctaattagcctgataatttattatttagttagtttttgttcttattcagttttctagggtatcaaaagcgtccgctatcgccgccttcttggcgatcacttaattcagaggcgggggcagttgaagtcgaaataaacgcgtaaacgtattgtcaatggtgaatgacacatcgtcgtctttcaattagccaaaagcaaaggcggccaaaagagcagcaacaacaatagcaacaaatgcaatatgttttcgctttgttttctttcattttcgataagctggaaccggaaatgcccgaatcgaagcgagaaatccacattgaatctgaattcgaatctgaatctgtatctgtatctcaatcggaattggaatcggaatcgatgcctctatggggaaaacactcgactcgcttttgttgttgctgctgctgctgctgctgctgttaagtcataaatatttaaatgtggcgcttaagctgttaatttacaaaaggcaatcgagcgggcactcagcggaaatcgttgcgaaattcaaagaattcgggttgagattaaggcaaaaaaaaaaagggggaaataatacatttgtaagtgggtgaaaaagtggagcagagagggtagcaaataagttgagcccccaatgataattgatgacaagtgaggaagtatttcaactcatacatatattagtaaagaaaacatagaagataaatatattattataaaattagaaactgcatatttggtattttcaatttgtaattccattacaatttgaatagaaatccaacagcaataaataattactttaatatattacatatcatataaaatctcaccctctgatagaaatcctagttgtttaaaccaatcaaatccttaccatccgtatgatttatccttctggccattgtccttctaattgtttgtggtccacacacctgtggcatccagcatacatccagtgtacagaatcatcatcattattatttcgcatctcggtgcattttggggcatctggtgcaagctgaatgccgaaactcacgccatcgtgttgggctccattaaaagtgtggtgggggaggggaggggggtaaatatgcaaatttggccacagaatcgagggtttggggttagttttggcatcggtattggcatttttttttgttgcgggttcccactgctggccacaaatcaatccaaatgcggttgcgcagctgttgcagcttcagttggaggagatccaagctgcaagatgcggccatcagtgggttaagagtgccggctgccggccggggggttaacagtgacaacaatgtcgcacacattgaaatggaatctctttggcccataaaacgggccaactgtggcgaaccaacttgggtctggctcatatacatatatatatgtatgtatatatttttctgttttttctgcatttatatttttactaccaatggccgcagtcacttagttcccgggacatcatcaccccctctcgaaaagcccaatcccgaacccaaaaaaccgcaaactcacttccgtttcgcatcgttgttgttgttaatgtacaagtacttcttgtcgcttttttgtttcttgtgcctttaagccgccattttgcgggtccaaaagagctaacaaaaaaataaaaaaaaaaagggaacacctataaaaatgtgatgtaaaaaacgaactccattcacaccaataagagcaactggcactagcacaggcgaaactttagtcagacgcactttaattaaaattacttcaagactcgaaagctatctgctccagcactgagagaaaaaatgtggcctaattgctgttggattgttattattatctatgttcttgttaatattgtggccatattaaaattgaaaagaatagtttttaaaaataactttcgtaagttgcaaaaaatgaagtcaatattccagactctttgattttttctgtgcccaactttttggcagcttttgcagaagccaccaccactggaagacacttgacttatccgcacattttgtggtttctcttcgaatggattgatcggactgcatccgcattttagcccactctttagcccttttttttgttttttttgcctttttgctgggcggatatatgtacatatatatggccaaaatcgaagatatccggtgaagccgtgggatcgattggaagtgcagaaagaaacttggcaacacatttagatgggagggaaaaacttgtgcttttcaggctggaatttgcatgtacatacaagttgtatcttagacacatttgccccttaccctgccaacactgcgtatacgcaatttcagggaaataaacctcgcataattccacgtgcccacagcaaattacaagttatgaccgaatgacggtagtgatccctccttacccgccactggaatcccagcgctggctttcatcctgttcgcttcgcttcattgctacgtcatttgcccaagttttgcggtggtccaccctgcccagcgaatgtccgaacccccccccccccctttaaaccgccacccatgccttggacttcagtttgccacattgttgttgttgctgcaacgcaatttgcgccttaattgaaacattaaaatgtgataagtgccgggttaaaagttgcatgcaacttgcattactctcgcctttcattagtcgccgcccctgttttccaaaaaaaaagggggagtggtaaatagaaataagtgggtacatgcgtagctgggcttattattcatcatagtgcgtaactaatttgccctctaaggtggtatttttattgtctctggtctggtgacaggaaaattacgcaggttattttagtaaatagtatgataaatagctcagttaggggaagttcttgttgtataagaaataatatgatttgctttttgcttgcttactgttgcaacaaattaaatccaaatatttatatatttcctagaatacttttttaaagggttaacaattttgaagtaatccctcgctattttgtcttgctacctgagcacagatttacctttcatcaatttgcttcatgcttttcttttatcgcttctaatgaatttgattaattatgcgacatttttgccactgctttttttggcagctcaacacaggggcgcgggtgggcattttcgagaagggggggggggtttagctttgggtattgcgtaattaatcgaaatatgcgagattattgggccggggtctgcgataacccgctggttgcctgggaaatccgctttcaatgtcttggaattttctttccaagctccacgcttaacccattggcatgcagcgagtttttgtgggtggtgctggtatttgggtggtgctcacacacacacacacacacactcatgccctcgtactttccgttgccatgcatatgaaatgatgttttcaattataccttcggccacgcccacgtttgcgactgacaacttggcgaaatttcacttgagggggttaaatgcgtgcttggggcaaatcaagggttaattggactcccagctggcactaatttaccttcgctctctcgattgttagcctcttgggcatccagtgttgtcataggtttagatggctcccttttgaattgaaagaataatattatctttcgttattttaactttatatgatttaaaaaatatttattatcccaaaaccattggttgtcttccagcagccgaaatgatgggcgccggcgaatggacaaatggatcctcgagttcggcggctgcctactaccacagccacgcccatcatccgcacgcccaccacgcccacgcgcacctgcaacaccagatggccttgccaccgccgccgccgccacccgctgcggcacccgtttcggtgggcgtgggcggcaatggagccaccatgggcatgggcatgggagtgggagtgggcatgggcatgaatcactacggcggtggctacgactcggccaactcgctggaggcgggccagtatgccgcccacctgccggcggtgctgcccgagatgcatggccatggattcgccaccgatccctaccagacggccggctatggcggtggcaatacgggcggaggcagtgcatccaaatcggaactggactatggcggcagctacaatcaggcgtggtcgaatggctatcagaactatcagtatggcagttgtttggccaccgcccagtacggtcctcaggcggcgccgccaccacagccaccgcctccgccgccggtggtgctgtgcccgcagctgtactccacggtcaatcagaatcaaatccacctgcatctgcacagcagcgagaagctggagcagtatctgggcacggccactagtgcggaccatctcaccattggatccctgacgggcagcagtcgttccagcattgaaattggccaggatcagtaccaccagcaggtgcaccacgcacagcagcagcaacagcagcagcagcaacaacaacaggtgcaccacccacagcagcagcaggtggaatccgctggcgaagtgggtggcagtggtgccggcggagtggaatccgccagggaggaggacgtgggcgatctctcgcaggtgtggcgaccctattgacccaaccggatcattcagcgatcagcgccgaccggtatccacctgcacccacatctgaatctgaatccgaatccaaatctgaatcccagccacccaccgctgcacctgcacatcgaactgaactaggagagcagcaggatcaccacaagaactgtacaattttttgtatcttttttttttttgtagcaaataacgtatgtctaagtaatcccaaaatatctgcaagttgtacataaagtaaagaataattttgagagattaggcgccctaacttcaagagctcagaactaatgaaataaaacccaactcctatcttaaattatacttacatttcagtccaattaacattatactctatattatcttttgttttgagttcagaagggttcagctgcagcataacgggaaagtctataataatatataatactagtaaatgatgtaaacccgtacaagaaacacattaaacgaggtgtaaataatagagagcttaagcataagatgaaagtataatataatctaatccctaatcctagcgtatagagcacccaaatccctacaaaccacctttttttttactagccctaagtcttgaaggatactcgataaagccgcacaactatctataaatatatataaatacatacgtatttatacattttttttctgttactttatgtgtgggaatctgccaaaggattcgaagatgacagtaaaaaactgaacgatgaagaagagaagactataaataaagttatcgtatttatttaaatctcattcgttgattgcgtagccaaaaaaaaaaatgcagtaatgcagtaactcagttgtttgactatctatttagctaattttggtttcgttttgttggtcacctctttactaaacatcatattgactaaatgctcaacgttaagttcattggatccatagaaaaaaaatgttttccaaccacacacagaatgcagaaatagttaattatgcgcatattttagattagattagcaacaatggcggtggagcttcgcaacaattgcgaaaaaaaatcatgcatttttaagtgcgaagccttaaaaatgcgcgtgtaaataataaattaaaaattattgccaaacagaaccacaaagtgtgtgcacaggccatccgccgaccgtttccatctgatgccccgggaagatcttcaatctgcaatatctctgatctccgacagctctagttccattttcattttcgcttttcatttttcattttttcacctcttctgcggtcgctccatggcatacataaattggagaagcccccggaacccgtcttcaaactggcttactactgcttactgggtgccgacgccattgttgccgtcggccggagctggcaaatcaagacggggcagtcaagtgttaaattgcaaaagacatttccattgtcggcaattgcgaaacgagctgaaaccctagacaacagacccgagccgaggtggattccatcgataatccataccctatagcccatccactgcaaataatcgatccaatgaactgatctgttgaaaatgaacgcatctgaatgattattaaatgaaaacgggagcagagaccttatagatgagcacaaattctagggagatttggttagacaatgaaatatctacatgtaaacatagttctgttgagatacttttatagaacattttagagaatcgcaaataaccttaggtactctcagtttcagtgtagaagccagatccaggcaagcgttaaagacat

SEQ ID NO: 1895 - DNA, 3475 bp, DROSOPHILA
cacctcgcttacgtgttaaccctttttttttgtaacttgtgcttaagtcacttaaagaaataccgaagaaagtaaactaagtgtgtgtagattagagtttattgatgagtgaacaaaagacaccgccggagcgaagtgtgataagcgcttgacctgcgacccgcacacactgcaagaaaaaaaggggcaagcgagcggatcaaaggtcaccgccgtcgacgaatgcatttgcatctcctggcggcagagaagacgcctccatctccatctccaaatccaactccaactccatcagcatctccatctgggcatacgggcgctgctggggagtcgcaattggacttggcatcgcaaacggaatcgcaattgcagctgggcttgccattggcttccggatacggactcggactcggattgggactgggcttgggattgggactgggccaggaattggtggcggaccacagcaccactgtggcgcccgtcagcgttgccggtcccggccgcctgggtcgcagcatcaacggcagcggcggcagccaccaccatcaccacctgcaccaccactactcaccgtaccaccacgcccacccctaccacccaccgcatccgcacgcgccccaccaccaccaccaccaccacccaccgtatccgtatccgccggcaggaccacatccgccggccatggtcacatcgtcatccacatcgccgacgggcaacggctggagcagctccaccggcgacttcaagggcatcacagcggtggcgacggccactggcggcggcgtaggtggtgccacccagggcgccactgcatccacgggcgccacagccgctgaggttttggccgtttcgagtagtgccagtgttggcagcagctcgcccacaggtggcgccagcaatggtacagcccatagtgggcatagtggacacaccggcggtcacagcagtagtaccgccagcaacaacaacaacaacggtgccagcaatagcaatagcaacaataacaacgccgttcaccaggatctattgtggatggagcgattggtacagaagcgacaacaggaacatcccggcgaattggtgcgcacgagcaatccgtacttcctgtgctccgccctgcccgcccattggcgctccaacaagacgctgccgatggccttcaaggtcgtcgctctggcggaagtgggcgatggcacctatgtcaccatccgggcgggaaacgatgagaattgctgcgcggagctgcgcaacttcaccacccagatgaagaacgacgtggccaagttcaatgatctgcgtttcgtgggacgcagcggaagagggaagagcttcacgctgaccatcacggtggccacgagtccgccacaggtggcaacctacgccaaagccatcaaggtgaccgtcgatggaccccgcgagccccgctccaagacaagtccgaccggtggtccgcactaccgagctctgggtctgggccagcgtccctacatcgatggcttcccctcgacgaaggcgctccacgagctggagtcgctccggcggtccgccaaggtggcagcggtgacgacggcagcggcggcggcggccacagcggcatccgcggccaatgcggtggcggcggccgcagccgctgtggcggtaactccaacggggggcggcggcggcgttgcagctgggggcgtggctggcggagcaggcgctggactcgtgcagcaattgagcagcaattactcatcgccgaatagtacaatcaactcggactgccaggtctacaagccgaatgcgccgcacatacaacttccagcagccgaaatgatgggcgccggcgaatggacaaatggatcctcgagttcggcggctgcctactaccacagccacgcccatcatccgcacgcccaccacgcccacgcgcacctgcaacaccagatggccttgccaccgccgccgccgccacccgctgcggcacccgtttcggtgggcgtgggcggcaatggagccaccatgggcatgggcatgggagtgggagtgggcatgggcatgaatcactacggcggtggctacgactcggccaactcgctggaggcgggccagtatgccgcccacctgccggcggtgctgcccgagatgcatggccatggattcgccaccgatccctaccagacggccggctatggcggtggcaatacgggcggaggcagtgcatccaaatcggaactggactatggcggcagctacaatcaggcgtggtcgaatggctatcagaactatcagtatggcagttgtttggccaccgcccagtacggtcctcaggcggcgccgccaccacagccaccgcctccgccgccggtggtgctgtgcccgcagctgtactccacggtcaatcagaatcaaatccacctgcatctgcacagcagcgagaagctggagcagtatctgggcacggccactagtgcggaccatctcaccattggatccctgacgggcagcagtcgttccagcattgaaattggccaggatcagtaccaccagcaggtgcaccacgcacagcagcagcaacagcagcagcagcaacaacaacaggtgcaccacccacagcagcagcaggtggaatccgctggcgaagtgggtggcagtggtgccggcggagtggaatccgccagggaggaggacgtgggcgatctctcgcaggtgtggcgaccctattgacccaaccggatcattcagcgatcagcgccgaccggtatccacctgcacccacatctgaatctgaatccgaatccaaatctgaatcccagccacccaccgctgcacctgcacatcgaactgaactaggagagcagcaggatcaccacaagaactgtacaattttttgtatcttttttttttttgtagcaaataacgtatgtctaagtaatcccaaaatatctgcaagttgtacataaagtaaagaataattttgagagattaggcgccctaacttcaagagctcagaactaatgaaataaaacccaactcctatcttaaattatacttacatttcagtccaattaacattatactctatattatcttttgttttgagttcagaagggttcagctgcagcataacgggaaagtctataataatatataatactagtaaatgatgtaaacccgtacaagaaacacattaaacgaggtgtaaataatagagagcttaagcataagatgaaagtataatataatctaatccctaatcctagcgtatagagcacccaaatccctacaaaccacctttttttttactagccctaagtcttgaaggatactcgataaagccgcacaactatctataaatatatataaatacatacgtatttatacattttttttctgttactttatgtgtgggaatctgccaaaggattcgaagatgacagtaaaaaactgaacgatgaagaagagaagactataaataaagttatcgtattta

SEQ ID NO: 1896 - protein, 828 aa, DROSOPHILA
MHLHLLAAEKTPPSPSPNPTPTPSASPSGHTGAAGESQLDLASQTESQLQLGLPLASGYGLGLGLGLGLGLGLGQELVADHSTTVAPVSVAGPGRLGRSINGSGGSHHHHHLHHHYSPYHHAHPYHPPHPHAPHHHHHHHPPYPYPPAGPHPPAMVTSSSTSPTGNGWSSSTGDFKGITAVATATGGGVGGATQGATASTGATAAEVLAVSSSASVGSSSPTGGASNGTAHSGHSGHTGGHSSSTASNNNNNGASNSNSNNNNAVHQDLLWMERLVQKRQQEHPGELVRTSNPYFLCSALPAHWRSNKTLPMAFKVVALAEVGDGTYVTIRAGNDENCCAELRNFTTQMKNDVAKFNDLRFVGRSGRGKSFTLTITVATSPPQVATYAKAIKVTVDGPREPRSKTSPTGGPHYRALGLGQRPYIDGFPSTKALHELESLRRSAKVAAVTTAAAAAATAASAANAVAAAAAAVAVTPTGGGGGVAAGGVAGGAGAGLVQQLSSNYSSPNSTINSDCQVYKPNAPHIQLPAAEMMGAGEWTNGSSSSAAAYYHSHAHHPHAHHAHAHLQHQMALPPPPPPPAAAPVSVGVGGNGATMGMGMGVGVGMGMNHYGGGYDSANSLEAGQYAAHLPAVLPEMHGHGFATDPYQTAGYGGGNTGGGSASKSELDYGGSYNQAWSNGYQNYQYGSCLATAQYGPQAAPPPQPPPPPPVVLCPQLYSTVNQNQIHLHLHSSEKLEQYLGTATSADHLTIGSLTGSSRSSIEIGQDQYHQQVHHAQQQQQQQQQQQQVHHPQQQQVESAGEVGGSGAGGVESAREEDVGDLSQVWRPY

SEQ ID NO: 1897 - DNA, 3238 bp, DROSOPHILA
caaagagaaagcagctgccaagatgaagccatccactccagtcgcagccattccgctaatgacgatagtggtcgctgtcctgctgcagacgcactgcgtccgtggccagacccaggctttcgatctcgccaagctgctgcccaagaccggaacggagcccatctgggcggtaatcgatcgcaacttgccgcaggtgcaggagctggtcaccgcggccaggatggagtgcatccagaagctgcagctgcccagggaccagcgaccgctggggaaggtgaccaatccaagtgagaaggagaagtgcctggtggagtgcgtgctcaagaagatcaagttggtgagtagccggacgtttgtcacaaccagaactaaaaggtcactaatacttctcattcgcacccagatggacgccgacaacaagctgaacgttggccaggtggagaagctgaccagcctggtgacccaggacaacaagatggccatcgccgttagctccagcatggcgcaggcctgcagccgcggcatctcctcgaagaacccctgcgaggtggcccacctcttcaaccagtgcatcagtcgccagctggagcgcaacaacgtaaagctggtctggtagaggacatctccgcgccatggacaccaccaccaactaccacttgagatcttaactacgagtagaaagaaggtgtctcgcatattttggccataatcttagctacaatgatttctcagataattttaaccgaaaatgcacaatctattaggcaatataattatatattaaatactagttatacgattttctagtactagatcaagttttagttgctcactcgcaattgatttgaataaatctatatatacagtaatttatttcccatttttgcacaataaaaaacacaatctttcgcagttccaactacgggattacgtactacatatgtgattcccacccgataaatatgcataattcgtaacttgttggttgggcgctttattagtttgggaaaccactccaagttctctagctttggtaattaaatcgaactgaatcactaacaaaaaaaaaagggagggagaacatgcaatggtgggccagcgagcagctccatggcctcattccttgatctcgggaatcttgaagcccgaagagcgcatctcgcgcagcatgcacatagcgatcccgtgggctgcctcgcacctgaaaaaaaaccaaaaacaaataagatccttttcagaaatactttaaaaatatttcaaacaatttttaaagcttttgggagcacagttgcctggccacctataaaaggtattccaaaatattgaaactctcttcctgagaagaagtgtacgaaaaggttcttcaaaacacacggcaacttaaactcctggcacttatcttttctttcgaatacagcagaatattttcgaaatgcagcaagactgaaaaattcgccttagaaccgtttcaagtttttgctttgaagtaaattcactccgcatctggaatacacttcgctggactaacaattactagacactagggtcctccattgccccaccacactcacttgtcctgctcggcctttagctcctcgttgcaggtcttgacgatgcgcctgccgtcgtcctcgcgatccgggaacatcatgttgatcatatcgaccgtcttgtcctcgttatactgcaactgatcctcgggcatcagctcgaactgctccagcatgcagtggcggaagcacttggtctcgtgcttggcgtcctccttgttcagcaccatctcgacgatgttctctgcggatatggtatgttatggaatggtatggtaggatgggtgagtaacccaacggtgcacttacccctcgacggctttggcgtgcaggcgtcgccaaagggctcgatcagctccaccacctcgtccacggtcatggacccctcctcctcgtccgccgtcgccgatcccatcagcacggcggcgcaggccactgctagcagaaggttcgtcatcttcaacgtcgtcgtcattcggctgcactgcatcatttttgctcttcttgtgaatagtggacggacagcaatcggcgccgggcaatttatacccgccgcaatcgtgtccagcacatccggtacaagcaaatcgcctcggatgtagatcaaccggcgatagccatgacattgctggggcggatcatgcaagccccaccacaaccacagccaaccacccattcgtccatccatcgcagcccagttaaaatacagcacagatgacggggccctccggctagcttttattgatcatctggtcaggggattgggcttgggtgtgggtttaggattgcggacaagagatatacatatctactttatttgctgcggagtcacctgttccgaatgccaaagtgtgacgcatctggtatcgcattggcagcctcggatggaaagcctagggaaacacgaataccttgatgttgttcttcaggcagctgagcagggcgtgggcgggatcgcagttgggggcgttcttcaggccgacggtggagtccttgcacagattgatgcccttgcggtactcgtccttgtagctgtccggcagcatgatgtccatctgcttgagggtcgactccagctggaactttcccttcttgatctaagcaggagcagagcggaaagaaggagctgataatgtaaccaacacagccgatggaaacttcttaatacgtactgcctgcatcatttccaggatgcaattgatgtagcagttggtgtccttgctattgggtatgtcaccgttgcgaatgttgtcggccacctcgacgctgaccttcggatacttgggcaggcagacgtcgcgcatcagctttccggcagaccacatctgctcctccgtcacctgcaagtggacagtatccatgaggcatcctccggcagagagaagagcttaaggacctacccctgcctccgactgggggattggtcccagggatatggcgacgcagaccagcagcagatggaacttcatttccgagacgatttggcggattccagactccagacccatcggcgactccttttatacacggcccccgacatgcaaatgacttcatattggttcgatcgaaccgctaagtgggtgtgggaattatgggttagcgccaatcgccgcccccactgcccatttccatatccaaatgggcgggcggtgggtggtgttcctggggcggattactttctggccggg

SEQ ID NO: 1898 - DNA, 803 bp, DROSOPHILA
atggatggacgaatgggtggttggctgtggttgtggtggggcttgcatgatccgccccagcaatgtcatggctatcgccggttgatctacatccgaggcgatttgcttgtaccggatgtgctggacacgattgcggcgggtataaattgcccggcgccgattgctgtccgtccactattcacaagaagagcaaaaatgatgcagtgcagccgaatgacgacgacgttgaagatgacgaaccttctgctagcagtggcctgcgccgccgtgctgatgggatcggcgacggcggacgaggaggaggggtccatgaccgtggacgaggtggtggagctgatcgagccctttggcgacgcctgcacgccaaagccgtcgagggagaacatcgtcgagatggtgctgaacaaggaggacgccaagcacgagaccaagtgcttccgccactgcatgctggagcagttcgagctgatgcccgaggatcagttgcagtataacgaggacaagacggtcgatatgatcaacatgatgttcccggatcgcgaggacgacggcaggcgcatcgtcaagacctgcaacgaggagctaaaggccgagcaggacaagtgcgaggcagcccacgggatcgctatgtgcatgctgcgcgagatgcgctcttcgggcttcaagattcccgagatcaaggaatgaggccatggagctgctcgctggcccaccattgcatgttctccctcccttttttttttgttagtgattcagttcgatttaattaccaaagctagagaacttggagtggtttcccaaac

SEQ ID NO: 1899 - protein, 228 aa, DROSOPHILA
MDGRMGGWLWLWWGLHDPPQQCHGYRRLIYIRGDLLVPDVLDTIAAGINCPAPIAVRPLFTRRAKMMQCSRMTTTLKMTNLLLAVACAAVLMGSATADEEEGSMTVDEVVELIEPFGDACTPKPSRENIVEMVLNKEDAKHETKCFRHCMLEQFELMPEDQLQYNEDKTVDMINMMFPDREDDGRRIVKTCNEELKAEQDKCEAAHGIAMCMLREMRSSGFKIPEIKE

SEQ ID NO: 1900 - DNA, 4472 bp, DROSOPHILA
cgccgatctcaagcccaacggtatccgcgaggtattctttgagttgaatggccagctgcgcgcggtccacatcctggacaaggaagccgttaaggtaggttcagtcagcagtcatcggtgatctttaggcaatggaatcatttgcttgctcttcttccgcaggagatccatgtccatcccaaagcgaacaagtcgaacaagagcgaggtgggcgcccccatgcccggaactgtcatcgatatccgcgtgaaggttggcgacaaagtggagaagggtcagcctctggtcgtgctctcggccatgaagatggagatggtggtgcagtcgccattggcgggcgttgtcaagaagctggaaattgccaacggaacgaagctggagggcgaggacctcattatgattatcgaatagacagtgccaccggatcaaaatgtccattgtctaagctgccaccgcacacacccaatgtaaaattaagtgaaaacagtgataatcttagggactctgtcagttcgattgatcataaaactgtccaaagtcgcctgtgtctatttttatatgaatcaaaatcattcatgtttccgtgtttccaggatcaatcgaccatgagtaactggtcaaattttttagctgtccctgccaaaatatatcggattgcataagttcgtgcccaagtatatttgtaaatttgtcgtagggcttttcccgcaagtcatttgaatcaaatttgtacgattatggaatttttaattcgcaaacacctgtgtcgagattccccctctagtaaatacgtaagtggttattaatgttatattaactattgtgtaataaacgttatacaaaataaaaagtaacgccctggtttttgtagtgtgaaattggtgattaaacatctcgaaacaaatatgtaatgtatggttatctactttatttttttcctaaaattaattaaactgaattaagttaacaatcatgaatgaaacggctccgaagctaaagcctacatgcacttgacaatgaactctaggaaagccagatccttgttcagctcggtgacccgcttaaagtgtctctggacgtacggagtgagtacctcgaccatgttgccattgtagtagaacctcgccttgggatccagaagagcatctccgatcaagtacttgaggatcatgttgcccgcctgcgaatggcgcgagttggtggtccatgccttgacgtgctgcagcagcgcaacccgctggtcaacgttcaactggtcaaccaattgccggagaccgggctcatctcgcttgcggacaaagtggttgataatatcgaaactggctttgggcttgtccaggttcagagccaacacgaaggccttgtgaagctgcttctgggcgtgcagaagggaatgtagggtctgctcctgctccaatgcggcctgccgcttgtccagcgcttcgtttcgcgtcacctgagtgacatcaccgaagcgaatcagcttggagtccgcgccgccggtgtaaaagaaccgattgctcctggcggatacggccagcgcccaaaccctatcgttgtgctcgtccagggactgcagacatgtgttggtcttgatattccacagcttaagaaggccatccgaagcagcggagataatgaacttgccgtgatccaggaactcggctctcagtatggtgcactcctgatcgaaacgttttatgcacgaaaaattgctgatggaccagatgcggagagtacagtccgacgatgaggtgagcacgatctgatccaccggagagaagcgcacactccacacaccgcgggtgtgtccccgcaacactccttgcagcgtgttggactccgccagccacaccttagccgtcttgtcttgcgacgcggtagcaataagcttgttattcggagcatatgcaacgcagttcacctccttgtcgtgggaaagcgctgcgtagcgcaggttgaaagagtacgagttgcgatcctccttacttctgacgagctgccataccttcatgctgccatcttggctcacggatgcaaagccagtagctccgttgtgcgtcatggccacgcaaccgatagtggacgtgtggcagttggcctgttgagtcagagcctcaagcgagcaatctttgtcgtgctgaagcctccaaagccgaacgctgcagtcctttcccaccgaaatcagcagattttgggatgcagcaagggacattaccgtatccgagtgacccacgatcagcttgcaattcatgtcgtgttccgtgtcgtacagcttgaagtgcttgctgttggtggcaacggccaggtagcgatcgtgttcgcccataaagcacatgtctaggatctcgtcgttgtaacccaccaagtgtttaatgggttccagggtttcaacgtcgtagaccaaaatattctgctctgtagtgaccagggccagctgttttagctcgctgcagtgcagcagtctactaatttggaaatcagattgagaaagaatatccctgatcttccaagatttagggtcgacctgttgcagcttgcccgatccgctcgccacgattatcagttgtccctcgtctgcgtacacgactccctcaagctcatcgtacaagggaagaaccttcaactgcttgctttccaactgctcctgcaattgccacacgatcataaccttgtcccggcttacagtcacgatttcattgcagtcggacgcgttgctcttaaagctcaagccggtgacttgcgacaggtgacctcgcatcttgtgcacaagtgtcttcgtctcgtagttccaggcatagacagtgttatccgaacctccggcgtagatctctttgcgcagcacattgggatgaaagacgaggagccaagcgggaccagggaaatccttgagggcacccagacagctgttgttcgagtagtcccacagcctcagtgtggcatctgcaccgccgctggtgcagataagcctgccgcagggactaaactcaactcggatgactggtcccttgtgctgcgccttccacagcttcaccagcttcccagtgtccagctgccacagcctaagcaggccacttcgatgggcagtaaccagatgctcctgtgacagcccgaagcaagtaatcgtatcctcctccacatcgatattgtccagctccgccggcctcttgttatccgccgacggggaagacaagccgtagctatttaggatttgggaggtctgcacatccacctggtttacagctgagccattgaggcagtaaagatgatggccattcgggctccaggcgatgtcgccgccggcgtagaagttcgtgtagcgggcctccgccgcatagctggattttaaaattgttgtagtcttgcaatcatcaggtaattattaagtttatgttaccttttctcgctgatacccgccagcatgattttcgttgtttataaatacaaaaaccgcgtgcgccgcggatcagaacatgaacggaactagttcgaaatgttactttacagagcatgtaaggggatattcgaaatgtataagtagaaaagaaaagaatgatattaacttcaactgtgctaaataaataaagtaccatgaattggtgatttatttttaatcattcgaattttatctgaaaaaatcgcgattggtatacgattggtttttattgacgatagtcgttccgaaactatcgaacctccttgaccgataggcccctttgttttgtccaccactagccaagtaaaagccgtcaaatcatcgtcgcattcgacccaaggaattaaactaatttttgcgtttgaattgtttaaattttcacaaagtcttcgctatgagtactattggcactggagtaagtggtcagcgaactacatatctgcagatccctaacgtcaccctctcgcttccagtacgacttgtcggcctcgcagttttcgcctgatggccgcgttttccagatcgactacgcctcaaaggcggtggagaagagcggcaccgtaatcgggattcggggcaaggacgccgtggtgctggccgtggagaagatcatcaccagtaaactgtacgaaccagacgccggcggacgcatcttcaccatcgaaaagaacatcggaatggcggtggccggcttggtggccgatggaaactttgtggctgacattgcgcgtcaggaggcagccaactacagacagcaatttgagcaggctatcccgcttaaacacctgtgccaccgagtcgccggctacgttcacgcctacactctgtacagtgccgtccgccccttcggactttccatcattctcgcctcctgggacgaagtagaggggccacagctctacaagatcgagccgtccggctcctccttcggttacttcgcctgcgccagcggcaaggccaagcagctggccaagactgagatggagaagctcaagatggatatgaggaccgacgaattggtggagagcgctggtga

SEQ ID NO: 1901 - DNA, 2413 bp, DROSOPHILA
ttctgatccgcggcgcacgcggtttttgtatttataaacaacgaaaatcatgctggcgggtatcagcgagaaaagctatgcggcggaggcccgctacacgaacttctacgccggcggcgacatcgcctggagcccgaatggccatcatctttactgcctcaatggctcagctgtaaaccaggtggatgtgcagacctcccaaatcctaaatagctacggcttgtcttccccgtcggcggataacaagaggccggcggagctggacaatatcgatgtggaggaggatacgattacttgcttcgggctgtcacaggagcatctggttactgcccatcgaagtggcctgcttaggctgtggcagctggacactgggaagctggtgaagctgtggaaggcgcagcacaagggaccagtcatccgagttgagtttagtccctgcggcaggcttatctgcaccagcggcggtgcagatgccacactgaggctgtgggactactcgaacaacagctgtctgggtgccctcaaggatttccctggtcccgcttggctcctcgtctttcatcccaatgtgctgcgcaaagagatctacgccggaggttcggataacactgtctatgcctggaactacgagacgaagacacttgtgcacaagatgcgaggtcacctgtcgcaagtcaccggcttgagctttaagagcaacgcgtccgactgcaatgaaatcgtgactgtaagccgggacaaggttatgatcgtgtggcaattgcaggagcagttggaaagcaagcagttgaaggttcttcccttgtacgatgagcttgagggagtcgtgtacgcagacgagggacaactgataatcgtggcgagcggatcgggcaagctgcaacaggtcgaccctaaatcttggaagatcagggatattctttctcaatctgatttccaaattagtagactgctgcactgcagcgagctaaaacagctggccctggtcactacagagcagaatattttggtctacgacgttgaaaccctggaacccattaaacacttggtgggttacaacgacgagatcctagacatgtgctttatgggcgaacacgatcgctacctggccgttgccaccaacagcaagcacttcaagctgtacgacacggaacacgacatgaattgcaagctgatcgtgggtcactcggatacggtaatgtcccttgctgcatcccaaaatctgctgatttcggtgggaaaggactgcagcgttcggctttggaggcttcagcacgacaaagattgctcgcttgaggctctgactcaacaggccaactgccacacgtccactatcggttgcgtggccatgacgcacaacggagctactggctttgcatccgtgagccaagatggcagcatgaaggtatggcagctcgtcagaagtaaggaggatcgcaactcgtactctttcaacctgcgctacgcagcgctttcccacgacaaggaggtgaactgcgttgcatatgctccgaataacaagcttattgctaccgcgtcgcaagacaagacggctaaggtgtggctggcggagtccaacacgctgcaaggagtgttgcggggacacacccgcggtgtgtggagtgtgcgcttctctccggtggatcagatcgtgctcacctcatcgtcggactgtactctccgcatctggtccatcagcaatttttcgtgcataaaacgtttcgatcaggagtgcaccatactgagagccgagttcctggatcacggcaagttcattatctccgctgcttcggatggccttcttaagctgtggaatatcaagaccaacacatgtctgcagtccctggacgagcacaacgatagggtttgggcgctggccgtatccgccaggagcaatcggttcttttacaccggcggcgcggactccaagctgattcgcttcggtgatgtcactcaggtgacgcgaaacgaagcgctggacaagcggcaggccgcattggagcaggagcagaccctacattcccttctgcacgcccagaagcagcttcacaaggccttcgtgttggctctgaacctggacaagcccaaagccagtttcgatattatcaaccactttgtccgcaagcgagatgagcccggtctccggcaattggttgaccagttgaacgttgaccagcgggttgcgctgctgcagcacgtcaaggcatggaccaccaactcgcgccattcgcaggcgggcaacatgatcctcaagtacttgatcggagatgctcttctggatcccaaggcgaggttctactacaatggcaacatggtcgaggtactcactccgtacgtccagagacactttaagcgggtcaccgagctgaacaaggatctggctttcctagagttcattgtcaagtgcatgtag

SEQ ID NO: 1902 - protein, 787 aa, DROSOPHILA
MLAGISEKSYAAEARYTNFYAGGDIAWSPNGHHLYCLNGSAVNQVDVQTSQILNSYGLSSPSADNKRPAELDNIDVEEDTITCFGLSQEHLVTAHRSGLLRLWQLDTGKLVKLWKAQHKGPVIRVEFSPCGRLICTSGGADATLRLWDYSNNSCLGALKDFPGPAWLLVFHPNVLRKEIYAGGSDNTVYAWNYETKTLVHKMRGHLSQVTGLSFKSNASDCNEIVTVSRDKVMIVWQLQEQLESKQLKVLPLYDELEGVVYADEGQLIIVASGSGKLQQVDPKSWKIRDILSQSDFQISRLLHCSELKQLALVTTEQNILVYDVETLEPIKHLVGYNDEILDMCFMGEHDRYLAVATNSKHFKLYDTEHDMNCKLIVGHSDTVMSLAASQNLLISVGKDCSVRLWRLQHDKDCSLEALTQQANCHTSTIGCVAMTHNGATGFASVSQDGSMKVWQLVRSKEDRNSYSFNLRYAALSHDKEVNCVAYAPNNKLIATASQDKTAKVWLAESNTLQGVLRGHTRGVWSVRFSPVDQIVLTSSSDCTLRIWSISNFSCIKRFDQECTILRAEFLDHGKFIISAASDGLLKLWNIKTNTCLQSLDEHNDRVWALAVSARSNRFFYTGGADSKLIRFGDVTQVTRNEALDKRQAALEQEQTLHSLLHAQKQLHKAFVLALNLDKPKASFDIINHFVRKRDEPGLRQLVDQLNVDQRVALLQHVKAWTTNSRHSQAGNMILKYLIGDALLDPKARFYYNGNMVEVLTPYVQRHFKRVTELNKDLAFLEFIVKCM

SEQ ID NO: 1903 - DNA, 4837 bp, DROSOPHILA
acgcctcccaatcccctctaccacaaggtatccatatgattttcccaaggggcatatatatacatatgtacatacatgtattgtaggttcaacatcattagtagtttactgctattagcagtttaatttgcataactaaattggcctttatcaattatgtacatatattactatatttaatatatatacctagttttattaatgtaaatttttcaagacaattaagctaaacatagctatatttaaaatgaaaataaagttcattggtttacatttgataaataactcttttatttacattttttggaaatttatctacaatttctcttttctccaaacgtggtttttaatacattttttttagcattctagatgctattttaatatataaactatacacatggctaattcccgttttttgttttgtttaatagagccaagaatcacgtttaaaaagtgcaacagtttagtcattcaaatcgtcatcgtctcagcccaaaagtatgctactaattagtttgaactaaaaattggcaaaaataaacaaaaaaaaacttattgtcggttctaaattcaaactaaatcaatttaaaaattggctagggaacgaatgcagatttcttctaaacgttgctcaaaatcaacacaaagtcaaaagaataactgttttgagcagctaattaccaatgctaacaatccctatcaccttttcaaggatttagaaaaatttattttttgaccaatttttgcatattttggtaaggtaaatttacaaaaaatggcaaaaaaatagaaatacaatttttggacacagttgaattggaaatttaattacgagctcgacgagatatggcattccatactcagacaattatttttaaagttgcgtccaagaaagggaatgtttttactccaaaaatggagaaacattcaatcacatttacgtgtaatccatgctatatttcttttatatttataaaaaattcagctcaaagtgcgtaacatttaaaatgtaatttttattttttgttatttcgagttcgtaacctgtcaagaacgtggtacaacaagttgaagtcatgctttcctaatactaataaaaaaatgtttggtttcaaaaaaaaaaaaataggagaaagaagaattaacaaagtatgtgatctgatgatgacctttatgggatccctggatgatcgccgaacggcaatgatcagggaaggattctctatatatggcctcctggttgatatccaatgctgatatctcccaccataagctatgataaccagcaactaagcatttcgcacgccgcgcaactccttgtcggccttcttgagagtgataaagttgttgagcgccttgacacgcaatttcgaccagaccatgaagttgcccagccccagaatggtggccgcatgcagagcagctgcctctggatagagaactgtggcacagcccagccccgatggcagattcaagctggaccacacgtccacctgcatgttgtccgatttgacgggcggacaattgattaccggatagttggtgctgccggaaacgactggacccagtccattggatcgcccggcgacggccacaaagatcaagttgctcatcaccgattcatattcgcggacaatgcgcaacgtttcctccggtcccttgtgggccgaactcacgcgaagttccacattaaggccgagggatcgacagctggtggctatcttctcgctgtgcgatatatcggaagcactgcccatcagaatgacaaccaggtgatccttcttgggcacaatatcagccagttgttcggccacccaaatgaagttcctctttacggtatccaaatcgctggccgtcaccgatgccagattgcgatacacctgcttgtcgaccatcaaacgcttgtcacccgctggccacaagcgccacgaatcggaatcaatgatatcggccagaactatgttgccatcgtcgcagataccgaactccactttcatgtcgatcagggcgcaattcttggtctgccatgccctctcgagaatctcgaagaccagcagtgtggttctacgcataatgtccacctcatcttggcctaaagaaaaacatgttgccagttttagatttgtatatgtaaaagtgctttatgccgcaagtacccaccgatcaccaggccatttagctcgaacttggcggagacaatttgctcctcgctccactggggatcgtggttggcatcatccttgaagaacgtctcctgtttgggcggcgagaacctgcgcaatgcaaatgtaattgtagtaataaggcagcaaattgaggcaaatagatgaataaattaaatatcaagtgacatttgtattacttctagtataatatatattctacagtaactcaaagaggcgaacttgttggcaatcaaagccataaaaaagagctattgccttggtatgacgacatcaaatgaaacgaatttacacatagcatctcagcagcattgccctggcgaaaatcttgacttgaattacagatttcgtgggctttgagttcacaaacgatcaatcttatcagcgattgttgaccctgctgcagtgcatcgattgcatttgaatttgtttaccgcaagcggacacagataacacacagatcgcaacaaatcgaatggggtgataacccacagccagccattggctgtttaccaacctgtagccctcgggcacgccgacattgcgcttgaggaacgaaccggtggccaggcgacgggtcacccactcaatgggtatcatctggcacttgcgggcgatgaaggccttggcgccgcactgcttcacataggcggtgcgaatgcctgtcgaataagaagcattaattaattaattgatcaatttggttagaaattgactaaaatgcattatagttgatttgacttatatggtttagcaactcacctgcctcgttgagcagccggaagacctgaccgttggtggtattggagatctccgccttgccggccagatcatgtgctttgacaccatcgccggcggtgatgcgatccttgctgaggagcaggcaaagtcctggctgctctggcagatcgtacacctgtttggttttgccctcgatgatgaccttgccgagcttatagccctctactgtggaaattcaagttgcagttgcattcgttacgttcggtgtttagttagtatttagaatcgatgctatatgatatatgatgatactgatttaaggaatggaaagacaacttgtttacgaaatccacaattatcttgatttaaacaatggaaagccagccttcttgtttacagcagacagctcaataaacagcattaaaatattatcagaaccaggaaaatattccgttgttttatttttttgagtaacccgaataactgtttaaataaatccaaggctggcgggaaaacataaacaactgtcttgctttccatcacattaagcttgtcttttattgatgaaagatcgaataaaagatggtagctttggtactatttacgttctaggcacaacaattgtttatttggaaaccttggcgatggataaacttactggatgctgttgtggtggtggacatctcgttaatcgcacgttgttggtcacttcactttaagaatcgaaattgaaatcaattggctgctggctgtttcacgtgttgcgggctttgctttatgctcgatattcgctggtgccttccctctcgctctcgctctctatctctctctctgtctttttcgctctctccgcttggctctattattacaatccgcaaactccgatgttcgtctgcatcaaagaatcgctccaaagcaactgagccgtctatagaatcgccggcgcgactttatggctcgattttcttatcgccgaaccccaacaccaatgcaaagagatccatgtgtttgcgctcgcagtgtgtgtgcttgcgtgtgggtgtgtgtgtgggcttagagtcgagtataatgctgattggtaataccctgcagtttcccaaatggccgatgaacaccgcgcggggcaacttatgtacttatgtacatacatacatatgtacattttttggcaatctataaagctttgcttatgcgtgacaaattttattgtcgcattttatttacaaattttgtttctaaaatattttctattcatttggtgactttctgaattttgaatttttcttgatttttgtccattctccaactcctgacatccacctcgtcctgcctaacatgctcatcctgtgatcctgatctctgtctttgtctctgtctctatctctccagtaggtagcctctttatcgtcttgttggctgaactgctctttttggtgattgtatgtgtgtatgaaacttttccttgagggaaaaaacgtatatttctggtgaacccatctccgccgtgtcaatttgctccttctagtgttccaaagcattgcgttgcgatcgtcttcagttcagttgttttgtagtaaatatatgtattttcacttctctcacaagtggtttatttgagtgtattccttctcctcggcggttttctgtcttttgaacaaaccaacgtagttttatgctcctctttagaattctcctcctcgctatcctcctcatccatcaccagttggccatttaatgtcggaaacttaatgaccggcaaaattttgcgctgctgattgctttcattcataagcttcttgatgagattagcgatatcctcacgcttcttggttactgtgagcaggtcaaaccaattgctcagctccttaatgggcagtgtatagtcgttgatgggttttgtgaagaattgc

SEQ ID NO: 1904 - DNA, 1815 bp, DROSOPHILA
agcgattctttgatgcagacgaacatcggagtttgcggattgtaataatagagccaagcggagagagcgaaaaagacagagagagagatagagagcgagagcgagagggaaggcaccagcgaatatcgagcataaagcaaagcccgcaacacgtgaaacagccagcagccaattgatttcaatttcgattcttaaagtgaagtgaccaacaacgtgcgattaacgagatgtccaccaccacaacagcatccatagagggctataagctcggcaaggtcatcatcgagggcaaaaccaaacaggtgtacgatctgccagagcagccaggactttgcctgctcctcagcaaggatcgcatcaccgccggcgatggtgtcaaagcacatgatctggccggcaaggcggagatctccaataccaccaacggtcaggtcttccggctgctcaacgaggcagcgacaggcattcgcaccgcctatgtgaagcagtgcggcgccaaggccttcatcgcccgcaagtgccagatgatacccattgagtgggtgacccgtcgcctggccaccggttcgttcctcaagcgcaatgtcggcgtgcccgagggctacaggttctcgccgcccaaacaggagacgttcttcaaggatgatgccaaccacgatccccagtggagcgaggagcaaattgtctccgccaagttcgagctaaatggcctggtgatcggccaagatgaggtggacattatgcgtagaaccacactgctggtcttcgagattctcgagagggcatggcagaccaagaattgcgccctgatcgacatgaaagtggagttcggtatctgcgacgatggcaacatagttctggccgatatcattgattccgattcgtggcgcttgtggccagcgggtgacaagcgtttgatggtcgacaagcaggtgtatcgcaatctggcatcggtgacggccagcgatttggataccgtaaagaggaacttcatttgggtggccgaacaactggctgatattgtgcccaagaaggatcacctggttgtcattctgatgggcagtgcttccgatatatcgcacagcgagaagatagccaccagctgtcgatccctcggccttaatgtggaacttcgcgtgagttcggcccacaagggaccggaggaaacgttgcgcattgtccgcgaatatgaatcggtgatgagcaacttgatctttgtggccgtcgccgggcgatccaatggactgggtccagtcgtttccggcagcaccaactatccggtaatcaattgtccgcccgtcaaatcggacaacatgcaggtggacgtgtggtccagcttgaatctgccatcggggctgggctgtgccacagttctctatccagaggcagctgctctgcatgcggccaccattctggggctgggcaacttcatggtctggtcgaaattgcgtgtcaaggcgctcaacaactttatcactctcaagaaggccgacaaggagttgcgcggcgtgcgaaatgcttagttgctggttatcatagcttatggtgggagatatcagcattggatatcaaccaggaggccatatatagagaatccttccctgatcattgccgttcggcgatcatccagggatcccataaaggtcatcatcagatcacatactttgttaattcttctttctcctatttttttttttttgaaaccaaacatttttttattagtattaggaaagcatgacttcaacttgttgtaccacgttcttgacaggttacgaactcgaaataacaaaaaataaaaattacattttaaatgtt

SEQ ID NO: 1905 - protein, 431 aa, DROSOPHILA
MSTTTTASIEGYKLGKVIIEGKTKQVYDLPEQPGLCLLLSKDRITAGDGVKAHDLAGKAEISNTTNGQVFRLLNEAATGIRTAYVKQCGAKAFIARKCQMIPIEWVTRRLATGSFLKRNVGVPEGYRFSPPKQETFFKDDANHDPQWSEEQIVSAKFELNGLVIGQDEVDIMRRTTLLVFEILERAWQTKNCALIDMKVEFGICDDGNIVLADIIDSDSWRLWPAGDKRLMVDKQVYRNLASVTASDLDTVKRNFIWVAEQLADIVPKKDHLVVILMGSASDISHSEKIATSCRSLGLNVELRVSSAHKGPEETLRIVREYESVMSNLIFVAVAGRSNGLGPVVSGSTNYPVINCPPVKSDNMQVDVWSSLNLPSGLGCATVLYPEAAALHAATILGLGNFMVWSKLRVKALNNFITLKKADKELRGVRNA

SEQ ID NO: 1906 - DNA, 2364 bp, DROSOPHILA
tggatattcgagagttggtgcgtgcacttctccgcgggataaaggcaaatttcagtctgaatgtcaaagtttgagcctggcagtactttgaaatattcataagaacgaacactaagaaaaacagggttaaagttagctctcaactacgataaataaaaaaatgtatgctggctaaaaaaaagagcacgaaataacgaaatttaatgcaaggtcctgaaaataggctcgtgttgcaaaaaaccggaaagcaagaagccgaagctcaatgttgaaacatttgtttagtaccagagatatgaatttccaagtagaactcacacacggtcataaagcaataaagcggaatcatgtgcagaaatttttataagttaggtgtatcatccaagtggcaaatgctccaggatcttagaaatgcgcggagtgtgggatttgtgggggcgagacaagtgcaagtactttccactttttttggccaaatcccagcaaagagcttaaggtttcagctcaattgttttgcccgactttatttcattgccatttttatatttccccatcttgggtgtgccgagaaaagctttaagctaaatcaaaatgcatatttacggaaaagaaaaatctatgaaacagaaatcttatagttagatactttgctaaaataaaaaagaaacgaaaaaacctaaagctgttccaataaatctacattttattcattagatcacccggaatagctttaggaagtaagtataaatataatgaatctaaagtttcacaaccacgaggttagtttgtttaatattttaagatcaccagttggccaagtatttccattatgaagggtttacacaacttcacttgggtcatcgctgtttgcacaatgcttctgtttgtccatcgaaaacatagaattgcaaaacacctgcaatagatccgattccgtagagatctccgaggtatatatagggctcgggtgcagttggtgaagtcaattgaatttgctaagtcaatcatctacaaaatcaaaatgcgtgtaatcttcctcatcgttgtgctcgccatggtggctctggctgctgtccaaggacgtcgtcctccaggacttccgcagggaggtctgggaccacttcagggctctggaggactccagccgccgcagggaatacctcagggacctccccagggactcccacaaggacctccccaaggtggcaactcatcctcctccgaagactcttcctcccaggagagctccagcgagtcctccagtgaggcgtccgcctagaaactcgatcgccgagtccttcatgtaaaaacattcaaaaatctttaaataaagatatatattctgcttatttcaatatataaaaccgtccaccgattccattaactgcaccgatttccatttcgaactccgagtaatggttgcgttgctcctgcccgaggaatggaaatggaaatgggcctgggtgtgggtgtgggggcgtgtctcaaatcggttgcctaaataagaaatcattttatttgaaaagtttccctttggcacgccccctccagctgccaccccactttttggaaggcagaagacggcgacgtctgcgtttggcgacaccagcaacatcgggcgaaacaaaagcaacaagggcaacagcggtacaacaaagcgaagacaccaacaataagctgaagcagctgaaggcgttaggaagtacccacacgacttggaaatacctattgtacgtatgaattaaaagcaaaaaagaacagcataaaatattactttcaaagagcgtaaagctacgtaactaacaaggcaactagataataagctattaagataacaactatttgttaaatggctttaaatgattaggtacaaatcaaaggatatttcgaaatgataattgtgacaactgataaattatgcaactgtataaaaaccaccgataactggtttcaaaaaattaaatttatatatccccctttttatccaacaaaaacacatatgtatgtacaatataattttcgaatgggtaatcagatagcgcatatcctgtcaaaaaagtgactgccaaaataagaccaaaacgatgaatagcaaaggcaacaaagttaaactgtaacaataaccaaagtcaaagtttgtcggcaaagttttcgcctctttcgtccttgttgctctccttgttgttgttgcatgcgtgcggctgtgtgtgtgtgtgtgtgtgtgtccacaggatacaaattcatttcaattggttatatgtagagaaatgggtttgagtggcttggctgaaggaagttgaaaagtggaaacgacgaggaatctgtgtaaaatgagtttggttttttccccgcattttattttat

SEQ ID NO: 1907 - DNA, 364 bp, DROSOPHILA
tcaatcatctacaaaatcaaaatgcgtgtaatcttcctcatcgttgtgctcgccatggtggctctggctgctgtccaaggacgtcgtcctccaggacttccgcagggaggtctgggaccacttcagggctctggaggactccagccgccgcagggaatacctcagggacctccccagggactcccacaaggacctccccaaggtggcaactcatcctcctccgaagactcttcctcccaggagagctccagcgagtcctccagtgaggcgtccgcctagaaactcgatcgccgagtccttcatgtaaaaacattcaaaaatctttaaataaagatatatattctgcttatttcaatatataaaa

SEQ ID NO: 1908 - protein, 85 aa, DROSOPHILA
MRVIFLIVVLAMVALAAVQGRRPPGLPQGGLGPLQGSGGLQPPQGIPQGPPQGLPQGPPQGGNSSSSEDSSSQESSSESSSEASA

SEQ ID NO: 1909 - DNA, 2585 bp, DROSOPHILA
gtcaatcccgaaacggtgagaatgcctttggcagagctcaaagtaaagctgatgtctcatatcccggagttcattgcaggaactgcatccaaccattgaggatatctacgtggccagcgtggatacaggcaggggcggagcccgagagaccctgcgcatctacgacacggccggattgcagggcgagcagcagcagctgccacgccactaccttcagtttccagatgcattcgttctggtctacgatcccatggatccgcgcagccttgacatgctggccgacatcaaggctgacattgagaagcacaaggagaagaaggagattcccgttgtggtgctggccaacgtgagggcacgagcagccccaaatcccgtcgagaaggtcatggaccgcgccaacatctggtgccagcgagagcgcataaagcactacacggtgaacgccatggagcgtccctccctctacgagccattcaccacgctctgcgcccggctgcacccaatgcagacgaagagcacgttccctcagctgcgccaagttatgcagaaccggcagaagagcgaggcttagctgttttgaacggacgaaagggaagagatataatttaagttttattcgggagtgtcccaataatctccgatacttaacagtagctatgaatgccacagatttggctttaagttcaagagatccttgggatctccccaatcgtactcgtattgatccatttagagtctacttgccttgtattaactgttgtgctttaatgtgggccagagcccaagccacttgtacttatgtctctttgtgtgtgtccaattgtatctactatttattacaccgacatgtcttctctcattccgcgagaattaagcgtaatcagtattcactgctcaatcgcagctcaaatggcgcgtagtgattaaataaccatgccgaaattctgctctacggcaatccccttggatcagtcgtctgcaagccccttcctcgagcgcaatgctttcgcgtgccgcttttcttactgttctcctaacgctgatctatgccagccatgcggctgcgggattgagcattacagttccgggcacaaagtggtgtggacccgggaacatagcagccaactacgatgacctgggcactgagcgcgaagtggacacgtgctgccgggcgcacgacaactgtgaggagaagattccgccgctggaggaagcctttggcctgagaaacgacgggtttttccccatgtaagcgtggattccatagcacccatgctgatcttgggatcaataatcgtgcgctccccgcagattctcgtgtgcctgcgagtcggccttccggaactgcctcaccgctctgcgaaacggacactccctggctcttggcaaaatctacttcaacaccaaggaggtgtgctttggctacgggcatcccatcgtttcctgccaggagaagcaggccgacctgttcgagacacgatgtctcagctaccgagtggacgaaggtcagccgcagcgctggcagttctacgacttggccctctacacacacgtaagcggcagcgaggaggactcccgagattgaacttcgacgtccggcgataagccctcaattgtttacaaaacagattgtgcggggagcgaaacctaatgtgattaggattttgacggtaggttatttgtgtaataaattttcgaagcttaaggctaagtagcctggaattatattaaaaactgaattcggaggctcaattaaagttcaaaatgatcaagaaaatattcggagtattttatatttcatccagattaaagtgggattaccttataagtaataattaatgtgatgtgcgcatcaggtaatgtaatcatcttgtctacaaatcgttgatatcatgtcagcccgccgacgctgggattgtgaagaacggcatgtcgtagaactgccagaccttggccttggacttgtccacctggtagcggatacagcgcttgcggaaggtgccctcctggtactgcttgcatccggtggtgggatgtccgttggcaaagcacctgctcctgctgccatagtagatacgacccagagttttggccgtgatgctgttcactgcctgcaggcaattgataaactgctgctcgcaggtgcacttgaggctaaattgaaaagtgtctgtcaatgtgcacaaaatcgataagggactttaggaggtttaccgcttacatgggaaaccagtctgtgttggtgggcagtccgtggagtgctccgtgggactcgataatctcgtcgcaatggtcgtgggcacgacagcacttgtccgtctcccgttcgcggcccaaatcctcgaagttcgccgccgtgttgcccggtccgcaccacttggttccgggcaccgtgatgcccgtatggggaactggtggcagtgcctggttgtagatgtcctcgtcctcaaagatagcctcgtcgccgaaggcccaagccatggccagtagcccaaaaaagaacgcttcgcgcagcagccacatgtctcagcttcggcagtcgcagcacaactaagtttgatttcgttgacttgagctgcctttgc

SEQ ID NO: 1910 - DNA, 522 bp, DROSOPHILA
atgctttcgcgtgccgcttttcttactgttctcctaacgctgatctatgccagccatgcggctgcgggattgagcattacagttccgggcacaaagtggtgtggacccgggaacatagcagccaactacgatgacctgggcactgagcgcgaagtggacacgtgctgccgggcgcacgacaactgtgaggagaagattccgccgctggaggaagcctttggcctgagaaacgacgggtttttccccatattctcgtgtgcctgcgagtcggccttccggaactgcctcaccgctctgcgaaacggacactccctggctcttggcaaaatctacttcaacaccaaggaggtgtgctttggctacgggcatcccatcgtttcctgccaggagaagcaggccgacctgttcgagacacgatgtctcagctaccgagtggacgaaggtcagccgcagcgctggcagttctacgacttggccctctacacacacgtaagcggcagcgaggaggactcccgagattga

SEQ ID NO: 1911 - protein, 173 aa, DROSOPHILA
MLSRAAFLTVLLTLIYASHAAAGLSITVPGTKWCGPGNIAANYDDLGTEREVDTCCRAHDNCEEKIPPLEEAFGLRNDGFFPIFSCACESAFRNCLTALRNGHSLALGKIYFNTKEVCFGYGHPIVSCQEKQADLFETRCLSYRVDEGQPQRWQFYDLALYTHVSGSEEDSRD

SEQ ID NO: 1912 - DNA, 15097 bp, DROSOPHILA
aatgaagttccaaaaggtattggcgatgcgttgcgtacttgagagttttgtagcgcgtttaggtactgtggacttccactcgtcaatcttttcctatcaggctgttcatacctagcaaaattctcaactttttcgagcccaggtactgtttttttatagctagtcggtgagtagggctgttgatgtagtgttccagtggtcaacccagttggctttgataaaggaaattcacctataccatcatttccaggaaaattattattagctgagtagttgttccttggaaacgtgcgcggaaaagtgtcttcgtatggcctttcaaaatgtttcgagtgaatttcgcactgctgtgaaggtgctgcataacttgagagagatatttctttcggaacgtataagcctggggaaaaaaggggaagcaaaaactgttacatgagaattttatgattattatgctgtatgtaataaatgtaaaacacgactgacacacatgaccatacatatgtaaaggttcacatccattagtttttatttactaataaaaattgtaatttatatgttcatagatgtagtgcgtaaatctaacagtaagaacgacatgtatatacatatatatacgtttaaacaggtttataccttcgatcaagcattttatctatcaataacgtgcatttctttaaagtataaacaatttgttattgaacaagtacacaataacatgacaccaaaaacatgttagtcttgccttctattggtgctgcgtcatgtcttagatccgttgtattttgtttctcaaaagattgaattaattcacgcacatttaccttctcatctaagtcgcaattgacttttaggtcttcgccacttattactttaaattcattttgtggtgtaaaatcgagaaggctttcataagcatcgtgttgtaagacacgagaactttccctgtttcgtaaaatttctagttcaaggcgctggtactccaaaaagtatttttgaaaattttcgagggaatgtaatcgattctgcacatcgaaagcaaagttagatgtcagcctctctccaaatatataattattaaagctaggattgctgtcatctgctctcccaatatgaggttcagtctgccatgatgattgactttcgttagattgaaaagagtctgaaatattagtattaccaaagaaaataccaagtggaatcacagagattattcagcttttcaaggcttgacatctaatagttaatgggtggcatgatgacatgtttattatttcagaaaacttgagacatagaataatttttagttttcttattcatatacatatataccatgctagttctagtctgcaatgctcgatgcttcacaacatatattttcattgacagtgaaccgtgaaaccgcctcgttgttaaatattaatcatgtatatatacttagaaccaaagcacaattctgatattctgatatggaggttttggattccgcctatagttccagagctcaacactatggaagttttcaaaaaataaagaatactatgcagtcctgtggacttctctgttactaacgtttctaattttttgtttcacgaggaactcccacataggcccacatggttgttaataattgacgtttctctagactctagacccgccagcatcaaggttttcgaggtatgataaaggatgacactagatttgcttaaaagtatcgaacaggtggaaggaaccgactctataaagtagaagcttcttcagaagctaagaagccattcatggatttataaaattatgaaatataattaaaatatcagaagattttacttaccttttggaagttctacacttcgacctccccagccctgagcaacgcatggtgtatatgcaagatccctttgtggattcgatggtacaatgactgatcgtggcgaggaagcaacggcctacgaaaagattcttttattaaagaagatgaattgggagacttatacatttgtattgcgccttgaagaaccatgaggcatgggctcattagcgtccgtccagtccttactaccagcttgggaagacggaattggtgttaaggcaggcggtgaaaaactcttggtgtcctctagaaaggctgagctcgctgaaccagtttgcaaagctgccttccaaggagactgaacgacttgaagtcctggttttgaatacttctcaattagctgattttgatgaatattcaattggacgcggtgctttccagcatcagaatacgccggcaaaatgtttggacttagaacaggcctttgttgatactgctgaaaatctggaataccagatggatgatattgagtccctgaatgggattcatcgactacccaattatcagcctttctgcggcgcttcgcaaaaagttctgcaccttcatattttatgaagttggttgtactcaagttgaaggcgttggcagcggagtcgtcggaagggcggcaggagcggcggcagcggcggcagcggcggcagcggtagaggaagcataagtgataaagcatagcaaacgaattttacattatttatttagatggaccttttaagaaaattttatatcaaaataatatttgtaaaacaagttataacttccttagttataattagttttagaacttgaattgtaaggaaggaagcgtaagatataaacgacagcttacgagcggcttacactaaagtcaaatggtctaatacaaaattccagaaactagattaatgaattacatgttttaatgttacattgaaagttagaaatttaattcgagtttatttaaaattacaaatttaataatgttgtaactcaaatagttttctattgtggctataaatagttaatctaatcacatctaaatttagaaaattacctcgtccttgatgaagttgaagtgcagttattagttcagcgcaattgtcaggcgataaaaggccagcttcaacgttaattaaatcttttagcgaattataatcacgaacttttccgtttgggttcattataagctttagcggtattttttccaacttcgcaacctccattgtggatttcgtttcagaattttctttaaatggatttatagcatcattccctaaatatgtaaattattgcatacttaaaaattatgacttttaagattcttgtatgtatattttaaatgacaatataaacatttggaaaaagtgctattttataagtatgttttaataagtttacgtatatgttaacattttaaaatggttttcatatgtatctactcatacattccatagaagtacattcgtgtataaactgtaattatcgtcatttgggaaaatactttatttgggcgataataaggcgcgactaaaaacaatattggcatacagaaattttgaataagactaaaatataatactttaaatacgaagcccaggttaacagttattaaatttgaaaatttgtatattatagaatttgatagtagcttcgggacgtttcttttttaaactaaaaataaatattgtaattataatggaaatattctaccaattcgcaaaaaatgaaatgcgaaagttaaattgaaatacggtagaaaatgtatatcttatatattataccgttaacatgtttaagttgtagactttccaatgcgtttttcaaaatagtatttataatgaacaatatgaaataataaaatgaaaattctttcagtcgcttttttcaatggtaaaaaatcaatacgaaagtttttttttctgctgactagaatcccttaatgaactgattgaatttcgtcagaaatttgcaaagcagtaacaattaagtatgtatctgcagccaatttgataaagccatgtccgcttttccgtctgttcgttacaaggaaaactagttttatataataaataattacattataaatacatatttttactgcagggcgaataatgccaagtttataaagagccaacaacagttagctgatttttactggtaagtgaaatttaaatttttccaccattgtttggaaaatcttaaacttattttgtttgtatttattgacttcatataggaaatttgaccttatccaccagtttggctgaaaaaaactataaataactcgaactgtcgttgttaaatgctaggcatgcttacttaacaaattttgtgtaaatgccaccaattaaaaatatactcctgcatgcggctattgaacatggcccaagagagcaaatatgtaagtaaatcattcttcgtcataaaaatttattagtattagatcttttgtacatgtgttgaaggtgcaatcgtcacttgtatttttttcaatatttttaaaatatttcctacatgttatattttttagttcattacattacaacagaaaattagtgtcgcaccggaaaactatcaagactgcactgtacgtgtttattactggggaacatactaatacattaattttatttaacgtataaacagttgaattgtttatgttaaaccaagttaaaaataatcgttttattataaaaatctattcaagaaacttaaatttttaacaaaaatcacatacaatgggaaacggggtatccctgttatagtggagagttagactaatgagatttttcttgaccactgtactaaaagttgcaatcagtgttataataatacaattgtaggaactagaattgattaataactgactgacaacaaaaaatattgaaaaaaaacattaccttgagatccaccttcatgaacccatttgtctgagcgttttttgcgattgacatacatagactgacccttagaggtttgattacttatatcgcttaatgaatgtgaaattcttcgagctagctcgacttggtcttccactgtagggtgtagtgttggagaataaaatgcagacgaggcatatagctttcctattttaaataagttgattattgatgttaaaatatttctactaaagttttattttaaaggcgatacgtaaataaattgccttagcgcttttgtagcatgcgatgtcgttcttttaaacttatggaattacaattttaggtaaacgcaaattagtcatgttattagatagcctaagtaaaggtactatagtacgactcttacgtatcaccttttcttaatattaagaatcatatcatagaacttacggtttttcggtaatatttcagcagcatcggtcgcaggtgtaaatatttttcgcaaatcaaccgtcttcgacacattagcggattcctaaattattaaacaaaattaaacttgaaacatgctcatattctgcgaccatgcctccaaaagttatttataattacttttctttcttttactaaactatgcagctacataatacatatgaatgtacgcataatttttttttatctatttcttttggaattattgaccaataagtttaataagaaatgataaaagtttcggaaacagataaaaatgtaaaacttggaaggaattacattactttcttttcctgccaaagcttcttactgaggcttaataaatattgacgtttactaggatcaataagatcacttgggcgatagcccctttttttctctactgtacaattcatattgttatgtacaactggtatctgctatcaatatttatttgaatttaatagtaaggaaatgtattgacgactgtgtctatttgggttcataagcaaaaagagaattacaaaaaattaacacttcttccaatttaaatttgtatatgcatacaaacacaaaacatatacttttctgtatagagcgcaatgtgaacgtgttcgaaaagttcatgaaattgctaaatatagaatctctttgggcatgtgcgtcaaagagcgattgtatatataacttgtatatacactgcctaaatataacaccggacccataataatgaataacttaaatatttttcatttggtgctcttatctacatatgatttaattatcagcatttttagaaataattaaaatatgattggtttataaactttaataaaaaaacaagctaattagtctataatgtcattagatttatactatccatattaataaaagactacaaaaattaagttagttcgctactgttttaataaatagacttcgggtgtataaggacttcatgagcgttctcttttcgaatgtcgtgtttttgttccgattttggtgtcagcgtatgtagaatatatatttagaattggctagctgattgatgcgatgcacatctgtggtcggcattcgcaaacgtatatgaacaccaaaagtggaggctcaaagatctatctatacgagttcgagcttacttggctcattgcaattaaagcgttcgtccctgtctttgttttgtctttcggtttgtcgatcagtataagtcttcgatattgaatcctggaaaaactttttatcaaccgaaaacacctctaaacacaagaatgaaaattccgacattatatatatacacgaatatatccagttccccgacaattaaattggaaaatgaacaaaacaccctaagatagacagtctcgaaacaaatgttaaattacccttttttttactatggtatcatagaaacatttatagacaaatggtaaagttatctttaatattaatgggattaatattaacatattaaaacaaaattaaatctttatacgagccttgggcttcggtggcctatgccttcaaattgggaacgtacaaagtaagagtacacatttttgatttaaagtggatagctgaaaaccgaagattataagaagatgcgtctggatcaccagcagtgttacaacggtgagctcggctctcactacaagaaatgtttaaagctggcatggataagtatgtaaatgtaagctgaaagctttgcctccaaagaagcgaagcataaaaagaaaaatgctgcatagcctatctgcaataccttcttcatcgccacatatcagttaatgaacacacaaacgaacaacaccagttagcgaaaacgcgttaacgctattaaactcttggacaactcaaaaacacggtggtactggtaagcgacgtcagtgactggtatcaacagaaaatatatttttgtactcctctaatgcactaggcgaccagtttgcaggatcggttgactctaacatccgataggcagatagaatataggatagaataggatataataaataggattatttagattccactaatctagaccactcccatgaacttcttaaccaatttgatcacccttagctgtcctaaatcccccagtttaaactaaagtatacaaaggatatcagttctcaaataaatcaataccagtcatgacatatgacaccaaacaaaacgtgaaaccactactggcatctcaccaatatataacttcaacaataaggcaagaagaaacaaaggcccaaaaacaaagtttaaaataataccctaaaaatttccaattacctcaagttaattacagctgaaacacaatgcgacgtttgattttgcataacactttcaaaatgttttgaagccgtaggaactttcgcaataccttcataccttcgcattaatattttgaagcttttatgcgatataatatgatttggtcgcttattaaaataatgaaaaatatctgtaatatttatgatttgaaagccagaatcactctttactcatcacccacttatgattgacttttaaaacagggaagatttatagtctattaaaaagaaaaatgcaaaaattgatatcaatccaaacattttttaattgttggcgtgacagccttttccgtgttgtgggcagtcagtcgatcgaattgtactttgttattgagttattgccgttactcgactaaaataaatttctgtgtttcttgattgttcaacgttgtttgccttgtggcaaacacatagttagattaaataataaattatgtttaaagaagtcaatgttctaggccggttaaaaaaatattgctttgaactttacttactttactggctatatttttttcctgatacagtgtcgaggtgggtccgccgcgctcattttgatattgactgtgtaagtcgagctctccactttgacattcattttgtttaagctgattttgtgcactaagctgcttagctaggatctgctgcttatggatttcatttgccagatcattctgtttctgaatgagttttagttcttgttctttaagctgtgttattttttcctgtgcttttatatttatatctatatccgatataatgttcagaatttggttattaaaatccttctgcaatgtaaaaattcgaaatacacataataaagttatttaattcaatgaaaaaaaacatctattattgtaatgtgttaatcgacgtgaatgattctcgaccacttttacgttaattcggataacaaagaaattggagaaattacagccaaaagtttttccgaccttatatagaattacatatgtcttcatcgatatcaacagccgagttaggtaagttcatccttttttagtctctctattttacggctatctgcatgaaacagtcccaacagtaaaaaaaattttatgttcaggatgcaattgtaactttcttttcacctcttcaatagatgttttcattgcaaaacagtaaagattgtcatattccaacaaatggttatgcactcgtctgatctgcacgattaaatgtaccttcttaatacatacaattataaagaaataagtcttaattgtctcggctggaggtactgaaccgataaataaataaactttactcaactcttaataatcccaaacacgcggtttatccgacataatggctcaacaattttctggcaacacttttattctaaattctttggactctatgttgggtgttagtatgagcagatgtgaaaaaaaatagctatggccaatttgacaagaaaaattgctttttaaagctacaatattatgaagtggttcataggcacaaatacatgtatgaaaaagttttgatatattttattaataccatctgcgtttgaaatgaaatgggtgatgcagtgcattgaagtacattgacacttacaggtttatttagcgaatcatggtctgctttagtgttttcggccgtcaaatcagatgcactggatgtttggtcattgacattctaaaaaaaagtcatttataacgtccaatcaagattaataatatatgattgcacgatgctttaggtaatcttttggaagctccatattgtaataataaagggtcaatatttttaatgaaatccagtaaccattaatataaaataaaaaattagatttgaatatgtaacacatgcgagtaaacagaactgtgaaaggagttttaagcttttaagaaaaaaatgtgaccgtacaatttgtaaacatctccgaaacatttgttttcacataaacatttacatatatcttatcttttacatatatcttactttggttgatttcaataatcaacacccgtcttttaatgtacaacaaaattaaaatttgtatgcttataagcctatttacttacttggtgtagttttcaaccttatttaccaaattacttattcagatataatatgtgtcatagtacattttaataaaaacaaaggagaatgctatagtcgagttccccgactatcagatacccgttactcagctagagcgaatgcgaacgcggaatttcatttcatttaatttaaaaatttaaaaattgttttaaagtgtgggcgtgtcagttttaagcaattttagggcgttttgattgggcggggcaaaatgttttttggcgaatctatagaaattttagagactaaaaatattaaaaaaatatatccaaaaaaattttcaataatgtgggcgtgtcagttttgggcggtttcagggagttgaagagggcggggcaaaaagtttttttgctagtcgatataaatttacaaggctaacaattatggaaaaatgtacaaaaacccgtgcgaaaaagaatgtccaaaaactgtttaaaaatgtgggcgtggcagttttggcgtttttagggcgttggggtgggcgtggcaaaaagtttttttttcaaatcgatagacatttacattactagaatctgtatgctgaatcccaatcgtatagcttttaaagttcctgagatctcgaccttcatacggacagcgaacagacagacacggctagatcgattcggctattgatcgggatcaaaaatatgtatattttatatagtcggaaacgcgtcctactgcctgttacatacttttcaacgaatctagtatacccttttacttgagaaacttgagagcagtgttatagagtgttttactctataaaaaatcctaattatttaaataattctttattaacatttatttgtttaatagatttgtagaatccgttaatgtcgctgaatgccagaaagcaagcatgcacacaatgcaccccattttatagatgaatgttgctatgaatctttatctgattaagtgctaaacctacaactaatgaaaacatgcatgttgtacaaattatccatagtaatttgcaaaccgatctagcttttgattagtgagtggtgttacctacaggcttaattggcgatggaatgctgttttttgtgttttccatcttcaaatcaggcgcaatggttgtgggttcataggttttctaaaaaacaaacacaatatttatttagtctactgggtttttaatctcctagcttcctataaaagtatgtatcaggtagaaggaagcgtttccgacacaataaagtatatatattcttgatcaggatccataaccgaatcgattattttgtatgaatgtcgtttgtatgtaagtaaagaataatttcagatttcattgacagacgcagcacgagtttgtttctttttgttgcacgcccactctaacgcccacaagccgcccaaaacagtcacgcccacaagtttcttttctggtgttgccagacccacagttttttttttaattttatcatatgtctttccgatttctatcggtaacaattatgcccacccaaatgcccgaaaaccgccaaaaatgttatatatattttaaaaatgtaacgtcacaaaagttaatatgaagacgtgtttatattttttaataattacacatgaatttgtattgaaatgagctataaaactgtgtatagtcttacttaccggttcatttagcgaaacaaggtctgctttagtgttttcggccgataaatcagatgcaatggatgttgggtcattgacattctaaaaataaagtacactttaaagatctaatcgaaattgataatgtatgatttgcacgaagctgtaagtaaacttttgtaagctgcgtattaaaataatgaagtgcagctgaatgaatgttccaaaattttaaaccaaatcatacaataattaataaatcaattataatattaaacatatgcaattaaacaacacagttcaaagagtcgtaggcttttgccttatgtttgacaaaatttactctgcagaactgcagaagcttaaataattatttgcttgtgctcaaatataagcgttatacctagattaatacccatgcagagtcagagtttttcgtatatatctgagtagttcccctatccgtatccggttccgaaaagcacatagttataaagcttgactatttccaacattattttttaaaacgcactttaaaacaagagagaatgctatagtcgagttcgccgactatcagatacccgttactcaactagtgtgaatgcgaagccgaaattttataattattattggatatcaatagatattggggaataaaatgagaaaaaaaatttaacattgtttaaaaatgtgggcgcgtccgttttgatagttttgtaggtgaaaaaatgggcggacaacagtgtttttggtatacagacaaaaattgtatgcttaatctcaaccttctagcttttttagttcctgagatgtcaactttcatacaggtggacacttccagatcgactcggctatcgatccagatcaagaatatatatactttatatggttggaaacgcttccttctgactgttacatattgatcaaagatctagtatacccttttacttcacgagtaaccggtttagaatatgcaaaagtgtggggatgacagtttccgcggttgatgaacgttggagtatgagggccaatcttttaaaaccaacttgcagaaatgtcactggtatcagaatgctgaaagtgcatattcatattcatatatatcttgaagtttaaatggacaaacaggcggaaatggcgacaacaattctaaaagagatcctaatccattccgccttttatctgattttgaagattacgagtaatcaggacattaattccttaaacttgttagaatttctttaaaaatataaaaacgtttcaacaatattttttttttacctaaatcatgttttaaatattattgacttagatccaagtacctggactaagttactaagttacaaatacacatttagactttatgaagtaaaaaataaatgtagcctttgcagggtatatggtaagttagggcaacatttgctttactttttctttataaatattatgttaaataaaaaacatttttgaagcttgaaggcgataatttaggtctgttattcttaaaaatacaaatactttttccgacgaagatttagtggtatcctgtgatttgcaattttcgatagctttatcatcttcgcctttaattagaatgttcgacgtgtcttgaacaggtgattcgttttccgcattcgatgaattttcaccattagtactcccatctattaagtccaactcgaaattattctcagaaacggtggacaaattttccacagatattaatgggtccgttttaatagatgcatctataataatagggttattggattcggagtcttctatctcaacagttctctccatatccgatgagctaatatctaaagacggcttgtcaattagtgcagctgggtttacttccaaatctgttgtattttttttctctgaattacagtcttcagattcgctttcttcaatttttagatcgtcatcatctttattatctcttgaagtgacgggtttatcaaaaccactgtcaatataagataccaagagtttttcattgagattatcattatcttggggagtagttttaatctcatcagcgtaatctatttgggtttcattttttgtagcaatttctttctcctttagattgtagaaaatatgagtttgtaaagtttatttctatctatttattaaatggtaatattactattatttacattaaaaatgatggcaaaaaacgtaaacggtatatttagttaataattacaataatttatttaaataaatgtattaccattttctctctgagaaaattgtcaaaagtaaatgtataacaatgtaaaagatgtaaaaaatcttgtaaaaaatctaagcactttgaattttttataggtgaatattatatttatattaattaattaaatattgttttttgacttacctcaatatttaaagtagaatccatatctaaaagctgtacaaatctataaaataataataaaatgtagagaaaggaatttatatttgtatcgtctcaacaggtaggcaggtcctgcattattattattacataagggtgtaatttataataaagcacatgcaacacactcagttataaaatatcgcattttatgctgaatgtaaatacatatagagacactcaaataatgttcgttggtgctgttattatgtaatacatagtgagaagcatatacaacatgaatgttaatttctcttcgaccacactaacttttcttttttttaatatccataataataatttacacgtacatatatcaaatatatcttttcacttgcctatttcccaatgttatttgtttaaaaaaatatttactgcaaacaatactgtagtatcgaattattgaaagataataatacaactaaaatccgtataggccaatagaatgaacatgaattcatgcgcctgcctttaagaatatgattgcacatcaaagatagcttccacactgtccacatgcttatttacttgattatcggctcgttcgcatacagcaatttgggaaatgtgtatttaaaagtcacacacaaatacatttattttcacaaatacaaaaatattttctcgtaaatttatacgtatgtatacagcatctttgttcggcaaacaagcgcatcgatgagagccccttttattggaacggagtactttatttactatttttatagttataagtcgcagtgtcttatatgcacttacatacataccttgtttttaaaacttaaatttacgaatgagtaaagtgcgaaccatctttaagttaacatcgcccaaatttgattatattcaaagtaatatctcgagaaaatactgtaacatgaatatacatatatccattgatgttcgatatttctttatagatagtaatattctcttttagagatgttatattaagtacacccaaaatcaaaccactttcagaggaaactaatgacgataacacgaacttgaagatacaatagaagaaagaacacgctccctacctgttacttcttacaattggatataacctttcacagtacgactaaaaaatataaatatattacaaacaattgtatacacgtttgaatttgaaccctaatattcattcgttgaaaactagaatggcggagggaagaactgctgacccataaagaatatacttcgaatattcgagcagaatcgcaagccaagttgatctagcaatgtacgtccattttaatttcgtgatctttaaaattttaaaagctagaaagctaattttagatacgtatgttcttaaaagtccgatcttatgccaatttggaactcgtacacgtttaaaaactgttattcttttagtcaatttagttaattgcttggacacaacaaagcgcaaaaatctgttagacccaaaccttcaaaaaaggtactagag

SEQ ID NO: 1913 - DNA, 2388 bp, DROSOPHILA
ttcatgttcattctattggcctatacggattttagttgtattattatctttcaataattcgatactacagtattgtttgcagtaaatatttttttaaacaaataacattgggaaatagatttgtacagcttttagatatggattctactttaaatattgaggagaaagaaattgctacaaaaaatgaaacccaaatagattacgctgatgagattaaaactactccccaagataatgataatctcaatgaaaaactcttggtatcttatattgacagtggttttgataaacccgtcacttcaagagataataaagatgatgacgatctaaaaattgaagaaagcgaatctgaagactgtaattcagagaaaaaaaatacaacagatttggaagtaaacccagctgcactaattgacaagccgtctttagatattagctcatcggatatggagagaactgttgagatagaagactccgaatccaataaccctattattatagatgcatctattaaaacggacccattaatatctgtggaaaatttgtccaccgtttctgagaataatttcgagttggacttaatagatgggagtactaatggtgaaaattcatcgaatgcggaaaacgaatcacctgttcaagacacgtcgaacattctaattaaaggcgaagatgataaagctatcgaaaattgcaaatcacaggataccactaaatcttcgtcggaaaaaaatgtcaatgacccaacatccattgcatctgatttatcggccgaaaacactaaagcagaccttgtttcgctaaatgaaccgaatgtcaatgaccaaacatccagtgcatctgatttgacggccgaaaacactaaagcagaccatgattcgctaaataaacctaaggattttaataaccaaattctgaacattatatcggatatagatataaatataaaagcacaggaaaaaataacacagcttaaagaacaagaactaaaactcattcagaaacagaatgatctggcaaatgaaatccataagcagcagatcctagctaagcagcttagtgcacaaaatcagcttaaacaaaatgaatgtcaaagtggagagctcgacttacacagtcaatatcaaaatgagcgcggcggacccacctcgacactgtatcaggaaaaaaatatagccagtaaaaggtgttttcggttgataaaaagtttttccaggattcaatatcgaagacttatactgatcgacaaaccgaaagacaaaacaaagacagggacgaacgctttaattgcaatgagccaagaatccgctaatgtgtcgaagacggttgatttgcgaaaaatatttacacctgcgaccgatgctgctgaaatattaccgaaaaacctggaagaccaagtcgagctagctcgaagaatttcacattcattaagcgatataagtaatcaaacctctaagggtcagtctatgtatgtcaatcgcaaaaaacgctcagacaaatgggttcatgaaggtggatctcaagggaatgatgctataaatccatttaaagaaaattctgaaacgaaatccacaatggaggttgcgaagttggaaaaaataccgctaaagcttataatgaacccaaacggaaaagttcgtgattataattcgctaaaagatttaattaacgttgaagctggccttttatcgcctgacaattgcgctgaactaataactgcacttcaacttcatcaaggacgagattttcagcagtatcaacaaaggcctgttctaagtccaaacattttgccggcgtattctgatgctggaaagcaccgcgtccaattgaatattcatcaaaatcagctaattgagaagtattcaaaaccaggacttcaagtcgttcagtctccttggaaggcagctttgcaaactggttcagcgagctcagcctttctagaggacaccaagagtttttcaccgcctgccttaacaccaattccgtcttcccaagctggtagtaaggactggacggacgctaatgagcccatgcctcatggttcttcaaggcgcaatacaaatgtataagtctcccaattcatcttctttaataaaagaatcttttcgtaggccgttgcttcctcgccacgatcagtcattgtaccatcgaatccacaaagggatcttgcatatacaccatgcgttgctcagggctggggaggtcgaagtgtagaacttccaaaagactcttttcaatctaacgaaagtcaatcatcatggcagactgaacctcatattgggagagcagatgacagcaatcctagctttaataattatatatttggagagaggctgacatctaactttgctttcgatgtgcagaatcgattacattccctcgaaaatt

SEQ ID NO: 1914 - protein, 643 aa, DROSOPHILA
MDSTLNIEEKEIATKNETQIDYADEIKTTPQDNDNLNEKLLVSYIDSGFDKPVTSRDNKDDDDLKIEESESEDCNSEKKNTTDLEVNPAALIDKPSLDISSSDMERTVEIEDSESNNPIIIDASIKTDPLISVENLSTVSENNFELDLIDGSTNGENSSNAENESPVQDTSNILIKGEDDKAIENCKSQDTTKSSSEKNVNDPTSIASDLSAENTKADLVSLNEPNVNDQTSSASDLTAENTKADHDSLNKPKDFNNQILNIISDIDINIKAQEKITQLKEQELKLIQKQNDLANEIHKQQILAKQLSAQNQLKQNECQSGELDLHSQYQNERGGPTSTLYQEKNIASKRCFRLIKSFSRIQYRRLILIDKPKDKTKTGTNALIAMSQESANVSKTVDLRKIFTPATDAAEILPKNLEDQVELARRISHSLSDISNQTSKGQSMYVNRKKRSDKWVHEGGSQGNDAINPFKENSETKSTMEVAKLEKIPLKLIMNPNGKVRDYNSLKDLINVEAGLLSPDNCAELITALQLHQGRDFQQYQQRPVLSPNILPAYSDAGKHRVQLNIHQNQLIEKYSKPGLQVVQSPWKAALQTGSASSAFLEDTKSFSPPALTPIPSSQAGSKDWTDANEPMPHGSSRRNTNV

SEQ ID NO: 1915 - DNA, 5155 bp, DROSOPHILA
acctatccgaccagcatccttaacggcgagtacgagattgaaaacgttcgcgatttaaccacgggattcgacagtagcactggcgacaagaaggccaccttgccgaccagctccagttcccaaatgatcacatttaccttcaaaaacggactcgtggtcactctacgcaccagcggcacggagcccaagatgaagtactacgccgaaatgtgtggcaagccggacgagaaaaactgggccaagctgactaatacaatgaataccatggtggaggccattgtcgaggaattctacgagccaagcaagaacggcctccagcgcaggaaggaataatccgaatgcacctttaagcggatacgctaggcgactgggacgaaagatctaacacgtagacctgtctaaaattgaaagttctataccaacagcactgacgacgcacaagccaaaaaacaacagcagcgcaagctgttgcctattattgtttaaaggatatctgatatgttagtattccactcacatttggctagtatttatgaaataatgtaaataaaagcgaacgcaccatccaccaccaggcaccaaatcatgggtttcctcagtttgatatttaagtagcttatgaaatgagaccatcgtgctcactccacttgaattaattgagcttattactcttatcatagaaattcgagaggcattcgagtctttgtatcacaaagaacttgaaacttgattgattgcgattaaatctactcatacattatacttcagtgcgatttggtaaacctgctgggctcaataatcaatataggaactgtttgttaatcccgagctgataaggcaactttcagacattcaaaagacccccaagaatgaattaattacgtgcgcatttccacgatttgcgtcaccttcgagatagaacaattcgtttaaagctgttaaagaagtgggtttgatttatttacgcattttgttttttatgctagttacaattacaacagttacagtttgagagtaaatgtatgtataaatggtatgtatgcttaggttggttttccaattgctttaagtaattgctagataattgcaatataaaagagcttcgacagaagacatttagctagaaaacgaaaatgaaatcaaacctcaagcaaacgtttctaagtagttttgtaaataggtatatatcatatatgtatgtatatatagattgggttcactggaacgtacacatgttcgaatacgaattcgggtccttatcactataattttgtctctaaaaatacacgagtttttgtatatatgtggttgctatgcacaggctagtacatacacctgctagtggctgttggcaatttgtgtgtataaaatgcatattcaggcagtcttcgcttatattatgtatttgtcatcagttgcattcgagttatagttgtttcgtcgtttctcaactttgtggcagaagagttaggaccattcggtttcggcttaaaatgtgcgtatgtaaaatcttattaagtcgcgtcaaaagtggccaatgcactttcgacgcaagtccgagtcctagctaaaattccatgggcttgccttggctcactccattccttcttaaggctagcgatcgggctcacgcctcacagatatcgggtaaaattttagatattccgcgaagagtaagcccaactttacactaaacatatttactaaaataaaaatcgtgtataaaagagctgcatttaagagttgatatctgaagatcgcggttcggcaagccaaaccatcattcttataattaatactttgggaacttgtaagtcatgtttgcttatcaaagggtgtgatatgttcgcgtcggtttaggatgatacactgggcttttgagcattgtttcttgatattcgggtcataagttcaagtttagcactgataagtacgttgccttctcatctaataatcatttgttacaagatcaaaatttagctgctgaggcctgcctagacattttgttctcacaacaacttttcctttctaaacttccatgtttttttctttttttttttaaattcagggttttgatcgatttaaaaatgctcctcttgttcattgataagtaattttgattgcttggtttgattggttgtggtgtttcaggcatatataaaaatgaattcaattaccctgatggcagttctcacaagaacgtcatcgatttggctgaagtaaagaaaatatgtgaatatgtgaattagtagctgggaaaatcagacaaacacatgcaagtaggacgattgcgtctggttgctatgagtgggagtgttgattggaggggcgttgtggtggtgtcatacggatgtttcggagttcaacttaagaacaaatttgttgcttttgggatccacaacctcctcggccaggttgaagtgcggcagcttgtgtacggttaccattagggagacatcgttctgaattaactggaacgtgcattcgttgccaattggccgagagacgatctcgtcgcagatcagggaccaagactgcacccagcgtcgctccttctcgctctgcatcaccggagactcggtcaagtagggttccaagaaggcgcggggcgacagatcatgctttaggcagtgcgccagatgtttcagtatgctctcaaaggtatgccgcggctgctgacgcgtaacccgtaagtatttttgcagcgccctggccatcgagggaaaaaccgccgaggcagcctcctgcggatcgagcggcagtgccggagccggttcgttatgaatgcgtttgatgtgggtgaaggcctcctcggcggcggttataagacgggcacgccgtttcttcacacgacgttcgtactcgtgctcttcgtaaaagcgctcgttatgcgaggagtctcggcgccgcgcgttggctgctagaactgctcgactctggctttgctgttgcgaattgctcaccccatccacttcgtagtacttgaaactgtttgatatcttgtttcgctgcgatttggagaccgatattgggatgcgctccaggtaagggttaaatatggggaaatccacgtagtagtgctgtagcacccacacagccgcccgttggatgctcagctgacccaacatgtaggagcgcgaaacgccgtccggggagcgaatgatcttgatgtagtagcaaggctgctggtgtcgcagctctagtaacaccacggccacatagtgaataaatagaagagtgtccacaaaattggtggcatagcctaccagtgacttgtagtccacggcatcgccgcccgtctccacaacgattttggccccgtttgtgacctgcacgatgtagaagagccagtaagcaaacgtgcagatggtgacgagaaggaggacgagagcgcgatataggaatatccgtggcatggtggccgatgtacgtcgcatgaacactgcccacaggccgatggccagaagcagcagccgggcggccagcgataccagttggcccttgcactgctcactgcaggccagcagctgggtgcgaacagtttgcgttatttccggatgatcgaaggccgacggaaagaagcccacatacggcatcaccaccattgccactggcgaaaaaaacgctccgcatcccagcaggaagtagaagctcgactccacgtatcggcggcacgcaaagctgaagcccttgtcgctctcacgatgccacatgttgtttatgtcctccattgagatgctttgctccgaggtattccccgtgacggcggtagtattctcgccccagttctcgtcctgcggaaggatttgcacctcgatgacttcctggccatcgtggctgccgtctcctggtgcccaaataataaatgggtcaattggtttccttccaccgatagagccattaaacaaactcacctgtcatattaacgctggtctggtacggtgccatgtcgccacgttgaaatcccttggccgacttcgaggagtgtgtgctgcggtgggaatgtctggagcggtcccgctccctgtgatagccgttgttgacactgcctcctccgccaccacctccgccgccaccccctccgccgttgttgttgtgattccgcgagcgtctggagcgtccactgtgttccgacttgacggattcgttttccattgcaattgggctagcgcgcgagagctatgcccgattccgaatctcctgctcgcgaagagacgtgccccaaatcaccttgcaacctggccgtgcagctattttagtgtctaactgtaattgcggcggcagcaggtttttcatacgcaggtatgcagggcgcagtgcatagcctataggcgatttagagctttatctgcggctaattctgcggcacattgtcactattcgtgtcttgcatggctatttcatacgctatttaactatttctcgcacatttttcgctttttattcactttttcgtggacttggcttcacccccgacgcagtgtgaccaccgcaacacaatcagcagcacggtcacattgcatttagtgttttcaaacactatcagtttggcaattcaaccgccaaactgatagtttaaattttaaagtaagtttattttgttggacaatatcatgaatttgcaataatagcggaaagtaattgtctggctctctggtcagttgggcttagcagtatggcgcgctgcaacaacttcatagaacaggttttgtctactgcactaaccgcctgactggcatatatagtggtcagtgcctcttcgctggccaagatgctaaatataaacaaattcagtctatcataatacaatgtatataaattcccaagtcttacctattttgttgcttagtgtgtcccagagtaagagttattcgacccatatttgaagtagccagtcgataggattggtcatcagagaaataatcaagaagaaactttagcacgacacttcgcagacttcgggaattgggaaacattcgtatgcgagtctgtagatagcacaacgctcttcgggcaccctcctaaacaaaatcatagtattacttttgtagaaccacaacattcaccacttttaacgaacatttatcaggatgtagtgagccgttaaataggatatgtcggcacaatactccttcttaaaggcgtacgcattcag

SEQ ID NO: 1916 - DNA, 3088 bp, DROSOPHILA
atggaaaacgaatccgtcaagtcggaacacagtggacgctccagacgctcgcggaatcacaacaacaacggcggagggggtggcggcggaggtggtggcggaggaggcagtgtcaacaacggctatcacagggagcgggaccgctccagacattcccaccgcagcacacactcctcgaagtcggccaagggatttcaacgtggcgacatggcaccgtaccagaccagcgttaatatgacaggagacggcagccacgatggccaggaagtcatcgaggtgcaaatccttccgcaggacgagaactggggcgagaatactaccgccgtcacggggaatacctcggagcaaagcatctcaatggaggacataaacaacatgtggcatcgtgagagcgacaagggcttcagctttgcgtgccgccgatacgtggagtcgagcttctacttcctgctgggatgcggagcgtttttttcgccagtggcaatggtggtgatgccgtatgtgggcttctttccgtcggccttcgatcatccggaaataacgcaaactgttcgcacccagctgctggcctgcagtgagcagtgcaagggccaactggtatcgctggccgcccggctgctgcttctggccatcggcctgtgggcagtgttcatgcgacgtacatcggccaccatgccacggatattcctatatcgcgctctcgtcctccttctcgtcaccatctgcacgtttgcttactggctcttctacatcgtgcaggtcacaaacggggccaaaatcgttgtggagacgggcggcgatgccgtggactacaagtcactggtaggctatgccaccaattttgtggacactcttctatttattcactatgtggccgtggtgttactagagctgcgacaccagcagccttgctactacatcaagatcattcgctccccggacggcgtttcgcgctcctacatgttgggtcagctgagcatccaacgggcggctgtgtgggtgctacagcactactacgtggatttccccatatttaacccttacctggagcgcatcccaatatcggtctccaaatcgcagcgaaacaagatatcaaacagtttcaagtactacgaagtggatggggtgagcaattcgcaacagcaaagccagagtcgagcagttctagcagccaacgcgcggcgccgagactcctcgcataacgagcgcttttacgaagagcacgagtacgaacgtcgtgtgaagaaacggcgtgcccgtcttataaccgccgccgaggaggccttcacccacatcaaacgcattcataacgaaccggctccggcactgccgctcgatccgcaggaggctgcctcggcggtttttccctcgatggccagggcgctgcaaaaatacttacgggttacgcgtcagcagccgcggcatacctttgagagcatactgaaacatctggcgcactgcctaaagcatgatctgtcgccccgcgccttcttggaaccctacttgaccgagtctccggtgatgcagagcgagaaggagcgacgctgggtgcagtcttggtccctgatctgcgacgagatcgtctctcggccaattggcaacgaatgcacgttccagttaattcagaacgatgtctccctaatggtaaccgtacacaagctgccgcacttcaacctggccgaggaggttgtggatcccaaaagcaacaaatttgttcttaagttgaactccgaaacatccgtatgacaccaccacaacgcccctccaatcaacactcccactcatagcaaccagacgcaatcgtcctacttgcatgtgtttgtctgattttcccagctactaattcacatattcacatattttctttacttcagccaaatcgatgacgttcttgtgagaactgccatcagggtaattgaattcatttttatatatgcctgaaacaccacaaccaatcaaaccaagcaatcaaaattacttatcaatgaacaagaggagcatttttaaatcgatcaaaaccctgaatttaaaaaaaaaaagaaaaaaacatggaagtttagaaaggaaaagttgttgtgagaacaaaatgtctaggcaggcctcagcagctaaattttgatcttgtaacaaatgattattagatgagaaggcaacgtacttatcagtgctaaacttgaacttatgacccgaatatcaagaaacaatgctcaaaagcccagtgtatcatcctaaaccgacgcgaacatatcacaccctttgataagcaaacatgacttacaagttcccaaagtattaattataagaatgatggtttggcttgccgaaccgcgatcttcagatatcaactcttaaatgcagctcttttatacacgatttttattttagtaaatatgtttagtgtaaagttgggcttactcttcgcggaatatctaaaattttacccgatatctgtgaggcgtgagcccgatcgctagccttaagaaggaatggagtgagccaaggcaagcccatggaattttagctaggactcggacttgcgtcgaaagtgcattggccacttttgacgcgacttaataagattttacatacgcacattttaagccgaaaccgaatggtcctaactcttctgccacaaagttgagaaacgacgaaacaactataactcgaatgcaactgatgacaaatacataatataagcgaagactgcctgaatatgcattttatacacacaaattgccaacagccactagcaggtgtatgtactagcctgtgcatagcaaccacatatatacaaaaactcgtgtatttttagagacaaaattatagtgataaggacccgaattcgtattcgaacatgtgtacgttccagtgaacccaatctatatatacatacatatatgatatatacctatttacaaaactacttagaaacgtttgcttgaggtttgatttcattttcgttttctagctaaatgtcttctgtcgaagctcttttatattgcaattatctagcaattacttaaagcaattggaaaaccaacctaagcatacataccatttatacatacatttactctcaaactgtaac

SEQ ID NO: 1917 - protein, 581 aa, DROSOPHILA
MENESVKSEHSGRSRRSRNHNNNGGGGGGGGGGGGGSVNNGYHRERDRSRHSHRSTHSSKSAKGFQRGDMAPYQTSVNMTGDGSHDGQEVIEVQILPQDENWGENTTAVTGNTSEQSISMEDINNMWHRESDKGFSFACRRYVESSFYFLLGCGAFFSPVAMVVMPYVGFFPSAFDHPEITQTVRTQLLACSEQCKGQLVSLAARLLLLAIGLWAVFMRRTSATMPRIFLYRALVLLLVTICTFAYWLFYIVQVTNGAKIVVETGGDAVDYKSLVGYATNFVDTLLFIHYVAVVLLELRHQQPCYYIKIIRSPDGVSRSYMLGQLSIQRAAVWVLQHYYVDFPIFNPYLERIPISVSKSQRNKISNSFKYYEVDGVSNSQQQSQSRAVLAANARRRDSSHNERFYEEHEYERRVKKRRARLITAAEEAFTHIKRIHNEPAPALPLDPQEAASAVFPSMARALQKYLRVTRQQPRHTFESILKHLAHCLKHDLSPRAFLEPYLTESPVMQSEKERRWVQSWSLICDEIVSRPIGNECTFQLIQNDVSLMVTVHKLPHFNLAEEVVDPKSNKFVLKLNSETSV

SEQ ID NO: 1918 - DNA, 4243 bp, DROSOPHILA
agattaaagaaatgaccagcttataattattcagaaattcttcatcaaaaagaattctacatttgaaaacactgtgtatctctggatggtaatgattgtcattgaggttaattaaaattactactgaatttttcttttatttgtatttgtttttattgaaaacatttgaatccatttgcttacgatttcgcttttaaatggaatttgtaattcaatattttaaacgataacgatattcagagcgataacgacagcgataactcggcaacagctgatggtgaagcgctgatttgatgtacgttttgattttggaatacttttatgtaatggtgaaagtggaggtggaatactggtaaggggaatcgtagccacagcaagcactgaataacggcatccaatcctcctgcagcggcatctgcaactttagcgggcagtgccacctgctgcgcgagttcctgctggcctcgtcgcccgacttggacatatcctgtcgcacgggacggcggggatccttcgaggtgtccatcgacggtcagctagtgcactcgaagctttcctgcctggcatttccccagcacgcgagtgtcctggcccaagtgcagaaggcggagcgtggagagcccgtggagaaagtcctggagcagcccatcaaggactgcgtcgtgatgtgatctcctactttcacgcctagactgtttaaacacgatagcttcacgcttacaccaacatttgtggaacccatttgaaatcctgtgatatatggtatatacatatataataataaatataacattataatgctctccttatttgcaagatggatgaattgaaaaatgggtaaaggttaaacaacagttttcagtttaagtggagtcaactaaacaatcgcaataaatggaacgagtttgctagttgttctgggcttacactttattggaaaataacataggactgcacaaaaggatggtttgggtaatctaggccagacggtgacaatccttcaccgcctgtagcgatagcgcttgaagtggaaccacagctggaagatgttgttgtggaactggcagcggaagccccgcttgtagctaaactcccactcccggttgacgatcttgaaggcgatgtcctcgtacggtggtcctgtgtggaaacgcagcaccgcaaagtccccgttgtccgcgcagggagtgaggaagtactgcggcgtctgcgatttgtccataaggtccggatagaatatgttgaacttgtatccctgcacgatcttgggcgggggattgtccatgtcgtagtgcgtctggttgtacttgttccactcgaagccggtgtgcacgcgattgaagtagcgcggctttcgtggtcggtacttatcggtggccagctgcggcactgcatccagggtggtctccacactgaactcggcctcgtcaccctgcattccctgcttcgcctcgttgcgcattcgcagttcctgcggggtcagttgattgttatccactcgttctggatgaaggattagcagacgctgtctctgtgttcgccgctcgtcgtcctcctcctcgtagagaagtccttctgcctccggttcgtcgacgtcttcgttttgcgctcgtctgccggtgaagtcctcttcgcgtatatagcgcgggctgtagttccctgcctggtaaagacgcactgttttacgcagctcattcaggggatcctcctcgtcttcgggtgagccctcctcaacctccgggtcctctgcgtcctgggtttccatctcctcttccttgacttgtggggccaccttctcttgcaacgtctcattatcgttttctcgcttgagcagcgacagcttctcgcgcaataaggcttgatggcgatctcgcagtcgagctctggccatgtgtgccttgagttgcgagagcaggctttcccagtagctaatgtcgacgccatccgctcgcccactgatcttggcctcgatgcggtgccgcatctcctccagctgctgagcattcttccccctaaaaatatcggccacatcctttaccaccgcctggtggatgccatcccggcgttgattgagcgaactattctccgcctccagtttctgttggcgctgcagttcatcctgcacaatggtgatcatatcgttccagaaatcgatgtgcttgccctgctccagctcttcgtataccttaatgtcgaccagcaggtcctccagttcttccacgggcaggccgtttagcagcacatagggctcgtgcatctgcatctcgaggcactcttcgagcggctcattcccagcggccacatattgggcgagaagatcgatgggcttggcacgtccatctcggatccggatttcactgcgcaagcgtgcctgctctaagtgaaactgatcttcctgtcgctgccactcgcggaactgcaccgcctccttggcgcgctgctgcatcataagatcatcctcgcgcacctgccgctccagctccctctcctgacgccgtttcttgaccttctccagctccctgcgattttccaactgcttttgcagagacagtacctctacggttttggtggagagatttgatagtccctctacctccagctttttgccccagtggaaggtggaggtgagattggagtccccgaacgggttgtcttcgttggagtacgtctggtactcgttgtcccagcccattcgttcgcgacgccgctgctccttggcctgcttttcgcgcaggcgacgggcgcgcttctcctcgggcgtttcatgggccttcagctcctcctttttacgctgacgatccttctgctcgacgaggcgacgggcttccagcgtctggagaagcttcatcgggctttttaccagcggcgaacgaggggcaccgggcaccgagctggacgtcgaactcgacggggatgagctggaggaagaggaccggcgtctccggcttttgtgctcccgcttcttgtccctgcttttgtccttttccctttccctgcgctggtcacgttccttgtctctgtgatctctgtggtcacgatccttttcccgctcgcgttcacgatcccgatccctgttcctgctgctcctcggatccggactgcgatgatcccgcctctcccgactgcggctgcgatgccggtgcttggatttctccttgggcatcttttttaatgagtttttcgggataaaacttgtgaaataaaatataaacaatgctagcgttgccagatggagaaaaccaacccagatagccactaataattgcaaaagtgctatcgatataagcattataacattaacacatctccctcttgccgataagtcgatttatttttccaagggttagtttttacaaactttaaattttaaaatttcggctgcagcgtattataaatacacaaaaataaataatttatcgatggaatccttggtgcagtgtaaaaggctttttagggtcttcgtggtaatgcccactatcgaaactgaagactcgatgtgtcattgcaagtgccattactcaatatatcgatacaaacgcaagtagccaatccagctcttcgcagaaacccggttggcaaaaacgtttatgtgcattttttgtattcaatcgccaacacgagagccgagctaccagcaaaaggattgtccagatagcccgccactgcgctgagtaagtagtgattctggaaaagtgtcggggaagacaggaaaaacacggcagacggtgaaaatcgcgcgcggcaaaaaggccagcgacaagccagacgcacacacacacgcgagcatccgcacaaagccgacgcacacagacgcatgcaggcgaactcaaaaaccgaaacacaaacaaaaggatggttattagtcgactattagttaccttacttccagttcagcagcaactgaaaatctgaactaatctctaatccagaaattctggatttaaaacaaatccaaccctatccactgtcaaatacacgtttcgtatttgaaagaaatgtgtatgcattcacttaaaacacagccatctaaaacagctaaaagaagttatatcgagaatatagcctcttttctcgttggttggcttttcattgcgaaatagcctcatggactatctcaacaagtggaatagctgggaacgcgaatgtgtgtgtttatattatttgcccaatccgtaaatatagttgaatcgtcttgattcttagatgtgggggatgcagctatacagatgcactttatggcctc

SEQ ID NO: 1919 - DNA, 2243 bp, DROSOPHILA
ttggttttctccatctggcaacgctagcattgtttatattttatttcacaagttttatcccgaaaaactcattaaaaaagatgcccaaggagaaatccaagcaccggcatcgcagccgcagtcgggagaggcgggatcatcgcagtccggatccgaggagcagcaggaacagggatcgggatcgtgaacgcgagcgggaaaaggatcgtgaccacagagatcacagagacaaggaacgtgaccagcgcagggaaagggaaaaggacaaaagcagggacaagaagcgggagcacaaaagccggagacgccggtcctcttcctccagctcatccccgtcgagttcgacgtccagctcggtgcccggtgcccctcgttcgccgctggtaaaaagcccgatgaagcttctccagacgctggaagcccgtcgcctcgtcgagcagaaggatcgtcagcgtaaaaaggaggagctgaaggcccatgaaacgcccgaggagaagcgcgcccgtcgcctgcgcgaaaagcaggccaaggagcagcggcgtcgcgaacgaatgggctgggacaacgagtaccagacgtactccaacgaagacaacccgttcggggactccaatctcacctccaccttccactggggcaaaaagctggaggtagagggactatcaaatctctccaccaaaaccgtagaggtactgtctctgcaaaagcagttggaaaatcgcagggagctggagaaggtcaagaaacggcgtcaggagagggagctggagcggcaggtgcgcgaggatgatcttatgatgcagcagcgcgccaaggaggcggtgcagttccgcgagtggcagcgacaggaagatcagtttcacttagagcaggcacgcttgcgcagtgaaatccggatccgagatggacgtgccaagcccatcgatcttctcgcccaatatgtggccgctgggaatgagccgctcgaagagtgcctcgagatgcagatgcacgagccctatgtgctgctaaacggcctgcccgtggaagaactggaggacctgctggtcgacattaaggtatacgaagagctggagcagggcaagcacatcgatttctggaacgatatgatcaccattgtgcaggatgaactgcagcgccaacagaaactggaggcggagaatagttcgctcaatcaacgccgggatggcatccaccaggcggtggtaaaggatgtggccgatatttttagggggaagaatgctcagcagctggaggagatgcggcaccgcatcgaggccaagatcagtgggcgagcggatggcgtcgacattagctactgggaaagcctgctctcgcaactcaaggcacacatggccagagctcgactgcgagatcgccatcaagccttattgcgcgagaagctgtcgctgctcaagcgagaaaacgataatgagacgttgcaagagaaggtggccccacaagtcaaggaagaggagatggaaacccaggacgcagaggacccggaggttgaggagggctcacccgaagacgaggaggatcccctgaatgagctgcgtaaaacagtgcgtctttaccaggcagggaactacagcccgcgctatatacgcgaagaggacttcaccggcagacgagcgcaaaacgaagacgtcgacgaaccggaggcagaaggacttctctacgaggaggaggacgacgagcggcgaacacagagacagcgtctgctaatccttcatccagaacgagtggataacaatcaactgaccccgcaggaactgcgaatgcgcaacgaggcgaagcagggaatgcagggtgacgaggccgagttcagtgtggagaccaccctggatgcagtgccgcagctggccaccgataagtaccgaccacgaaagccgcgctacttcaatcgcgtgcacaccggcttcgagtggaacaagtacaaccagacgcactacgacatggacaatcccccgcccaagatcgtgcagggatacaagttcaacatattctatccggaccttatggacaaatcgcagacgccgcagtacttcctcactccctgcgcggacaacggggactttgcggtgctgcgtttccacacaggaccaccgtacgaggacatcgccttcaagatcgtcaaccgggagtgggagtttagctacaagcggggcttccgctgccagttccacaacaacatcttccagctgtggttccacttcaagcgctatcgctacaggcggtga

SEQ ID NO: 1920 - protein, 720 aa, DROSOPHILA
MPKEKSKHRHRSRSRERRDHRSPDPRSSRNRDRDREREREKDRDHRDHRDKERDQRREREKDKSRDKKREHKSRRRRSSSSSSSPSSSTSSSVPGAPRSPLVKSPMKLLQTLEARRLVEQKDRQRKKEELKAHETPEEKRARRLREKQAKEQRRRERMGWDNEYQTYSNEDNPFGDSNLTSTFHWGKKLEVEGLSNLSTKTVEVLSLQKQLENRRELEKVKKRRQERELERQVREDDLMMQQRAKEAVQFREWQRQEDQFHLEQARLRSEIRIRDGRAKPIDLLAQYVAAGNEPLEECLEMQMHEPYVLLNGLPVEELEDLLVDIKVYEELEQGKHIDFWNDMITIVQDELQRQQKLEAENSSLNQRRDGIHQAVVKDVADIFRGKNAQQLEEMRHRIEAKISGRADGVDISYWESLLSQLKAHMARARLRDRHQALLREKLSLLKRENDNETLQEKVAPQVKEEEMETQDAEDPEVEEGSPEDEEDPLNELRKTVRLYQAGNYSPRYIREEDFTGRRAQNEDVDEPEAEGLLYEEEDDERRTQRQRLLILHPERVDNNQLTPQELRMRNEAKQGMQGDEAEFSVETTLDAVPQLATDKYRPRKPRYFNRVHTGFEWNKYNQTHYDMDNPPPKIVQGYKFNIFYPDLMDKSQTPQYFLTPCADNGDFAVLRFHTGPPYEDIAFKIVNREWEFSYKRGFRCQFHNNIFQLWFHFKRYRYRR

SEQ ID NO: 1921 - DNA, 6273 bp, DROSOPHILA
gggcttgggatcgctgggatcctcaaaacacttattaatactaagcattttctgattggaaatcgtcgccagataacgcacgaatatatcaaagctagtccagtacaaaggcgaaagagccgaataccgagtcaaaaagaaaccagcaaaacaaaaacaagaaaagccgcagcagcaacaaaatactaaaagcaaaacaaacagcgataaaatcgaacagctaggcacacttgaaataccctatcgaaaattgggaaagccctaacacatggatttaagccaagtgttcgttaagccctgagtaaatgcatcgagtttaatagcggcaagggaagctatatggactctatatgactttatggttaaaatataagctgcttgtaactatcgcatttatgtaagttttagtatgaattttggtatacggccaagaaaatgagtaataaaacctggtaccaattttcaccaccatccgattggtaatacccgagttacgataggtaagttttgcatatcccgctctcttttcgctgtgggccacaccctcttttcaaaggggcatgcagtcgcaatgtctcgatctcagcgaaagggtagcgccagtgtcagcagaggcggagcagaggagcagcagtgggggcaccatatacaatgtacatatgcacaagaagccggtcttttttgtctctgtttttgtttttgtgttcgctttgtttttttctcttttttttttttttttttgttagcatcttgttgtgatcgcaacgctgctccgctggcttgtttttgcggcgcatttaatgaatgcgccccgttcacccctcccctaatacttcacacacaccacacaccgtacaccaaacgccatacaccatacaccatacaccacacaccacctcaccccacccaccagtttgctgcgcagtcggcgtcgacgcagcggcattgcgtttaaaatgtcgcagcgacggcgctgcggagctcagtctagcagcaaaagtccagcgatacggttccaaagcgatctgatctcagtttcgatttgaatcccccgatctggaatttcgaattttggattgtactgcagtgcattgaagtgcctacacaactttttttttcgcacccactctagtcacttggagagagcacactgtatatagttggaatatatatatattagtatatatcaacgagatgtcgcagccactcaagttctacttcgatttcctgaaccaatcgagccgggcgctctacatcctcctggaggcctccaagatccccttcgaggccatacccatatcgatgctcaaaggtgagtagtactcgctgttaagaagggagtggtggtgggcagggagtacgtgagcggtggcacacacagccacatctataagaccagccacatctataagggcccaaaggtcgaaccaaccgaccaaccgaccaaccgaccaaccgaccgaccgacgaacacattcctatgcatttatgctgccctttgttttcgatatttttcgagtcggcgagtgagtttccaaataaattttccgctcgttaaaaattccacaatccaaacgaaaagtttccaaggcgaaagcgggcagacgtcgtttttgaaatagtgtcactccattcgaaaacaattgaggaactgtggaacatggcgagattagacgaacatatgtattgtacatacatatgtacatatgagttcaatgcaaacgtgattgttctcaaaaataatttcttagcaaatgatagataagattaaaaggaatcccgaaacgaacgtgaggattccttagaaagtgtgtgcaaaataattatattttttttttttgcagaagtgttcgagcattattgagcagtcgcactttgaacgtgtttacagataatcttagcctttgggggcatccaaaaaaaaaaaagaaaaccggctaattgccttctattcacgcttttatcgcagggcaaacaaactacaaactcaaatatgggtttcaaaaatatacaatatatgtacatactatatattattcttgattcaatagtatagattcagtactgtaccttaaattcgcagtgcactttgctcgtgtttactccgcacgagaatttagaaaccgatctttgcgctggttttatcacctgctcgccaaactgggacacttatcaaattttcgatgagatccagcgttttgttagccactttgttatttccattaccattcgcttgagttttgttttccttcatcatttgttggatgtggttttactatttgccaagctgcgcgtgcgcttagcacttttcgatgattcgcatatggtatcaatttaggaatggagctaaggtaaggagggtcttcacacctcgtcttggtcgttctccacttggtcaaggttggcggaaatgccataaagtgcagaattgatgcgaggatgcaatcagcggccacattaacggctgcatatataattgcgatatgtggataatgtcgtctcgcgttgacgtcaacgctttggcatcgcgtaagttgatagccacataaataggtatatactgggatatcaactactatgctaatcccaaggagagctcccccaactcctcgatacaatgttcgattcccagacaggcctgccttttttgtttttgttttttcttttctttttctatatatgtacaatatattggttggtgctggcacttggactttgcactccggtgagccagttagttcgcttagaaatcagagtcgtcgctgcacgcgagtggaggcaacaagacaaccttgtggaggttaaagactccgaggcgggggcaagcactttcagtagtttcagcacacatgcacacacattcatagagtggagctagctgcactagcttcactagcactggtgctcggctcacccggttttttatgccggtccgagcatgacgcaaggaatctaatctggcggggagtttacgagcttcactgcaattcggatcaagtggaaatcgaatagagctctcgattgggctattaacatcataaacaatgatattttccaacccaattcggtatgcccttcagattgttatctacgagtgggcctaccgatttgccaagcaatctgtggtcttcaagctgagttcccagaggtcatataaggttatgggtatgcaggttgtatacctttctaaaagtaaccgtaacgattttgactgcactccatgggctcagatacaagatactagagtccctagagatcggagcaggttagacgggttagttgctcgatgggaatatgaaacgaagagaatattatactatatacgctgatattggaatttacaaagattatagtttatgaataacgatgggtaataagctaccagagataagagcagctcttttaattagctcctggccatatagattaattgactgtcacaatgcaactgcgataatgaccctcacgagcttccggctgccctttctattgcgatccctgggtcagctaccaaccatcaactcagatcttgatcagccagtcaatcacgaatctctcacgaatcgccctttgcctggatggaggccagcatatggtggctttaattttccaaatggcagcaattataaaattgaaaaattgccgccgccaattcccaatctaatcagctgatgtcgggaatcacagtttgccactaactgccgctgctgactaatcaattagctttccacaagccacatttgcccagttaatttctttgctatattcacaccagaaatcatgatgtgtatttgtgctcacccatccagatggcaaatacttaaaccagaacgggtatttttagagccggaggcctcgcaagtgccgcacgatttgtcactcctccgcggaacgaaccccttttctatatgacaccactgactgccctcacgcccacgatgaccttggtgggcaggaaaaaacaacagaagcagaaacctaaacagaaactaaatggctccaaacaggcgacattgacaatgactttgactttcgccggccagacacgcccctcttttgagggcattaagttccacattttcaattccaattgcgattcccgatttcagttcccttatcgttccttatcaggtttctcgaattcgggccgtgattcggcggggcacctgttgctgtgtagcaatatctcgttgggatcaggcgatcggaagaccaaaacacgcaacttaaaagttaaaaataaaaacagctttttaattagggaagaaattggtgtttgtttacagatatgcgcattgtagatacatgcatatatatgacagctttaataaattaaaaaatatatatagatattacctaatataaaaggctgtctctttcaatttataatggtatattaatgtgctaattatatgtgattggttcactactaagcttataaacaaggtcatctggaaattgttgaagttaatagaaaccctctccttttcctttcccttgatttcccgattccaggcgagcacctgactggcgagttccgggacaatgtgaaccggttccgcaagctgccggcgatcacggatcacggctaccagctgtccgagaatgtggccatcttccggcatctggcacgcgaaaagttggtgccggagcactggtatccgcgacgacatctcggccgtagtcgcatcgatgagtacctggcctggcagcagaccaacatgggtgtggccaccacggagtatttccagcaaaagtggctggtgccgtatctgcaaaagacccggccagccgataatgcggtaggtggcggcacctcatccctcatccctcatgctgtgctccaatgcccaaaactaatcgctgtccatggttatttacaggtgaatctcgccagcaagcagctggagcacacgctcaacgagttcgaacagctattcctcaactcccgcaagttcatgatgggcgacaacatttcgtatgcggatctcagcgccatctgcgaaatcgatcagccgagtgagtagaagaatacaagaaatccattggcgcacctgatactaatgccttggcatatgcctgcttcgcagaatccattggctacaatgcgttccagaatcgcaacaagctggcgcgttggtatgaaacggtgcgcgaggagctgggtccccactacaaggaggtgctgggcgagttcgaggccaagctgaagggcagtggcagtggtcagcagcagggcgtcgcccaggcggtgaagcaatagctaggaccgtccgccgccaatattgtttagttccctaaggcaatcgactatttaaccagattattttttttttttttgcgctacaactattgcatttttgtgattatacttgctcttcctatccaataagtcttagcctttccatcacacttgttttaacaataccatttgtgtcacgtaatgctcatctgtttaaacgtacgagaaaaacttataatcttatatataaacttagttgttaattatgtattttaattattcgtatataaagtacgcttatgtttgtttaaatatcgactttttttcgcgaacatagaacagaaagatgccatacatttacatttacgctttattcgactcgattaacatttgtgttggggggtggattcgctctgggagcggtgctcgcggttgtgcggaatactaggggtgtgtctgcaccatacgtctatatatgaggtgtacaaaataggatctgcctggtcatatcacaattgaaatttgtatacacagattgagaaatgcttgctgcccatgcacaagagaactttcacttcgccgctttacttcatcgtcggatcggggaatgcatcgcgcggcggcttgaagctcagcatcatgatgtgtcgcgcatacgacttggtggcccggaaaagggaatcggtgccatggaggcgatccaagacgcccagcacgccgaaacagttgttgaatctgtcggttggcaaggaaaacagcatattagcctagtttatatcactagttgccaatcaattactttaaatggtgaaaatcatgcgcctcgggactgggaaagaacggcagatgatagccggagtgggcgttgagtgttgaaaggatggccagggcgaaccacagccacgcggtggccacatggctgcccatgagaaagacgcccaggaagggcggcaacaggttgctaaagatgtgctcaatgggatggcaatagatggccgtcaccgagatgggggccgtccactcatgatgct

SEQ ID NO: 1922 - DNA, 918 bp, DROSOPHILA
tccagcgatacggttccaaagcgatctgatctcagtttcgatttgaatcccccgatctggaatttcgaattttggattgtactgcagtgcattgaagtgcctacacaactttttttttcgcacccactctagtcacttggagagagcacactgtatatagttggaatatatatatattagtatatatcaacgagatgtcgcagccactcaagttctacttcgatttcctgaaccaatcgagccgggcgctctacatcctcctggaggcctccaagatccccttcgaggccatacccatatcgatgctcaaaggcgagcacctgactggcgagttccgggacaatgtgaaccggttccgcaagctgccggcgatcacggatcacggctaccagctgtccgagaatgtggccatcttccggcatctggcacgcgaaaagttggtgccggagcactggtatccgcgacgacatctcggccgtagtcgcatcgatgagtacctggcctggcagcagaccaacatgggtgtggccaccacggagtatttccagcaaaagtggctggtgccgtatctgcaaaagacccggccagccgataatgcggtgaatctcgccagcaagcagctggagcacacgctcaacgagttcgaacagctattcctcaactcccgcaagttcatgatgggcgacaacatttcgtatgcggatctcagcgccatctgcgaaatcgatcagccgaaatccattggctacaatgcgttccagaatcgcaacaagctggcgcgttggtatgaaacggtgcgcgaggagctgggtccccactacaaggaggtgctgggcgagttcgaggccaagctgaagggcagtggcagtggtcagcagcagggcgtcgcccaggcggtgaagcaatagctaggaccgt

SEQ ID NO: 1923 - protein, 201 aa, DROSOPHILA
MLKGEHLTGEFRDNVNRFRKLPAITDHGYQLSENVAIFRHLAREKLVPEHWYPRRHLGRSRIDEYLAWQQTNMGVATTEYFQQKWLVPYLQKTRPADNAVNLASKQLEHTLNEFEQLFLNSRKFMMGDNISYADLSAICEIDQPKSIGYNAFQNRNKLARWYETVREELGPHYKEVLGEFEAKLKGSGSGQQQGVAQAVKQ

SEQ ID NO: 1924 - DNA, 2831 bp, DROSOPHILA
aaagtaacaacgcttattcgttaaataagatacgttcttatagcatatagaaaagtggaaactcacatcttttctcatggtgaggaccaccactacgttggtctaagccatttataatattagaacatgtgaatttcattttagctatataagcttgaacaatgaaataaaaatgcagtttgaaatatcaactcaacgaatgcagacatatgcttagtttgcagcctctttaaaagtatgcttttaaaaatagtttctgaacccaacgtaaaaatttggaaaagaactgaatatggctcttaattcctaaatgcaaaaatagtaataataataaagaaactcatttacaaactttttatcaacttttgcatgtttaagttttgtccttaggatttttaatatccttctgaaaatatttgttatgccccaaattctccctttatttgaattttatttttgacgtaattatatattttaattgtaattttctttttgacgtaattatatacctaaaaaacttttcaagtaatcttgtttccaggcaaaagattgagcttatgatcaatccgctgtcgccagatcttcaagactaacatttatggagataaggaaatccatttgaattgagaaaagagaattgctaatagcactatgagaattaatttaaaattggcaaatggggacttaaggaagcagatttttctactactaacgaatttgttggcattctatactattgcgaggtcgcgtggttgataaaaatattatttttgtgtaaacataatttagtaataattgtgtttttcttgtttatatcccgtgaataaagcactttgaaggcatcaattaaggaacgtgttcaagcttttgtaagcttgtttattcgttgattagaacgctacaatttgaagtgactagctagtaatgtgacattaaatttttcggataactttagtacaatcgcttgtaggtcaacagtaaaactaactaaatactaaacctattccttggagacgggtttgcaggctatcatgtacactggaaagagtcccttgggaaagttttgttgcttgaccttgcgtacaatgcgaaatccggcttcctttaggaagtgttcatagctgtccagaggcctcgttaccgacgagtcgttcctatcttccactgtcttcttcgagctgctcacgttctccttcagacacaagaaggcgccgggcgccagtccctgctttatgcgtcgaaagaacgagaccagatcgcggtccgtgagatggcccaggacccactgggtccaaacgaggtcgtactgttgcgtaggcgtaaacttctgcaatcccacgttatagatctgtcccacctttccacggcttccgtcttccgaagtgcagtactcccgtgctttatcggcaaacgcgggatcctgctcgacaagatccacgcagctgaagcgggggatcaggagattccgagtcacccgaccaatgccagctccgcagtcgagggccaacctgttgcccggcacgcggatctcgcgcaggaacacattcgatccctgtatatctatggcactaatgtagcccaggccgccgagcatcccgttaacagtcgccggtacctcagaccaatatttttgtgccttattgtaaaattcggactccggtgcggcgactttggtcgaactatcgctcgaagaaggggacgctgtcttggcatctgaacttgcggctatactgctatcatccttctgcttcgacgacccctggaccttatccgtggtctcgtccatcatctgcaacttgtctgaaagctgctcttctaatgtagtcgtcatttttgtcaggatttcgaaggccgcatgctttgttttgttttagtgcgataaccagggctcctaaacacagtgagccatttaggttttacgaaagagtggcaacccttcaccaatcagctgttcaacaagcaacaaaattgtccgtttgtttatgttactagttttttgtttaatttttctattgtccggacaaaatgactctcgatttggatgcgcataagaaagatgacaagttgctgatcacaaccatacagcaggagtataaaattctggccgaatagtgagttttcagagttcactgataactacgtggagtaaaactaaacttatttaatttcttatgttttagcaaaatgattgagtcggagaagttgagtgggatatatgtgatacccagctatgctaactccttgcgttagtctacccacctgccaacctgtatgcagtctttagctaattttatcttttgttaatagagtggtttggagtcttctttggccgacagggcttgtatgcggaaagtgtttttcgattcacaattttgctcccagatcgttttcccgacgacaaaagtcttccggtgagtaggatcggcaatagagcaaacgtatttaactctacaagtcccctttagagcataattttccagcaggatgtgattcatccccatgtgtgcccgtacacccacagtttggacgtgagccacgccttcccggagtggcgctgtggagaggatcacctttggcagcttttaaagtacctgcaagtcattttctccgatcccttggacagtattcggggcattgaggtagataagctcaaaaacagcgaggctgcggagctgctgatgaataacaaggaggagtatgttgctcgcgtacaggaaaatatcaaggagagcaaggagcatatatttgacaccccacccaccgaagatccgcactacatagtattcgagaagttccagcaggacgtgcacgggcccgttctggagcgcatc

SEQ ID NO: 1925 - DNA, 831 bp, DROSOPHILA
atgacgactacattagaagagcagctttcagacaagttgcagatgatggacgagaccacggataaggtccaggggtcgtcgaagcagaaggatgatagcagtatagccgcaagttcagatgccaagacagcgtccccttcttcgagcgatagttcgaccaaagtcgccgcaccggagtccgaattttacaataaggcacaaaaatattggtctgaggtaccggcgactgttaacgggatgctcggcggcctgggctacattagtgccatagatatacagggatcgaatgtgttcctgcgcgagatccgcgtgccgggcaacaggttggccctcgactgcggagctggcattggtcgggtgactcggaatctcctgatcccccgcttcagctgcgtggatcttgtcgagcaggatcccgcgtttgccgataaagcacgggagtactgcacttcggaagacggaagccgtggaaaggtgggacagatctataacgtgggattgcagaagtttacgcctacgcaacagtacgacctcgtttggacccagtgggtcctgggccatctcacggaccgcgatctggtctcgttctttcgacgcataaagcagggactggcgcccggcgccttcttgtgtctgaaggagaacgtgagcagctcgaagaagacagtggaagataggaacgactcgtcggtaacgaggcctctggacagctatgaacacttcctaaaggaagccggatttcgcattgtacgcaaggtcaagcaacaaaactttcccaagggactctttccagtgtacatgatagcctgcaaacccgtctccaaggaatag

SEQ ID NO: 1926 - protein, 276 aa, DROSOPHILA
MTTTLEEQLSDKLQMMDETTDKVQGSSKQKDDSSIAASSDAKTASPSSSDSSTKVAAPESEFYNKAQKYWSEVPATVNGMLGGLGYISAIDIQGSNVFLREIRVPGNRLALDCGAGIGRVTRNLLIPRFSCVDLVEQDPAFADKAREYCTSEDGSRGKVGQIYNVGLQKFTPTQQYDLVWTQWVLGHLTDRDLVSFFRRIKQGLAPGAFLCLKENVSSSKKTVEDRNDSSVTRPLDSYEHFLKEAGFRIVRKVKQQNFPKGLFPVYMIACKPVSKE

SEQ ID NO: 1927 - DNA, 3265 bp, DROSOPHILA
gactcaatgatgtggcagatggccggtgcaatggccgcatagtgcactgtgagacactgggacgccttcttgctcttggcgatgtttccaagcatccggcaggcgcggcactggatcaggggattaggtatggtcttcagaatggtcaccagcgggtgaatcaccttgcattcaacagccttaaagtggaaagttttaaatttttttaaccgttgtggttcaaaataaagataaaaatgtaatctgataatcccacctcaatgcaggactgttcgtcggtgcagcagttccccagtatgctcagtaccacctccattatcttttcattcagcttggtgatcagtcgcacctggaagacgcaattaataatgatttaaaaatcgattcgaataacgatcctatgtgagcggcagtggctgtcaaaccaccatgagcgttgtgactcccaaacccaccatgatgtgaacgcccccagcagtgcgaaataaaacaatgccatttttatccttcaccagatcggtgcgcagcttcaccaggcatttgtaaatgactgttcgatccgtggaggtctttagcacttccagcatgctctccacttgctctggtgtccagaacattggtaattttcttaatttttaaacaaattgaaacaattcaacaaattctacagtgcgtctcaaacctctttgagagtgtgaccgtgcataagagcgtattttacggtattttacgttatttttcgaaaatccagcagcggtctgccttatttataaactgatgtttacgttttagctttggatgcgaattcgattctacaataataaatggaagcaggcctgttttttatgtagattatacaagttcccacaaaattacctccaagcttttaatttcaaattattttaatattttttaaaacccatttaataatttttcctatatttatttactttctttgtttaccgtaatcgtgacacgagggctgaagtgtcatcaccaaatcaggcgctatttggtgtttttcaactgccaacaacggtcttacagaattaaagacaaaaacgcaatcgactaaagtaattagttaataactagctgtctttgttgcgcgtaaacacggactttccccagaacgaagctaatttgcccaagtcgtgcatccaagcttttcacagatttggaaaaacctgtttcgcagtgcttgtgactcatcagttttcgcaggctcaaggagagaacttagccatggacgccactaacaatggagaatccgccgaccaggtgggcatcagggtgggcaatccggagcagcccaacgatcacacagatgccctgggctccgtgggatccggaggagcgggtagcagcggcctggtcgcaggatcctcgcatccttacggcagcggagccattgggcagctggccaacgggtacagctcaccctcgtccagctaccgtaagaatgtagccaaaatggtcaccgaccgccatgcagccgagtacaacatgcgccacaagaaccgcggaatggcactgatcttcaaccatgagcacttcgaggtgcccaccttgaagtctcgcgcgggaaccaatgtggactgcgagaatctgactcgggtgctcaagcagctggacttcgaagtgaccgtgtacaaggactgccgctacaaggacattttgaggacaatcgagtatgcagcgtcgcagaatcacagcgatagtgattgcatcctggtcgccatcctgtcgcacggcgagatgggctacatctacgccaaggacacacagtacaagctggataacatctggagcttcttcacggccaatcactgcccctcgctagccggcaaacccaagttgttcttcatacaggcctgccagggcgacagattggatggcggagtgaccatgcagcgttctcagacggaaaccgatggcgactcctcgatgagctacaagattccagtgcacgccgactttctgatcgcctactcgacggttcctggattctattcgtggcgcaacaccacccgcggcagctggttcatgcagagcctgtgcgccgaactggcggccaatggcaagcggctggacatcctgaccctgctcacattcgtgtgccagcgggtggccgtggactttgagtcctgcaccccggacactccggagatgcaccagcagaagcagataccctgcataaccaccatgctgacgcgcattctgcgtttcagcgacaagcagttggcaccagccggacgggtttgatggctaatggtatggatcaaacggtgggtacggcgaggtgtgtgataaaccaagtcgcaattaagttagaacctcatgggctatcggccttgcagcatattttttatacaacacttttttaacctgcccaattgctcgacgagattggtgccactgcccgttttattttatttaggcacaaagtatctttcgattgacatttattaatgtcgcatttactcgtctgtatttatattttttggggtgggtagagtagatcgatttaacttagaaatctaagaggtttttactccggccaaaattttttgacaattttaacttgccaactgaacaaagacgatctcaaaattttaaattctctactaaaccttatcatagaacaacttgcgcctctttgattctcgatcaggaatgtcggcccacccttatctatatctaccttagaccatttacagacaagacctttttacaattttatacacatagatatctttatagtataagcctgtgtgtcatggtcgtccaaaacgaaaacaaacgattttagcctgtagtcgagtgttttatgaacaatatatactatttctatgccatttgtactcttatataatgcacattagcaaatgttctcctttcaagttaaccgctaataaatccgattgaaaacaatgagaaatcaatgaccattggctgtttgctgttgaccctgtcgcctcttttgggcgccaagttgagcggcatttcccgaaaaggtagcacgcggagacggaaaaatagacgagtccagccattggctgaccctgatcgtacgatttcagagcttacaatcactttattcttagagctggacacaacgagaataaattccaatttatagttcacttaaagcacacgggtatgggttgaattcagagaaatttaaagcctgtcagcaaatccgactctccggctagataaatgcacgtttctgataactttcgactaattaaaaacgtagaat

SEQ ID NO: 1928 - DNA, 1265 bp, DROSOPHILA
atcaggcgctatttggtgtttttcaactgccaacaacggtcttacagaattaaagacaaaaacgcaatcgactaaagtaattagttaataactagctgtctttgttgcgcgtaaacacggactttccccagaacgaagctaatttgcccaagtcgtgcatccaagcttttcacagatttggaaaaacctgtttcgcagtgcttgtgactcatcagttttcgcaggctcaaggagagaacttagccatggacgccactaacaatggagaatccgccgaccaggtgggcatcagggtgggcaatccggagcagcccaacgatcacacagatgccctgggctccgtgggatccggaggagcgggtagcagcggcctggtcgcaggatcctcgcatccttacggcagcggagccattgggcagctggccaacgggtacagctcaccctcgtccagctaccgtaagaatgtagccaaaatggtcaccgaccgccatgcagccgagtacaacatgcgccacaagaaccgcggaatggcactgatcttcaaccatgagcacttcgaggtgcccaccttgaagtctcgcgcgggaaccaatgtggactgcgagaatctgactcgggtgctcaagcagctggacttcgaagtgaccgtgtacaaggactgccgctacaaggacattttgaggacaatcgagtatgcagcgtcgcagaatcacagcgatagtgattgcatcctggtcgccatcctgtcgcacggcgagatgggctacatctacgccaaggacacacagtacaagctggataacatctggagcttcttcacggccaatcactgcccctcgctagccggcaaacccaagttgttcttcatacaggcctgccagggcgacagattggatggcggagtgaccatgcagcgttctcagacggaaaccgatggcgactcctcgatgagctacaagattccagtgcacgccgactttctgatcgcctactcgacggttcctggattctattcgtggcgcaacaccacccgcggcagctggttcatgcagagcctgtgcgccgaactggcggccaatggcaagcggctggacatcctgaccctgctcacattcgtgtgccagcgggtggccgtggactttgagtcctgcaccccggacactccggagatgcaccagcagaagcagataccctgcataaccaccatgctgacgcgcattctgcgtttcagcgacaagcagttggcaccagccggacgggtttga

SEQ ID NO: 1929 - protein, 339 aa, DROSOPHILA
MDATNNGESADQVGIRVGNPEQPNDHTDALGSVGSGGAGSSGLVAGSSHPYGSGAIGQLANGYSSPSSSYRKNVAKMVTDRHAAEYNMRHKNRGMALIFNHEHFEVPTLKSRAGTNVDCENLTRVLKQLDFEVTVYKDCRYKDILRTIEYAASQNHSDSDCILVAILSHGEMGYIYAKDTQYKLDNIWSFFTANHCPSLAGKPKLFFIQACQGDRLDGGVTMQRSQTETDGDSSMSYKIPVHADFLIAYSTVPGFYSWRNTTRGSWFMQSLCAELAANGKRLDILTLLTFVCQRVAVDFESCTPDTPEMHQQKQIPCITTMLTRILRFSDKQLAPAGRV

SEQ ID NO: 1930 - DNA, 3406 bp, DROSOPHILA
aattaaattattaaattattcaaaacaagcaaaatacaacaacatacaacaacaaaacaaaacaaaagaagtaaaactaaacactaccagctaattatgttagataactgaatgagaaaagctaaaacaacagcaatagcaacagcaaaggcataagctaagtttgatctgcaaccaacacctcttaccacgaacaacggcaagcaataacagcaagaacccttccttcctcaccccgatataattatgaaattatattatttataaaaactgggaactaatttacggaacgatggccagcgtcaatagaacaacaatactacagcaaacagcaatgctcggggcagagagaggatgcgactcagcacatgagactagacccactacactgaaagacgaacgaacatagcgacgatatcgattagtattgttaagtttgggttaggctatatactatagatccagtcatgttgctgggtcgtcccacatctccccagccaaatcagtgttatcgatcggatgcaaagaatcgaaccgaagacctgtagattctttcgcctccgaaacgacaaaccaacaaacaaactcaacttcggttggtttaaaaatatataaaaattgataaaaatagtacaatgttgtgtttttctttctgcgcacgtacatatgtatgtatgtatatcgatctttcatatttcgacttgaacccaattattgcaatgaaagtacatatgtatttgtaattcaaaaattatattagcatacttacacagaccatttgtgcagtcaaccaattggtcgtctcaatttaatcttcggcagttcgaagctaaattattataattattttctgttgttaaaagaggaaaaaaacgtacgctcatcgcttctaaaattgttggtcaaagtaggccacgataaatacatcgaatgtcatttcgaccgactggcacacaacctcgttagccaatctcagttcagatctcaacgttgtaacatcaaaattaaaaattgtaaaaagtgaaagtccgtttttatccttttttaccaaccaactttgaagctaaactaaatcgttttaaaatcattaaacagtaaactaacatgggcgatgaaggcggtggcggtggtcatggcaagggagaccttaagtctttcctcatggacttcatgatgggcggcgtttcagctgccatagccaaaacggcagtggctcctatcgagcgcgtgaagctcattctgcaggtgcaggaggtttccaagcagatcgcggcagatcagcgctacaagggcatagtcgattgcttcattcgcattcccaaggagcagggcttctcgtcgttctggcgcggcaacttggccaacgtaatccgatacttcccaactcaagcccttaactttgccttcaaggatgtgtacaaatcggttagttgtttggacaatccttataataatcatttcacatacgcctataacatataaaacataaaacatactacaggtattcctcgggggcgtggacaagcacaagcagttctggcgccactttgcaggaaacttggcctctggcggtgcagcaggtgccacatctctgtgcttcgtttatccactggactttgccagaacccggtaagttgattcattatatacacattcaattggttttttcatttatacacatatacattaaaaattgataattttgagtaattgaggaaaacaattcgaacctttacatacttactatagtcgttcaaaataatcgatgtccaaatgagattatacattaagacgctttttctacaactgcattattcacccacatgaactgttttccccatttgatttgaatttgatttactttcattggattcgattttgttattaactatttattactattccaattcaatcttccgccgacagtttggccgccgatgtgggcaagggcggcaatcgggagttcaacggcctgatcgattgtctaatgaaggtgatcaagagtgacggacccatcggtctgtaccgtggattcatcgtgtcggtgcagggcatcgtcatctaccgagcagcatactttggattctatgacacttgccgcgactttctgccgaatccgaagagcacaccgttctatgtgagctgggcgattgcccaggtggtcacaaccgttgccggtattgcctcctatcccttcgatactgtgcgtcgccgcatgatgatgcagtctggcctgaagaagtccgagatggtgtacaagaacacagcccattgctggctggtgattgccaagcaggagggcattggagcctttttcaagggcgccctatcgaacataattcgcggcacgggcggtgctctggttctcgccctttacgacgagatgaagaagtacttttagccccagtgtgccgccgtttgtggtgggccaattcgatcgccagcagcagcagcagcagccccggccacagcaaatgtcacaccacgatggcgtagcaccaaccgaacacactgtccacctcttcgtcgaggaggacttgctcccacgagcccagtagtaaattaataatttgatttgataggtcgccccacatggtggtcggtccctcatttcagattgtgttcactttcgcagtggttgagaaaatacaaataatatattgaactcaaatctttgttgtgcgctctttgtttgttttcatcatcgcgtgttttttgctttttggtgcatgtgtgtgtacggattagggtgggccacatctaactaggatctaattatcctctcaacaagctaagctagtcgttatattcaactatatgtgaaggacaaacaaaaaaaatttaattaatttacgtatattattttgtctcgattgaatacatttcaaaaaaattacaaaatcattatatgtacgccatgaaatgataaaaggttatgtactatatgggctgcccaccctactcgttttcgtagatatggtcttgtgcgggtggatttaagacttaaacgttagttagccatttaaataaaaataacattaaaaacagaaagccatgtcgctttccattgtcaatctgctgcatacgttaattaacaacaaaaaacaaaagtacaaaaaaaagaggcaaaattacaagtactcgatctgcacttattctgtaaacaattagaaataactctagactaagatccagtcactgagttggctgcacttagtgggtagccccggacctgtgggccaggaacaggaagtacgtgcccgccgcgtaggccaggaaattgaagagtccaaagacaccggcggcggtattcgaaccggaacccttgcccgtggcatccgaccatctggccagctggacgatgaatccgatgaagtacagcagcgtcagcacagcggtggtgatc

SEQ ID NO: 1931 - DNA, 1033 bp, DROSOPHILA
aaaattaaaaattgtaaaaagtgaaagtccgtttttatccttttttaccaaccaactttgaagctaaactaaatcgttttaaaatcattaaacagtaaactaacatgggcgatgaaggcggtggcggtggtcatggcaagggagaccttaagtctttcctcatggacttcatgatgggcggcgtttcagctgccatagccaaaacggcagtggctcctatcgagcgcgtgaagctcattctgcaggtgcaggaggtttccaagcagatcgcggcagatcagcgctacaagggcatagtcgattgcttcattcgcattcccaaggagcagggcttctcgtcgttctggcgcggcaacttggccaacgtaatccgatacttcccaactcaagcccttaactttgccttcaaggatgtgtacaaatcggtattcctcgggggcgtggacaagcacaagcagttctggcgccactttgcaggaaacttggcctctggcggtgcagcaggtgccacatctctgtgcttcgtttatccactggactttgccagaacccgtttggccgccgatgtgggcaagggcggcaatcgggagttcaacggcctgatcgattgtctaatgaaggtgatcaagagtgacggacccatcggtctgtaccgtggattcatcgtgtcggtgcagggcatcgtcatctaccgagcagcatactttggattctatgacacttgccgcgactttctgccgaatccgaagagcacaccgttctatgtgagctgggcgattgcccaggtggtcacaaccgttgccggtattgcctcctatcccttcgatactgtgcgtcgccgcatgatgatgcagtctggcctgaagaagtccgagatggtgtacaagaacacagcccattgctggctggtgattgccaagcaggagggcattggagcctttttcaagggcgccctatcgaacataattcgcggcacgggcggtgctctggttctcgccctttacgacgagatgaagaagtacttttagcccca

SEQ ID NO: 1932 - protein, 307 aa, DROSOPHILA
MGDEGGGGGHGKGDLKSFLMDFMMGGVSAAIAKTAVAPIERVKLILQVQEVSKQIAADQRYKGIVDCFIRIPKEQGFSSFWRGNLANVIRYFPTQALNFAFKDVYKSVFLGGVDKHKQFWRHFAGNLASGGAAGATSLCFVYPLDFARTRLAADVGKGGNREFNGLIDCLMKVIKSDGPIGLYRGFIVSVQGIVIYRAAYFGFYDTCRDFLPNPKSTPFYVSWAIAQVVTTVAGIASYPFDTVRRRMMMQSGLKKSEMVYKNTAHCWLVIAKQEGIGAFFKGALSNIIRGTGGALVLALYDEMKKYF

SEQ ID NO: 1933 - DNA, 4046 bp, DROSOPHILA
ccccaaataaccagattcctggacataaacagccaactggccacataggcagctccctcgaccatcgaggcatccactacttggccttttcccgacctgtggcgctccaagagggcaaggcaaattcccagagcgcacatcaaactgccgccagcgaaatcggccagaatattaatgggtgcagtgaccttttcgtggcgcctgcccagcatggaaagtactcccgataaggccgcgtagttgatgtcgtgtcccgcccgttgcgccagtcttccatgctggccaaagccggtgaggcgggcataaatcaggcggggattggctgtgcacaagtcggtgggacccagatttagtttctccattactcccggtcgaaaaggttcgatgagcacatcgcacttcttgaccagcctttgcaccgcttgctgacctttcgggttcttcagatccaggcaaagtgtgcgctttccctgctgcagtacatccaaagggttttccatcacctgaacgagatgggaacatggattcaaattcggcgatcggagttgtattgaatttaacgcccagtttgtttaccttgtcgatgcgggtgactgtggccccaaagtcggttagaatcttcccacaaaacggtcctggtgctaaacccacgaattcgagtaccctgatgcctttaagtggcatctttggaggagttttgatgcgaaaagtaacaagaaaattaagtgcactttgaacggcattgcagcagagatgccaacttgtaggtgattttttctaatctcacgagacaaggagtcgaatgaaataactttaacctgcacctcctgtctctgcatgtattttttttgtttttgataaaaattaatcttgataacaagaaatgtaccagtgaaagttttatttattttcgtgacttaactgtcgagctcgacaacccggtgctctcggtgctgccaactggtgtgaaacttttaattcgcaaaagggaaaagccgcaacaacattcaatcccaattaactacaactaacagttggccaccgctgctggacgaaaccaaattgaccgggagtgagaccaggacgtgacccaaaaacgatgccacagcaacggcgcaaggtggcctttagcggcaagaagaagaaggaccagatgttgcaaaagcgcaacacaaaaggtgagaaaaccgagattgtgtgcccacctgtgaaaaggggcgtaaggctggaaaatcgaagcggatgactaacaattgttacgccggcaggtcccccaaagtatctgaggagcacgcaggagtcgtatgaggacagcgatgtgccggaaacgaccaggaaactcatggagcagccttttgcgcgcggcggaaaccgaaacaagaacgtcaatcgctataatttgcaattctaccaggagggcaaaaaggaactggagcaaatgaaacaagagggctttaaaccgttcgagaaactcagtcccgctcagcgggaagtggacgaccgatactttgccggctgcgacttcccagttcgtccaccttggacgctaacggagtccaaggaagagcttgatcgcaccgagaatcgctactttaaggtaggtcagtctactggcggcttggtttataatattaacatatccattaataatcttttgtcaggaatacgtggacgagctgcagaaaaagcagcgtgctggagattcgaaggagctttcgctgtttgagctgaatctggaaacctggcgtcagctatggcgtgtcctggagttctcggacatcctgctgatcattgtggacgtgcgctatgccacgctgatgtttccaccctccctgtacgactatattatcaacacgctaaagaaacatgcgatagtggtgttcaacaaggtggatctagtcgaaccgcatgcggtggtggcttggaggcaatacttccgcgaccgttacccccagctaccagtggtgctctttgcatccttcctcccccgatcccgcaaaggaagtcaacgtggtccacaggctcatcgcaggagtatggaaggagtgtataatatctacaaggaatgccagcgctatgtccaaggagaggtggatctaacaacctgggagcagaagatacgagaggacatgcgtagtgatcagcttgacatcctggatgaaatatcaacggccgtggagggtgaactcaagatcagcagcagcatcgacaccacgccccacgagcacgttaaatatcacagtggggtcctgaccattggctgcattggatttcccaatgtcggaaagtcgtcgctgatcaatgccttaaagggacgcaaggtggtcagcgttagtcgcacgcccggacatacgaagcactttcagacaattttcctcaccccacttgttcgcctctgtgattgtcccggtctagtctttccctcgagtactcccaaaagcctgcaagtgctgctgggcagtttccccatatcgcaactggctgttccataccgctccctgaagtttctcggcgaacatctgaatctaccacagcttctgcgtctccacctgcccgaggattacgatgagtggtctgcggtggccatctccgatgcttgggcatataagaggggattcctcaccgccaaggcagccaggccggatcgctaccgggccgcgaatcatatccttcgcatgtgcctggccggccaacagatgttggtattgcagttttatccgcccggatttgaggagcgacgtgagcactggctccaacatcccgatgtgggggaggtcaagaagtaccagcaagtcgaattagatgagccggagagcgagaccaacggcgacacatcatccgtctgctcggatagtgagtagctaacaaatttgaaaactaaaaactaaactaattttaaataaacccatcattttaagctgccgacagcgaggatgaagacgaggacagctccaatgacgagaccaatgctgatgaggaggaatgtggcatcagggaagacgcacccaggtctcggaacgtgtttgctctgctggaggacgattaaaagttgcatttactgattttgttattgcatcactagtttacacctataatttattattacgctatacaatgttttgctaacaataaactacaacaccaagctatggaggcagattatatgtcatcgatttcatcggatgaaatatagtcctcgccgagtctttcgtctagcgagagaagcaattcgatggctctgtgcggaaataaaaacgtaattattgttgttaagtgaaacgtgggttaagactaacttgatcaactgcttttcatatccgttctcctcgatcggggccggatacaaagcctttttgagcagcagtttctccaaattgcttcttaattgtatgactacgtcggcagtttcacgattgcatttaaagctaagtatgaaataagttaagtttatcctattgaaggaagatatgttatacccactaatatgtcttggccacgcacagatatggcgtattttgggtcactcccgcttccacgccatctccgaaaatgatcagtgccatgggaaaaaccattgtggagtcgagcaggaaaagatcggtggacttctgccgctgaaagtagacaaagtatgccgagtcgaagccactctctccgctgttcaccgaggagggatgaaagttaacgcggcgtccatcgtccgttgccatggtgtggatagcgcgtactctattcttgatctgccgtgattttctgcattaaattgtgtattagttattgcctctattgttaataggtggtgtctaccgcaagtgagccatgttgggatagagtcccgctcctataatggccctcagtaggggaatcttctcagaattcttattggatgcagcatccttgcagtttgacgatgccagaaatctgaaataaggtaagtagcttagtttacacaaggcagtcataaaacgaacctacttgtagttgtagagcagctcactgaactgattcttcatcctctccaactgctgcagtgtcatggagctgag

SEQ ID NO: 1934 - DNA, 1827 bp, DROSOPHILA
acaacattcaatcccaattaactacaactaacagttggccaccgctgctggacgaaaccaaattgaccgggagtgagaccaggacgtgacccaaaaacgatgccacagcaacggcgcaaggtggcctttagcggcaagaagaagaaggaccagatgttgcaaaagcgcaacacaaaaggtcccccaaagtatctgaggagcacgcaggagtcgtatgaggacagcgatgtgccggaaacgaccaggaaactcatggagcagccttttgcgcgcggcggaaaccgaaacaagaacgtcaatcgctataatttgcaattctaccaggagggcaaaaaggaactggagcaaatgaaacaagagggctttaaaccgttcgagaaactcagtcccgctcagcgggaagtggacgaccgatactttgccggctgcgacttcccagttcgtccaccttggacgctaacggagtccaaggaagagcttgatcgcaccgagaatcgctactttaaggaatacgtggacgagctgcagaaaaagcagcgtgctggagattcgaaggagctttcgctgtttgagctgaatctggaaacctggcgtcagctatggcgtgtcctggagttctcggacatcctgctgatcattgtggacgtgcgctatgccacgctgatgtttccaccctccctgtacgactatattatcaacacgctaaagaaacatgcgatagtggtgttcaacaaggtggatctagtcgaaccgcatgcggtggtggcttggaggcaatacttccgcgaccgttacccccagctaccagtggtgctctttgcatccttcctcccccgatcccgcaaaggaagtcaacgtggtccacaggctcatcgcaggagtatggaaggagtgtataatatctacaaggaatgccagcgctatgtccaaggagaggtggatctaacaacctgggagcagaagatacgagaggacatgcgtagtgatcagcttgacatcctggatgaaatatcaacggccgtggagggtgaactcaagatcagcagcagcatcgacaccacgccccacgagcacgttaaatatcacagtggggtcctgaccattggctgcattggatttcccaatgtcggaaagtcgtcgctgatcaatgccttaaagggacgcaaggtggtcagcgttagtcgcacgcccggacatacgaagcactttcagacaattttcctcaccccacttgttcgcctctgtgattgtcccggtctagtctttccctcgagtactcccaaaagcctgcaagtgctgctgggcagtttccccatatcgcaactggctgttccataccgctccctgaagtttctcggcgaacatctgaatctaccacagcttctgcgtctccacctgcccgaggattacgatgagtggtctgcggtggccatctccgatgcttgggcatataagaggggattcctcaccgccaaggcagccaggccggatcgctaccgggccgcgaatcatatccttcgcatgtgcctggccggccaacagatgttggtattgcagttttatccgcccggatttgaggagcgacgtgagcactggctccaacatcccgatgtgggggaggtcaagaagtaccagcaagtcgaattagatgagccggagagcgagaccaacggcgacacatcatccgtctgctcggatactgccgacagcgaggatgaagacgaggacagctccaatgacgagaccaatgctgatgaggaggaatgtggcatcagggaagacgcacccaggtctcggaacgtgtttgctctgctggaggacgattaa

SEQ ID NO: 1935 - protein, 575 aa, DROSOPHILA
MPQQRRKVAFSGKKKKDQMLQKRNTKGPPKYLRSTQESYEDSDVPETTRKLMEQPFARGGNRNKNVNRYNLQFYQEGKKELEQMKQEGFKPFEKLSPAQREVDDRYFAGCDFPVRPPWTLTESKEELDRTENRYFKEYVDELQKKQRAGDSKELSLFELNLETWRQLWRVLEFSDILLIIVDVRYATLMFPPSLYDYIINTLKKHAIVVFNKVDLVEPHAVVAWRQYFRDRYPQLPVVLFASFLPRSRKGSQRGPQAHRRSMEGVYNIYKECQRYVQGEVDLTTWEQKIREDMRSDQLDILDEISTAVEGELKISSSIDTTPHEHVKYHSGVLTIGCIGFPNVGKSSLINALKGRKVVSVSRTPGHTKHFQTIFLTPLVRLCDCPGLVFPSSTPKSLQVLLGSFPISQLAVPYRSLKFLGEHLNLPQLLRLHLPEDYDEWSAVAISDAWAYKRGFLTAKAARPDRYRAANHILRMCLAGQQMLVLQFYPPGFEERREHWLQHPDVGEVKKYQQVELDEPESETNGDTSSVCSDTADSEDEDEDSSNDETNADEEECGIREDAPRSRNVFALLEDD

SEQ ID NO: 1936 - DNA, 2732 bp, DROSOPHILA
agtgggtggtgggtggtggtttgtttttggttcagtgggtggtgctgggcgttgggcggtggtgcaaacaaaaaccgcaagcggtcgaaaaaagcgttgatctgagcaccgcagaaaatgaggaaaatgagcgctggcagcgagacactcgcgggaaaaccagaaaaccagcgtagccaccaattgagctactcctttatacccacctcgttgctcccatcccgtgtcaactctttttggccctggactccgaccaacttgacttgaggctcagtgtctttttgttcgtatatatacatacatatatatatatatcttcttttttgatgaaatattaatcgaaaacgctggcggagcagcaggcaggcaggcaagggcaaacagaatcgcagaatcccccaggaaacggacatagacatagccagttctgattggattgaggagttgatgttgataaagtcgttggaatagtttgattaaacggcacaaaagagacggcggctgcagcacattgcagttgtcaatggcgggaaatgcatttttcatgtgctccatgggttggcgaggtggagtttactgcgccaaggatattaacataccaatgtaaagtcgaaagaaaaaaaaataaacaagaaaaaaatgaaaagcttcaacaggttaacagtgagctttttcacatcgcaggacattctgtgcaagcttcttttgtaaactttgaaaggcgaaaagcgcttaaatttcctagcaaaacaatgaaccatttccaaaaaaaataaaagcttgcgcacaggatcaaagttcttcgaagcttttgtcggtgcttttaagctttcaagctttcaatagttcaaagaattacaacctgttcttagctggaaatttgatgtataatcatgttttcaagaaactcttcaaataaatcaaatatatctcttgatagttgaaacattgccaaaatgttttggataaataaataaattgtttatttcgtcacacttacctttgccatcgagggcgagaatctcgtttgcattgaccatcgagttgccactgccatccgccaatagcggcaacgagatcgccgaagctgtggccgttgttgtcgccgtggacgaggacgttgcacccgctgccgtggacattacggatgcggcacttatcaacagcatggacgacgcggatgacaatgacgatgaggatgccgatggcgtagatgtgacaacaaccgatgccgacgatgtggatgccatcgatgttttggccatcatcgatccatccttggcattggccttcaatccgtgactattgctgatgttcatgctgccactggtgctgctattggtcatagctgacgttgcatttccacctgcctcaccggaattcagttcgaatcgtttcctcttggattcaaccaggcggtggcaccacctggtgcctttgccaaggccaaggcagcgcatgccctgagtgaactgggtgcagtcggtggtggggtgtcattggtggtgggcggcggctctggaggaattgcaggcggaccaggtggtgtctcagtcggtgtcggtgtaccgggcggcggcggaccaggaagcggtggcggcggcggtggcggtcacaattccagttcatcgcaagcatctgctgcggttgccgctgccgttgcagcggcggccagtgagtccaagccgctgctgttgtccaagtacgatgcactcagcgacgaagattagttgtgactgccggcgtcgtcatcggcgtcggcgtcgcacctgcggccagcgacaatagcagtagcagcagcactaacgcccggcagcagtacgagcgtggtatacggctatcctggctaccggcgacactctcagcatcagcaacaacaacaacagcaacaacaacaacaacagcagccaccgcatccgcatcttgtccagcagcagcagtcgccacatcgtcagcagcagcagctgtaccagaccacggtgctgccgcctccattgcagtcccagcagcagcaactccaacagcagcaacagcagcaacagcagcagcagcaactccaccagcagcagaggagtctctactatgccagcgagcattatccgggaggcaacggaggcagctctgccggcggcaatccgggctactactgacagcagcatctgcaacattagcaacagcagcagcagcaacaacagcagcaacaacaacagcagcagcaacaacagcaaatgaaacaccataagttgtagaacaagatgcgtgagctaggcaaacgacatgtgtaaaaaaaaaaaacaaaataacagataagaaaaaaggctttaacaaaaagaagaattaaattaagagcaggcaaatataataggcaggcaattgagagatcacaagagatgcggagaggagtcaagtggagagcagacggcaatgcagacttgacaacattttaggtatagtttttgtccaatgaaaatgatttagacaatttaaaaaagtgcaaataaacaaattgtggatgcaggagaatgcagactagcataaaacttaaaactttaactatatggattgtaaatttggcacgtccaaaaaaagactttttaaagcgtgattcaaaacattttcttagtaatttaacgcaaatcatttgtaattgtatataaaaaaaaaaatgctaaatctgagcaaaacgaaatccgtattctttatgtcgcctaattgtacatgtccccatttgt

SEQ ID NO: 1937 - DNA, 10910 bp, DROSOPHILA
ttacagagcgcagtgtgtgttgcaaagaaaaagtgcaatcaaaataaaaataaaataaaaatgcaaacgcattaaggcaaatgctgttgccacgttgcagcaacaacagcaaaccaaaaataaagaaagaaataaagaagcaacttacacaattaagttagttaaactttaagagaaaaagttacaaaattatcgaaaattagtgctaactttaaagcgaaatttttttgtggggcacttccgagagaatgtcgcagtgcaataatgttgcaactgtcggcagcagcaacacaagcaacagcagcaacacgttaacaacagcaacaacaacaaaacaaagcaaatcaatcaattctgcggccaacaacaagtgtttaagccaaaagagttcggcatgaaatggaagcagctatacgctccacttcagtgcaggtcggtgctccgccgcccacaaacaacaacaacagcagcagcagcagcagcagcaacagcaacaacaacaacactagcaacaataacaacaatagcagcaacagcggcaacaacaacacaccaaacggtgcgcaacagcagcaacaacaacaccatcagcagcagcagcaacatcatcagcagcaacgtgttgttgccagcagcaaccagcaacagcaacaacaacaactacagcaacagcagcagcagcagcagcaacaacagcagcagcagcagcagcagcagcatgataatggaccaacgtcccatcatttgcatcaatcatctatcagcatctctaatcagcagaataaagcgacgcaacagcagcagcagcagcagcagcagcaacaccaaaagcagcaacaacaacaggcttccagcatgtccgcgtatcagcaacgcctgccatcaaatgcagcatccattcacaggcgcccccactggtcttacagggccctcgagcagcagcagcagtatgcgaagcaggcggctcatctgcagcagcagcagcagcaccagtcgcaccaacagcagcagcagcagcagcaacaggaccaacgcaccaacctgcatctgcaaatccatcaccaccaccaacagcagcagcagcagcagcagcagcagcaacaacaacagcaacagcagcaacagcagcagcagcaaaaacagcagcaacatcatatgcagcagcagcagcagcaacaacctttgtcaccacctcacccacccggcagcagcagcaacagtagtagtgcagcagcggcagcagcagcagcggcagcggctgcggcggccgtcaatcctggttacccgccatcatccgcagcagcggcggcagttaactccggttacccgccacggcccccgcagcatcgttttatccagaacacgggctatagcattgccccggcgcctacctaccgagataatccctactcgcgccacacccaaattcagcagcagcagcagcagcagcagcaacaacagcagcagcagcaacagcagcagcaacaacagcagcaggctgcagcgtcgatgcccgaatatcagagggcagcagctcgagcggctgtggcggcggtatcggcgggtaaaggcaacgtttctggccaaagttcgaacagcagcagcagtagcagcggaggtggaggtggaggaggaagtgccggcggatcagctccacccggcggcggtgttgtccaggtatcgcaatccggcggagtgctggtcatggaggccatgccccactatgccagtcaaccaaatagtaatccctcccagcagcagcaacagcagcatcagcagcagcaaggcggcaatcccagtggcgcgggtgcaacatctggtgctggcggcggtggaggcggcagcggtggcagcgtaatggtcgggagtctggggcgcatcctgatgccccatccacaggctctgcaatacaccagcgagtacctgaccaatgccacagcggccgttgctgcggcgatggtcaaccagcgacagcatttgcagctgcaacagcagcagcagcagcaacatccgcctgagccatttggcggccagcagccgtacaagaagcaacggcttagcgaggccaatgccaataatatgaatcacctgccaccacacccgcagcagcaacaccagcagcagcagcagcagcagcagcaacatcaggcgcaccagcagcaacatcagcgatcctcaccagcgcaagtgcaacagcaacagcagcaacagatgaatagcagtcggcagagtcacaatgatatgtgccgacaagtggtcaccacgccaatgggcatgcagctcaaggtggagacgctgccacagcagcaacagaagcagcagcagcaccaacagcagcagcagcagcagcagcagcagggccgatctcagccagtggtgagcagcatgtccaccgtggtgagccaaccagtgggcacggttaccgttaccacggcgggattatcggcgagccacagcggcagcagtggcaatgttgccgccggattgggtacgggaaatacgggatccgccagcaccgaggcctatcatcctcaggtggaggccatttcgccgacattgcccagcgatagttcgattgaggagcgcggaaggaccagcgccaaagaggatcttctcatgcaaatccaaaaggttgacaatgagatcaaatccgctgagacgacaatggaaacgttgcgcaaaaaggagaaatccctcatggaggaggccgccctggccaaagagcagagggccgccaaagagttgaacgataacaacaatgatcaggaaccgatggtggaactatcgtggcgcagccaaatgctagcggagaagatctatgcggccaatcggaagacggcccaagcgcaacattccatgctgcagaatgcagcggccgatgaatcgtctccgggttccgttgccggcagaccatggttgccattgtataaccagccactcgatgtcgaggcacttgccatgctaatacgccagcatcagagtcaaattcgtgcgccgctacttttgcacatacgaaaattgaaggccgaacgctgggcgcacaatcagggactggtggagaagtacaccaaggatcaggcggattggcagcgacgatgcgagcgtatggaggccagtgccaagaggaaagcacgcgaggcaaaaaatcgcgaattcttcgaaaaggtcttcacggagctaaggaaacagcgcgaggataaggaacgtttcaatcgcgtcggttcgcggattaaatccgaagcggatctcgaggagatcatggatggcctgcaggagcaggcgttggaggataaaaagatgcgatcctatgcggttataccgcctctgatgcacgatgcccgccagaggcgatgcgcctatcataatgaaaatggacttatcgaggatatggtggcagttcatcaacagcgtaaggccctcaacatgtggaccgccggcgagaaggagacctttaaggagaagtatttgcagcatccgaaaaactttggagccattgcggctagtttggatcgcaaatcgccacaggattgcgttcgctactactacctcagcaagaagaccgagaattacaagcagctgcttcgaaaatcccgccaacggacgcgcagttcgcgtaatccagccaaggctcaggccgcacagccgcagtgcattatcgattcgatgaccactggcgttatgacgcgattgcagcgcgaacagcaacaaaagtccggcggtcgttcatccgccgttgctgagcgtgagcgtgcggaacgtgccgccgagcgtgagcgtgtggcagagaaagcggcagctgatgctgccaaagcggctgaaagtgccgccgaaaaggcaagcgccgccactaaggctgtcgaagcaacggctgccggtgaaaaggtggccaaagcggctgcagcagcggcggcggcagcagcaactaccgccacaaccgcaacaacaaccacatcatcatcaacatcatcatcatcatcatcagcatcatcagcatcaacagcatcatcatcgacggcaagtccagcgacattggcaggaatagccgcagataaaacggatgccggcaaaacggctagcgccagcgataagaatgcagcaacagctggtggaccaacggcaacgggaactccgacagcagcaactacacctgcaacagcaacagcaccaccagagatctcagcgggcggcgaggccaagagcaaaaatgccgaggaggaggcagctgccacagccggagcagcaacggtggccactgccggtacaccggcaaccggagcaagtgcggccagtgctggcgaggcgacaacggcaacgggcgccacggcgacagctgccgccaagggtgttggcaaaccggaaacagcgactgagccagcgggaacggctgctaagggagctgactctcggccagatgccaacgatccgctggccaaaactgcttcgaaggctatcaatgccgagggctataatgctatcggtggcaacagcagcagcagcagcagcaatgcaacgggcgcctctgctccagtgcagggcgttaccttgaatggctttaagcctggctatcaaaccgtggtcatggccaatgtaaaggcatccacgggtggcgatgattctggtgcgaacgctggtggagcagcacccggatcgttagcagcaacgaatgcatcgattgcgacgagtggcgataaaatcgtcaagacaacgccatcatccagggcgccaaattctacatcttcaacggcggcgaatgagagtagtagtggtgccggagtgaatacctatggccacaccgcaacaacggcgggcaattatcttggacagaagctgaaggctgcccaagttgagggtttgggagctggcaatgaattgcattcggatgttagtgaatccaagaggaaacgattcgaactgaattccggtgaggcaggtggaaatgcaacgtcagctatgaccaatagcagcaccagtggcagcatgaacatcagcaatagtcacggattgaaggccaatgccaaggatggatcgatgatggccaaaacatcgatggcatccacatcgtcggcatcggttgttgtcacatctacgccatcggcatcctcatcgtcattgtcatccgcgtcgtccatgctgttgataagtgccgcatccgtaatgtccacggcagcgggtgcaacgtcctcgtccacggcgacaacaacggccacagcttcggcgatctcgttgccgctattggcggatggcagtggcaactcgatggtcaatgcaaacgagattctcgccctcgatggcaaagacaaattggccagctgctttgtgtgcaaggcggaggcgtgtccccgcacccgtccactaaagaaggggcgtggccagcagtatggcattccggacgaaacaataccggcgggtgcccgcgtctgcaatagctgtcaatgcaaatcggtgcgcagccgctatccaaattgtccgctacccacatgcccaaatcccaaggatcgagcccagcgtctgcggaacattccctcccgtctcttcgaactggcgcccgaggtgcgtgatccgttgatggccgaatttcaaataccaccgcatgcaacacgctgctgttcggcctgcctaatgcgcattcgtcgcaagctcgatccgcagctgaatctcaccgatggctccagtggcggtgccggcagcggcagtggcggcgatgagacggatgtcagtacctcgtcgtgtgatgaacgagagccgggcggatccgataccgcttccgttgagagtccggagaatttgcagcggcacaagtcccttacgatggtcaaacagcaacagcaacagcagcaacagcagcagcagcaacaacagcagcagcagcagcaacagcaacagcaactatcgcagccacagccacctccgccagctccgcagcagcagaagggttcgtctggacgaggtggtgatcagggtacaccactgattatcacaccaacccgaatgagcagcaagtcgggatcgggcggtgcgcaaacagcgggcgacaatgaacgcctactgccacccgccgctggccaggcacccaagaagcaaaagaccagcgaggaatacgattcctcggccacggaaacggcggatgaggagaacgaaaactcgccggccaatcgtcagagtcccaaggtactattccatggccatggacatggacatggtggtcatgccaataatgtggctggtctgcagccgccggtggccaatatggggacgggtggtggtgttcaaccaggtggagctgctgggcaacaggtcaacggaccgattagtatgcgacgcgaggcggtcaacaatgttcaggattgcgtattctcggtaattgagcgttcgctgaagcacaagggtccgcaaccgaagggcggacagggtcagcagcagggtcaggggcaaggacagggccagggtcagggtcagactccaggtcaaagccagtccccatcccagcagcaacagcagcagcagcagcagcaatctgccaataatctggaacgcaaggagcttaccattgtaagggaataccgccaggatccgggtatactgaagcagcagcagcagcagcagcaggctggcggagcaccgcccacctcggctgccggtagtttgccgcatggcacctccgtacagaagctaacaacccggccagctgcagtggcaccaccgccaccggctcatccactgacacccaccagcactggatgtgcgggcagcaacaacggaaccagcgatagcctagccaccttatcggtggtcaattcgcacatgggcatggtgggaattggtcatccgggcccgatggcccacgcaagttccgccggaggaatcggtgtggacaaggcgaccataacgccggttgtcaagagctctagtggatcatcgaagagcggcggcggcagtgcgtccagtcactcgacagccacaccgccggagaccataatctacaatgtgccagtggcgcatccgcaacgtggtataccaccaccgtcgcagcactcggtacatccggcccatccgtcgcatacacagcatccggcccatccgcagcattcgtcgcatggtcagcatacgcagctgcaagtgccggaaccggagccgcaaacattggacttgagcatcaagaagccgccgcgcgatggccattcgccgcacacgggagccggaggatctagctcgtctggctctggatcgggtggaccgtcctcatcggatcgacatcatggcccaccaccgccgaccatgtcgatgaagcacattgtacgctctggtggcatgtatcgcggtgacaccgtaactgttccatcgctggctgcacccagttcgtatctgtatcccacacggagtgtcaagaccattggcggcggtggcgtggtgcccggtgtgctgcccggtgtgcctggtagtgcactatatctacaaccagtaccagtgcccgtacccatttccatttccggtcaaggccagttgccgccgagagctggacaaccgccaccggcacagccgccatccggcaggggtgtggccaaggtgccacccaagctaagtccccagcaggcccatcacttgcatcccagtcacggacactcgccatcgcagcagcagcaacagcagcagcaacagcagcaacagcagcagcaacaggcggctgcagcacaacaacaattgctggtgaaaagcggctcaatcacccatggaacaccggccaatagtgcccagcaacagattatcgttcatgcaccagcgacggcagcagcagcaccctcctccctgctcagtcccaagttcgatggcttggtcaggcaaacgacaccagagggtgtgggttccgttggacccggaggagcaagtggcagcggcaagcatggctcgataacgcagggtacaccgttgcacatgccaccgcatcatttggagagcaaacggccatacgagagctactacaagagctcgcagcgtcacagtcccgcccaacagccgggtggcaatcagcaattgccgccgccgccgcagcaatcgtctccacaggcgccacctccgcagggctatggtgtcggtgtgagctcaccctatgcccgatcgccgttcgccggtgtcgtggaacagccgcaggtgctgagcacgcgacaaattgtgatgcacgactacataacctcacagcagatgcagggacagcaacagcagcaacagcagcagcagcagcaacagcgcaacatgtcgcgcggcagcagtgccagtggcggtggaggcggcggtggttccgacaaggagtcaccatcgccacgaaacagtgtgggcagcgccagtggtttcgcctatggcggcgacaaggaatcggcaccccgtggccgaccggagtactccagtcgtgcatcgccagccgatcatgttaatagtggtcacgatgcattggcctcgtttgtggacgtggccgtgcagcagccgcagttaccggtgccgtcgcaaaaggatgacaagtcgccgggtccatcaacggcgccgggacaagtgcccggatctggtccaccacttggaccatcacctctgccgccacacgctgtggtcggcgtggcgcagccaccgccgccgaccgcacaccacgatcaacggtatcgcgatctgaccctgcatcaccatcatcatacactggtgcagcagcagattgcgcaacaacagcattatcgtagcctcaatgtggcggcccaggtcgatatgcagcggcagatggatcaggcgaaacgtgtgatgcgccaccaacagcaccaggtccagcagcagcagcagcagcaacagcagcagcagcacaaccatgccctggaacgggacagggagatgcaggaacggatgcgcgaacgggatcgtgagcgggaaagggaaagggagcgtgagcagcgggaacgagaacgtgaacgagaacgcgaacgtgaacgggagcgcgagcgacgtgaacaggatcgtgcgcggcgtgtggtggccgaagagcgggagcacgatagtcgacgcatggagcgcatgttcgccggcaatgtggtcactggatcaggtggcgccggcggcggaggaccgtcgcccggtcaatttctgcgggcttcggttccggaaactggtccaccacgctcaatcccagatcgcgaacgggaatcgtactatcgtcaggcacacggcggtccagctccagaggatacgcccgggcaactgagcgcccagagtctgatcgatgccatcatcaagcatgagatcaatcgttccaatgatgccaccgctggcccgggtcgcgaatttccgcgcccatcgttcgttcatgctccgttgccgccacgtggttccggatcgggaggcggcaccggtacacgatcctcaccggccaatgtgctccatccgatgtacctgcgcgatctacgccagccgctcgacggcggagcgggatcaatgcttacggcggagaacaatggcaagcccagctcgtcgggatcgcccagtgtgattaatattgatttggatcaggagcgcatctcagcggcagcggcagcagttgcccagcagcagcagcagcagcaagctccgcctccgtcgcaatcgtcgcagtctagatccgtgcacggtcagctaaggacaccgacctcgcaagctggcggatcagcgcccagtccacagcagattcatacgaagagcattacctttggggaactaaccgattcgataattaccagtgactacggcaccaatcctcatctgcggccaccatatatggcctatttgcaggagacgcagtcaattctgccgccggatcgctggaagcagaaccgtcgtatgcaacagaaggccgaggaagcgaagcaccattcccagcagcagcagcagcagcaacaccagcagcaacatcacgcccagcagcagcagcagcagcagcagcaacaccatgcccagcaacatcatccgcagatgccgggcactggctctggctcggctccaggtggtgctggtcagggcggtggatcgggcggcccgggtagcggtggtggtggcgccggcagagccagcacacctggcgaggatgggcgcaacataatccgaatgccacaggcggtcagtccgcgaaaatttaatcatgagatgatgctacatcatgtgatgggaacgacgggagcgggtggtgaagctggtcagttcttcctacccagccgtgtcgttctgcccgagcagagaggaacgcccagcggtggtggtggagcgcctggagccggaggtcctggatccggaggcggtgctaccaccattgaaaaatatgtaaagacccgcattgctgaagtgatgcgcgatgatattggttatggaaagaatcggactgtcgaggtgcgaacagaggatgaagtaaccgccgatatggtggcacattcgcatgccgccgtccatgctgcacatgtggcgcacgcagcccatgtcgcccatgccgctgctatggagttgcagcacagaagcaaggaaccaccgccgccagagatcagtgtgtcacgtaagacgcccaaccaatacgaggtggtagacgccagtggcgaccaggcggtggcaccacctggtgcctttgccaaggccaaggcagcgcatgccctgagtgaactgggtgcagtcggtggtggggtgtcattggtggtgggcggcggctctggaggaattgcaggcggaccaggtggtgtctcagtcggtgtcggtgtaccgggcggcggcggaccaggaagcggtggcggcggcggtggcggtcacaattccagttcatcgcaagcatctgctgcggttgccgctgccgttgcagcggcggccagtgagtccaagccgctgctgttgtccaagtacgatgcactcagcgacgaagattagtt

SEQ ID NO: 1938 - protein, 3502 aa, DROSOPHILA
MEAAIRSTSVQVGAPPPTNNNNSSSSSSSNSNNNNTSNNNNNSSNSGNNNTPNGAQQQQQQHHQQQQQHHQQQRVVASSNQQQQQQQLQQQQQQQQQQQQQQQQQQHDNGPTSHHLHQSSISISNQQNKATQQQQQQQQQQHQKQQQQQASSMSAYQQRLPSNAASIHRRPHWSYRALEQQQQYAKQAAHLQQQQQHQSHQQQQQQQQQDQRTNLHLQIHHHHQQQQQQQQQQQQQQQQQQQQQQQKQQQHHMQQQQQQQPLSPPHPPGSSSNSSSAAAAAAAAAAAAAAVNPGYPPSSAAAAAVNSGYPPRPPQHRFIQNTGYSIAPAPTYRDNPYSRHTQIQQQQQQQQQQQQQQQQQQQQQQQAAASMPEYQRAAARAAVAAVSAGKGNVSGQSSNSSSSSSGGGGGGGSAGGSAPPGGGVVQVSQSGGVLVMEAMPHYASQPNSNPSQQQQQQHQQQQGGNPSGAGATSGAGGGGGGSGGSVMVGSLGRILMPHPQALQYTSEYLTNATAAVAAAMVNQRQHLQLQQQQQQQHPPEPFGGQQPYKKQRLSEANANNMNHLPPHPQQQHQQQQQQQQQHQAHQQQHQRSSPAQVQQQQQQQMNSSRQSHNDMCRQVVTTPMGMQLKVETLPQQQQKQQQHQQQQQQQQQQGRSQPVVSSMSTVVSQPVGTVTVTTAGLSASHSGSSGNVAAGLGTGNTGSASTEAYHPQVEAISPTLPSDSSIEERGRTSAKEDLLMQIQKVDNEIKSAETTMETLRKKEKSLMEEAALAKEQRAAKELNDNNNDQEPMVELSWRSQMLAEKIYAANRKTAQAQHSMLQNAAADESSPGSVAGRPWLPLYNQPLDVEALAMLIRQHQSQIRAPLLLHIRKLKAERWAHNQGLVEKYTKDQADWQRRCERMEASAKRKAREAKNREFFEKVFTELRKQREDKERFNRVGSRIKSEADLEEIMDGLQEQALEDKKMRSYAVIPPLMHDARQRRCAYHNENGLIEDMVAVHQQRKALNMWTAGEKETFKEKYLQHPKNFGAIAASLDRKSPQDCVRYYYLSKKTENYKQLLRKSRQRTRSSRNPAKAQAAQPQCIIDSMTTGVMTRLQREQQQKSGGRSSAVAERERAERAAERERVAEKAAADAAKAAESAAEKASAATKAVEATAAGEKVAKAAAAAAAAAATTATTATTTTSSSTSSSSSSASSASTASSSTASPATLAGIAADKTDAGKTASASDKNAATAGGPTATGTPTAATTPATATAPPEISAGGEAKSKNAEEEAAATAGAATVATAGTPATGASAASAGEATTATGATATAAAKGVGKPETATEPAGTAAKGADSRPDANDPLAKTASKAINAEGYNAIGGNSSSSSSNATGASAPVQGVTLNGFKPGYQTVVMANVKASTGGDDSGANAGGAAPGSLAATNASIATSGDKIVKTTPSSRAPNSTSSTAANESSSGAGVNTYGHTATTAGNYLGQKLKAAQVEGLGAGNELHSDVSESKRKRFELNSGEAGGNATSAMTNSSTSGSMNISNSHGLKANAKDGSMMAKTSMASTSSASVVVTSTPSASSSSLSSASSMLLISAASVMSTAAGATSSSTATTTATASAISLPLLADGSGNSMVNANEILALDGKDKLASCFVCKAEACPRTRPLKKGRGQQYGIPDETIPAGARVCNSCQCKSVRSRYPNCPLPTCPNPKDRAQRLRNIPSRLFELAPEVRDPLMAEFQIPPHATRCCSACLMRIRRKLDPQLNLTDGSSGGAGSGSGGDETDVSTSSCDEREPGGSDTASVESPENLQRHKSLTMVKQQQQQQQQQQQQQQQQQQQQQQQLSQPQPPPPAPQQQKGSSGRGGDQGTPLIITPTRMSSKSGSGGAQTAGDNERLLPPAAGQAPKKQKTSEEYDSSATETADEENENSPANRQSPKVLFHGHGHGHGGHANNVAGLQPPVANMGTGGGVQPGGAAGQQVNGPISMRREAVNNVQDCVFSVIERSLKHKGPQPKGGQGQQQGQGQGQGQGQGQTPGQSQSPSQQQQQQQQQQSANNLERKELTIVREYRQDPGILKQQQQQQQAGGAPPTSAAGSLPHGTSVQKLTTRPAAVAPPPPAHPLTPTSTGCAGSNNGTSDSLATLSVVNSHMGMVGIGHPGPMAHASSAGGIGVDKATITPVVKSSSGSSKSGGGSASSHSTATPPETIIYNVPVAHPQRGIPPPSQHSVHPAHPSHTQHPAHPQHSSHGQHTQLQVPEPEPQTLDLSIKKPPRDGHSPHTGAGGSSSSGSGSGGPSSSDRHHGPPPPTMSMKHIVRSGGMYRGDTVTVPSLAAPSSYLYPTRSVKTIGGGGVVPGVLPGVPGSALYLQPVPVPVPISISGQGQLPPRAGQPPPAQPPSGRGVAKVPPKLSPQQAHHLHPSHGHSPSQQQQQQQQQQQQQQQQAAAAQQQLLVKSGSITHGTPANSAQQQIIVHAPATAAAAPSSLLSPKFDGLVRQTTPEGVGSVGPGGASGSGKHGSITQGTPLHMPPHHLESKRPYESYYKSSQRHSPAQQPGGNQQLPPPPQQSSPQAPPPQGYGVGVSSPYARSPFAGVVEQPQVLSTRQIVMHDYITSQQMQGQQQQQQQQQQQQRNMSRGSSASGGGGGGGSDKESPSPRNSVGSASGFAYGGDKESAPRGRPEYSSRASPADHVNSGHDALASFVDVAVQQPQLPVPSQKDDKSPGPSTAPGQVPGSGPPLGPSPLPPHAVVGVAQPPPPTAHHDQRYRDLTLHHHHHTLVQQQIAQQQHYRSLNVAAQVDMQRQMDQAKRVMRHQQHQVQQQQQQQQQQQHNHALERDREMQERMRERDREREREREREQRERERERERERERERERREQDRARRVVAEEREHDSRRMERMFAGNVVTGSGGAGGGGPSPGQFLRASVPETGPPRSIPDRERESYYRQAHGGPAPEDTPGQLSAQSLIDAIIKHEINRSNDATAGPGREFPRPSFVHAPLPPRGSGSGGGTGTRSSPANVLHPMYLRDLRQPLDGGAGSMLTAENNGKPSSSGSPSVINIDLDQERISAAAAAVAQQQQQQQAPPPSQSSQSRSVHGQLRTPTSQAGGSAPSPQQIHTKSITFGELTDSIITSDYGTNPHLRPPYMAYLQETQSILPPDRWKQNRRMQQKAEEAKHHSQQQQQQQHQQQHHAQQQQQQQQQHHAQQHHPQMPGTGSGSAPGGAGQGGGSGGPGSGGGGAGRASTPGEDGRNIIRMPQAVSPRKFNHEMMLHHVMGTTGAGGEAGQFFLPSRVVLPEQRGTPSGGGGAPGAGGPGSGGGATTIEKYVKTRIAEVMRDDIGYGKNRTVEVRTEDEVTADMVAHSHAAVHAAHVAHAAHVAHAAAMELQHRSKEPPPPEISVSRKTPNQYEVVDASGDQAVAPPGAFAKAKAAHALSELGAVGGGVSLVVGGGSGGIAGGPGGVSVGVGVPGGGGPGSGGGGGGGHNSSSSQASAAVAAAVAAAASESKPLLLSKYDALSDED

SEQ ID NO: 1939 - DNA, 11356 bp, DROSOPHILA
gatgcggcacgacgaggcacatccgcgggaaatggcgtcgtcgaggaggatttgaggcacctgagtggtcttgccacatccagtgcttcctacaatgagtattacttggttttcccgcacagcctggataatatcgtcggcgtatttcatggtgggcagttttttccgtgcttctagccgtttcttggcattctcctccaactggcgttgccccagttccagctgcagtctctcgtccagcttggggtttacccagtctaagtccgcgttccgttccttggtctccgcaacgaattcctcaaagtttacactcaaaagatggcgaaactgttgctgaaatttggcatccacatttttgtcatccacattttgtctggacggtgcccggctgtagtcctccattaactccttcacacgctcaagcactccactgggagcactgacattgcagcccaagcggatttgcggctcctttgattccgcattctcgcctctgtccttcttttgctgccgggcaagattgcgatagtacaaaccgatgtccttgcccctgagacccggtgggcggttgcccttgcgggcgttggagccggatgagtccctatcgcgctgcatcctgtccaatttatataaaagaattcagaagaagaattcccaacccgaagtcaacaaaattcatagtgctgtcggactgtcaaaatgcgcaaatcagatagactaggactgccaacttaattatatacacctattgtgttactttaataattaattttcaaatataaatattttattcaaacaaaattggttgcatttagaacacgaagcaaaataaaatgaaaatcataaacaaagttttaaaaataagtgaaaaacaccggcttgctgcttattgtttggttcgaatacaggctaaatcccaaaagtatatttccataacccttgaaaatgaagcggtttgattgagcgatcccgctgcggtcacactaatttcgatcaactcaacgcgctgagtaaatcgaaccgcttgtgcttagaatttgttttttcgcaattaacggccgtgaagagccagcgatctgcatgccaagtgtccaataactaggcagaacagtgtttgcgttgcacaaaagcccgctagcggagtgtgttccatgtgtcattcccggcaaaggagcaacaagtggccgaaagtggaaagcaagagcaacaactaaataagtaaggagtaccacactgcaagaaaaagtgttcggagggaacggtgtgcacagcttgtcagcttgttttttgtacagagcgtcgcgcaataaaacaaacaaaaagacatagtccaaaaacaacaaccacaacaaaagccgtttgatcgcgagtttgtgtgcgtgtgcgagtgtggctctatttgtgtgagagtggcaagccattatttttctggtcttatgacgtaaaccaccgaaaaaaatcaaaagtgagcaggcgacacagatatcaaaacgaaggtgagcgcattcttaccaattctcgtttcgtttcttggaattccagcggttattagacggttttatacttgtttacattttcgcagttgcagcacacaactaatgccagagcgggagcgagaaagacatatgtagatcgttctgtggaaggagtgttggtcgcggagggttgtgttgtgatgttgtggaggggagggaaagagatgcagtgcatgtaaacaaaatagagaaagaggcaattgcagtaaattctttggcaaaagaaatcttgttgaaagcatttcctccgcagatgcttatgtgtactggcgacctgaaaagaaattgttgccctgcttgaacttgtcgctccactctccactacccacctcctcgccccctccctcgcacactcctctgcccacacacacacacacacacaacactccattcacaattggccttttgcggagtcatatattaaatttgatttctctagccgagcactgtgaatgatttgccgccagttggcacgcccgttcgccacactgcagaaaataccagggcacatatatatctatatctatatatctattaaatttatccttgcatgccaaatattgaaacgcagcactttatagctctcttagcttaaaatgtaaattttactcaatttaagagcactaataacgaacgtttatttcatttcctaatcaaatcttacagtttaagtactttgttttccgtgtagcgagccagaaccatccgcaaaacctgttgctcgtttgcctttttattggattttctgttttctacctctgctgctcagctgctgcgattccgatttcattagtgattcattagatgcgttggacaagctaacgcaaaaagccaaagcttgttcccaacgcatccttcaatacaaggcaattcaaatgttcaaacgctaacggccagcctctcagcctggtcaaatgaatcactccatattctccacatattctaaccaatttctctcgtgttttgtttggctctcagttttgcgctgtgaataacgtgctatttcctattttggctggccgcgattatcgcatcgttttgtaaatttagtgcgcattattaatgaatttgtccaatttgctgcggtatacttttatcgtttttgtttataattataatcagtcgttttcacgcggtgagagttttggatagcacagtggtcggattctaatttggaaaatggttaagcttgagagtgttttaatctgtaatataaacttattgtacaaacctaattataaattgatcatttttgagcttaccagtaatattcacacagtattaaaattataattcctattagatttccacccttaaaaaattttaaatgaaagccaactctcatgtgttaatgttcttaagcatgtaaaaggaaaacagcaccctttccaagtcgaagaaccactgtaatgggcctcgttccctcaaaatacgtacatatgtacgtgttaattgaaaattccacactccgttgaggctgaatcgacattacggcaccccagataattgtaaataaacccaagctgataatgatcgaccacctcccagccatccgtccatcgattggatgcattcgctgggaagccatcagaaaccgcggtctgtgcgctgctctcgaacacttgtaaacaaggaacagctgtgcaagttgtctcccccaaaatattgaagactgcgcaggccccaaaaatcgttgtttggtctttgtttagttttcgcctagctatccaacgaaatgcgcctcaaaaagctggggttagacttgaaatcttttgcatagtttatgaaatcgaacccaatatttctgttctgttctttgcagaatgtctcgtcacgagaaaacgaaatccacgggcggcgggctcctggacagtctgttcggaagaccctcgaagtccaagggaggaaccatcagcagtggcaccctggcccatggcggacgacccgtgtccgcggacaactatgtggtgccgggcgtggaggactttgagcagtacatccagcagctaagcgttgcggagctggatgcgaagtttctggagatcatcgaggacatgaacattccgaaggacaagagggagcccctgttggccaaatcgaaggaggagcgacagaagatgattatgtggcacttgaaaggtaaagaacatggtgcaagtacacgttttcaaacagaaaaccgcatttgtgtttgaagattgagtatcgtttggctaagaactatagttctggaatagaaagtctaagaataatctacatacatatacgaataatctaaactcgtctgaaccgtaatgttccaagcaactttgaaaggccaaccggattggcaaaactttaacaccctttccctttgcaagggtatacaaacagcagaccatcgattttcgtgcaactgggtgactctgccttctactttttttttttgcttttgttgtgctgcggaatattgcattccacttgtgataagataagcaggtaacggaactcgtgtccgtgtgctttccccgtttcgctgtgtgcgtgacactgcaaatttcgctttctgattgcttagcgccttcttagctgccaatttgctctgtggccaggttctgttctatatttctggccaattcctaaaccgattgaagtgatgtcaacgatcctttggataagtaagctcataacatacataagtctctaaatggtttccacttcaattagtcaagaggtgattactttgtttgttaactacatatacttgcttaactctacttcaattttgagaatactttatttctagaattattataacgatattatgtgcatcgcagcgcggtaatgattcagctggaatcttcccttgtgtttgcttcattcatatccagcgagattagtacggtgtactctactgtactacagtgatactaccaattatcactgtagcacatcgccagctgtatcttgagcacatttcaatgccagctcagctttcagcttcagcttcgttctttgggtctcgctccagttagttcaccatggccatggtccattatcagtcttgcggagtgtggaatcaaagttcccttatcgtttgtaacgcctaattgcgccacagccgcggactatctgcttgcccattttatcaagtaataccaagtgctatattatacatagtatgtatgtaagtggtacgcggcgaatgcgtgacaaagtcgagcggcaaaaaatgaaaatgcaaagacattgaatttccaccaccgtgcacattatacaatttaaattacgtcaagtggcagtgagaaaatgaaatgattcttttatttcgcgcttaggtctttttgttgtataagcaagtgcatcgtgaaggcgagagagagatgtactatgtacactgaaagtatttttactaaacatcatatataaatatagctaatgattataacctactatttataaatctcaatggccttgttattgaatataaatttaatatttcaaattttaattcaaatttcctgtaccgacgaggcttagttctcagtgtagcagaggcagagggtgattttccttacactttggaacggccataaaatgcaaatatgcgaaaacattaaacacattatgacaaaatcgagctgaaaataaattgtgatgcctgtcagtaaacttgagctgcggcacaatcgtatctcataggtgcagatagctgcgagtgagaggtaaaagcgactgaagtaagtatttgtgggtcgtgtttattgtggcagaacccacttgttgcgaaattaaatttaaaacacaaacaatggactggccgacaacaaaaaaggctcgcacaaaaagctgttcattaacacgcttcgcttgccgttttgagttaattaataaaacagttagcgtagttttgctttgacggataaacgtataagtggtgggcaggttttggccaatttgagtgatgtcagtggtgcaggtcaatcagaaaaaggggtgggtggtcgcaccgaaggcctcccttccaaaggtgggacatgatgatagccttttaactacccctatctctcacagttttagggcaaagttatcacataaagctgtgcagcaactatttagaacctccaaagtgtaatcattgagccacctatatagaatatgtatcatcctttatcatgaaatttacaaacttcaagttggaaaatctggagtgatggcaaataaacttaaaaacacatttgcgtattataatgtgttgatatgtgtataatgttacacctttgtttaacataacttgttaacgattatattccagattagagcttaagtggtaatttctcgttaattaaatggttttcttatcaaattgccattgtacgtttgtgggaaagtattccgatttagcagactaatgatagggtagagtgaatcatcgctgatatgactaaattcaggtgtgttgtcggtgggaggcaaacctctttctttcaaaatataagccttgagctattttggaatgaacccgtatactttttatcatcgaaacagcacaaacgtgagttgaatggcaaaatgtactttaatttactattgtgccaacttttaatttatgtcaaaagtgtaacaaatcaaaatgtccaatattagccataattatcaattgcttaagttacgaactgatcggattagatattaataggtgtttatagaaccatattcctatgtctactatgtaaaataccgctgaccactaaatagctttacagaaattcaatacgtgcgctcatccgactccaactccaatttctcttccaggtaaaaactcactggagcgtagcgccaactcccgcttcgagaagcccatagactatgtggaatacctgcagaatggggagcacagcacgcacaaggtgtaccaatgtgtggaatctctgcgcgtggcgctcaccagcaatccgatctcgtggatcaaggagtttggagtggcgggcatcgggacgattgagaagctgctggcccggtcaaagaataatgccagctacgagaagatcgagttcgaggcgattcggtgcctgaaggcgatcatgaacaacacatggggtctgaacgtggtgctcaatccggatcagcatagtgtggtgctgctgctggcgcaatccctggatccccggaagccgcagacgatgtgtgaagccctcaagctgctggcctcgttctgcattgtctatgagcggaatggctacgagaaggttctccgagccataaccactattgcagccacatcctttaaagcgagcgagcgctttcgacccatagtggatgccttgtttgcatcggatcagcaggatcccaaacgggacttggcatgccacagcctgatttttattaatactctcaccaatacccccacggatttgaacttccgcctgcacttgcgatgtgagattatgcgcatgggtctatacgatcgcctagatgagttcaccaaaatcgtggaggccagcaataatgagaacctgcagcagcacttcaagatcttcaacgagatccgcgaggatgacttcgaggagtttgtgcagcgcttcgataatgtcaccttcaacatggacgacgccaccgattgcttcgatgtgctgaagaacctggtgactgacaccacttccgagccctacttcctgtccatcctgcagcatttgctgtacatcagggatgacttctacttccgacctgcctattatcagctgattgaggagtgcatctcacaaatcgtcttccacaagggttactgtgatccgaatttcgagaaccggaactttaatatagacacctcgctactgctggacgacattgtggagaaggccaaggccaaggagtcgaagcggtcggaggagtacgagaagaagatcgagcagctggagagtgccaagcaagaggcggaagcgaaggcggctcatctggaggagaaagtcaagttgatggaggctaatggtgtggcggctccgtcgcccaataagctacccaaggtaaacatacccatgccaccgccaccaccaggaggaggaggagcacctcccccaccgccgccacctatgccgggacgagcaggtggtggacctccgcctccaccaccacctcccatgccgggaagggcaggtggaccgccaccacctcctccaccgcccggaatgggaggcccaccgcctccacccatgcctggcatgatgcgcccaggagggggacctccaccaccgcccatgatgatggggcccatggttcccgttctgcctcatggcttaaaaccgaagaagaagtgggacgtcaagaatcccatgaagcgggccaactggaaagccattgtcccggccaaaatgtccgacaaggcattctgggtcaagtgccaggaggataagctggcccaggatgacttcctcgcagaactggccgtgaaattctcttctaaacctgtaaagaaagaacagaaggatgcggtggacaagccaacgacgctgacaaagaaaaatgtcgatcttcgtgtgctcgactcgaagactgctcagaacttggctattatgttgggaggatcgctgaagcatctgtcctacgaacagatcaagatctgcttgctgcgctgcgacaccgacatcctgtcctccaatatcctgcagcaacttatccagtaccttccgccgccagagcacctcaagcgtttgcaggagatcaaggcaaagggcgaaccgctaccgccgattgaacagtttgcagccacaataggtaaggcgaatggagtttgtagtgcagaaggcgcagaataactttacttaatttcaggggaaattaaacgcctttcgccgcgacttcacaacctgaacttcaagctgacctacgcggacatggtgcaggatatcaaacccgacattgtggcaggaacggcagcatgcgaagagatccggaatagcaaaaagttctcaaagatcttggagctgattctgctgcttggaaattacatgaactcgggctccaaaaacgaggccgcctttggctttgagatcagttatttaaccaaactgtccaatacgaaggatgcggataataagcagacattgctgcactacctggctgacctggtggaaaagaaattcccagatgcactaaacttctacgacgatctgtcgcatgttaataaagcgtcgcgggtcaacatggatgccatccaaaaggccatgcggcaaatgaattcggcggttaagaacctggaaactgatctccagaacaacaaggtgccgcagtgtgatgatgacaagtttagcgaggtgatgggcaagtttgccgaggagtgcagacaacaagtggacgtgctgggtaagattatctcatctgatcggaacgaatattacatgagcaaaatcgaattctctaacatctcgttttaatttcaggcaaaatgcagctgcaaatggagaagctgtacaaggacctcagcgagtactatgccttcgatcccagcaaatacacaatggaggagttctttgcggacatcaagactttcaaggatgccttccaagcggcccacaacgacaatgtccgggtacgcgaggagctggagaagaagcgtcgtctgcaggaggcccgagagcagtctgctcgagagcaacaggagcgccaacagcgtaagaaggcagtggttgacatggatgccccgcagacgcaggaaggcgtgatggacagtctgttggaggcgctgcaaacgggctcagcctttggccaacgaaatcgacaggcccggcgacaacgaccggcgggagcggagcggagggcacagctcagccggagtcgatcgcggacgcgtgtcaccaacggacaactaatgacccgcgaaatgatcctcaacgaggttctaggctccgcgtagaagtaatggaacgagcaattcccctctgtacatatataaatagatatctgtagcgatataagggcctgggctcattagccgtgagtccgtgtgcgtcgccttgcttgcatatcaactcaattggcgtgtccaagagatttgacgaattggatgcccagcaggaaggactgtatcaagagccgcaaagtactaattaactggaactagagtcacaggtggattttccgaaattattaattgctgtaacggagtccttggtttataggattgagttttccgtttgaattgattggagtatttatttaattgattgtttaataaataacattttgtttagaatttataatatgcaaataacacatacaagatcacttttatttaattaaaatgattggcaggccttttaatttcagctgtacattttattttactgctatgactgtcccaatattaaagtaccaattttacaagtcgaatatactataaaaaaacttctagttgaaactaaattcatgtcaagaaattagcaatgcatatcgatgaaaactccaacttcgctacctatacgaaaaaactaaatatatagatatttttgatacgcttttacttctgaaattatgtcgttgtaagtctaaatacttaaaaatgaaactgaaagcaactttaagatttatctgtatcttgtggtctttacatactgtattcctattttactgtggcatgttccaatcattttgctgtgcacttcgttttcgaggcactcagtagagcagaggcgagatttatatcaaagcaaaattccttttgtatttaatttgtttttaagcgaaacttttttgaacttgtttaccttaaaatcctattttaatccgcgctatacataacattgttaataaatgtctatttttcgacaatgacggtatattgaaaataaaactaccaaatcaactgcttctcaaccaattgattggcaataatcctggaatattccacaagaaggcttggctgcgaatccgaaagcaatttgggctttccacccatgtgtgacttgccgccttttgttgttcttctccactctaatttgttttattaacaaagatattttatcgccaatgtcgcggcacccataaaggtgcttgattgcgacggcgaaggaggcggttgctcggctcgtacaacgcaaaatgcacttgctgcgggatcggctgggggttgcgggtgggcggaaggggtttctggaggggtttggcccggcaaacggccgtaaaactctcaaaaacgttaaacgaaccgacaaacagcgaatgccgcacgacaatgatacgtctaccatccatacatatccatccatccacactcaaatccgtctggcgtcgacgctccaccaagccacagatataggttgttagatcgggactggaacttggacatatctgtaatggtctgattgccccttgagttttatttcggagtctgctttatgggctatggcgcttgctttgctttctttatggatttattaacataattgagggaatatgtataaataccattgaattcgtagcaggttgttaatgtcaatggcggggacagattctaatttacgatggccagatagagatgcattagagtgttttacagattgaaataaatctttcattgccggaagggcaattcgaaatggattctctgctttcgattcaactaatcgtcggggaacgtttgtatattataatattatgtattatgtttgtaattgatcaacactttctatttgatgaaaaaatattacaatcttctatcaaatcttgcgtttgtacgaccaaaattcatgattcatctcgaatttgccgcccagggggagttaccatatgtttacatagatcacttagggattagcctttttgtgcgcccctaatgacttccaggtaac

SEQ ID NO: 1940 - DNA, 4706 bp, DROSOPHILA
aacgcgctgagtaaatcgaaccgcttgtgcttagaatttgttttttcgcaattaacggccgtgaagagccagcgatctgcatgccaagtgtccaataactaggcagaacagtgtttgcgttgcacaaaagcccgctagcggagtgtgttccatgtgtcattcccggcaaaggagcaacaagtggccgaaagtggaaagcaagagcaacaactaaataagtaaggagtaccacactgcaagaaaaagtgttcggagggaacggtgtgcacagcttgtcagcttgttttttgtacagagcgtcgcgcaataaaacaaacaaaaagacatagtccaaaaacaacaaccacaacaaaagccgtttgatcgcgagtttgtgtgcgtgtgcgagtgtggctctatttgtgtgagagtggcaagccattatttttctggtcttatgacgtaaaccaccgaaaaaaatcaaaagtgagcaggcgacacagatatcaaaacgaagaatgtctcgtcacgagaaaacgaaatccacgggcggcgggctcctggacagtctgttcggaagaccctcgaagtccaagggaggaaccatcagcagtggcaccctggcccatggcggacgacccgtgtccgcggacaactatgtggtgccgggcgtggaggactttgagcagtacatccagcagctaagcgttgcggagctggatgcgaagtttctggagatcatcgaggacatgaacattccgaaggacaagagggagcccctgttggccaaatcgaaggaggagcgacagaagatgattatgtggcacttgaaaggtaaaaactcactggagcgtagcgccaactcccgcttcgagaagcccatagactatgtggaatacctgcagaatggggagcacagcacgcacaaggtgtaccaatgtgtggaatctctgcgcgtggcgctcaccagcaatccgatctcgtggatcaaggagtttggagtggcgggcatcgggacgattgagaagctgctggcccggtcaaagaataatgccagctacgagaagatcgagttcgaggcgattcggtgcctgaaggcgatcatgaacaacacatggggtctgaacgtggtgctcaatccggatcagcatagtgtggtgctgctgctggcgcaatccctggatccccggaagccgcagacgatgtgtgaagccctcaagctgctggcctcgttctgcattgtctatgagcggaatggctacgagaaggttctccgagccataaccactattgcagccacatcctttaaagcgagcgagcgctttcgacccatagtggatgccttgtttgcatcggatcagcaggatcccaaacgggacttggcatgccacagcctgatttttattaatactctcaccaatacccccacggatttgaacttccgcctgcacttgcgatgtgagattatgcgcatgggtctatacgatcgcctagatgagttcaccaaaatcgtggaggccagcaataatgagaacctgcagcagcacttcaagatcttcaacgagatccgcgaggatgacttcgaggagtttgtgcagcgcttcgataatgtcaccttcaacatggacgacgccaccgattgcttcgatgtgctgaagaacctggtgactgacaccacttccgagccctacttcctgtccatcctgcagcatttgctgtacatcagggatgacttctacttccgacctgcctattatcagctgattgaggagtgcatctcacaaatcgtcttccacaagggttactgtgatccgaatttcgagaaccggaactttaatatagacacctcgctactgctggacgacattgtggagaaggccaaggccaaggagtcgaagcggtcggaggagtacgagaagaagatcgagcagctggagagtgccaagcaagaggcggaagcgaaggcggctcatctggaggagaaagtcaagttgatggaggctaatggtgtggcggctccgtcgcccaataagctacccaaggtaaacatacccatgccaccgccaccaccaggaggaggaggagcacctcccccaccgccgccacctatgccgggacgagcaggtggtggacctccgcctccaccaccacctcccatgccgggaagggcaggtggaccgccaccacctcctccaccgcccggaatgggaggcccaccgcctccacccatgcctggcatgatgcgcccaggagggggacctccaccaccgcccatgatgatggggcccatggttcccgttctgcctcatggcttaaaaccgaagaagaagtgggacgtcaagaatcccatgaagcgggccaactggaaagccattgtcccggccaaaatgtccgacaaggcattctgggtcaagtgccaggaggataagctggcccaggatgacttcctcgcagaactggccgtgaaattctcttctaaacctgtaaagaaagaacagaaggatgcggtggacaagccaacgacgctgacaaagaaaaatgtcgatcttcgtgtgctcgactcgaagactgctcagaacttggctattatgttgggaggatcgctgaagcatctgtcctacgaacagatcaagatctgcttgctgcgctgcgacaccgacatcctgtcctccaatatcctgcagcaacttatccagtaccttccgccgccagagcacctcaagcgtttgcaggagatcaaggcaaagggcgaaccgctaccgccgattgaacagtttgcagccacaataggggaaattaaacgcctttcgccgcgacttcacaacctgaacttcaagctgacctacgcggacatggtgcaggatatcaaacccgacattgtggcaggaacggcagcatgcgaagagatccggaatagcaaaaagttctcaaagatcttggagctgattctgctgcttggaaattacatgaactcgggctccaaaaacgaggccgcctttggctttgagatcagttatttaaccaaactgtccaatacgaaggatgcggataataagcagacattgctgcactacctggctgacctggtggaaaagaaattcccagatgcactaaacttctacgacgatctgtcgcatgttaataaagcgtcgcgggtcaacatggatgccatccaaaaggccatgcggcaaatgaattcggcggttaagaacctggaaactgatctccagaacaacaaggtgccgcagtgtgatgatgacaagtttagcgaggtgatgggcaagtttgccgaggagtgcagacaacaagtggacgtgctgggcaaaatgcagctgcaaatggagaagctgtacaaggacctcagcgagtactatgccttcgatcccagcaaatacacaatggaggagttctttgcggacatcaagactttcaaggatgccttccaagcggcccacaacgacaatgtccgggtacgcgaggagctggagaagaagcgtcgtctgcaggaggcccgagagcagtctgctcgagagcaacaggagcgccaacagcgtaagaaggcagtggttgacatggatgccccgcagacgcaggaaggcgtgatggacagtctgttggaggcgctgcaaacgggctcagcctttggccaacgaaatcgacaggcccggcgacaacgaccggcgggagcggagcggagggcacagctcagccggagtcgatcgcggacgcgtgtcaccaacggacaactaatgacccgcgaaatgatcctcaacgaggttctaggctccgcgtagaagtaatggaacgagcaattcccctctgtacatatataaatagatatctgtagcgatataagggcctgggctcattagccgtgagtccgtgtgcgtcgccttgcttgcatatcaactcaattggcgtgtccaagagatttgacgaattggatgcccagcaggaaggactgtatcaagagccgcaaagtactaattaactggaactagagtcacaggtggattttccgaaattattaattgctgtaacggagtccttggtttataggattgagttttccgtttgaattgattggagtatttatttaattgattgtttaataaataacattttgtttagaatttataatatgcaaataacacatacaagatcacttttatttaattaaaatgattggcaggccttttaatttcagctgtacattttattttactgctatgactgtcccaatattaaagtaccaattttacaagtcgaatatactataaaaaaacttctagttgaaactaaattcatgtcaagaaattagcaatgcatatcgatgaaaactccaacttcgctacctatacgaaaaaactaaatatatagatatttttgatacgcttttacttctgaaattatgtcgttgtaagtctaaatacttaaaaatgaaactgaaagcaactttaagatttatctgtatcttgtggtctttacatactgtattcctattttactgtggcatgttccaatcattttgctgtgcacttcgttttcgaggcactcagtagagcagaggcgagatttatatcaaagcaaaattccttttgtatttaatttgtttttaagcgaaacttttttgaacttgtttaccttaaaatcctattttaatccgcgctatacataacattgttaataaatgtctatttttcgacaatgacggtatattgaaaata

SEQ ID NO: 1941 - protein, 1091 aa, DROSOPHILA
MSRHEKTKSTGGGLLDSLFGRPSKSKGGTISSGTLAHGGRPVSADNYVVPGVEDFEQYIQQLSVAELDAKFLEIIEDMNIPKDKREPLLAKSKEERQKMIMWHLKGKNSLERSANSRFEKPIDYVEYLQNGEHSTHKVYQCVESLRVALTSNPISWIKEFGVAGIGTIEKLLARSKNNASYEKIEFEAIRCLKAIMNNTWGLNVVLNPDQHSVVLLLAQSLDPRKPQTMCEALKLLASFCIVYERNGYEKVLRAITTIAATSFKASERFRPIVDALFASDQQDPKRDLACHSLIFINTLTNTPTDLNFRLHLRCEIMRMGLYDRLDEFTKIVEASNNENLQQHFKIFNEIREDDFEEFVQRFDNVTFNMDDATDCFDVLKNLVTDTTSEPYFLSILQHLLYIRDDFYFRPAYYQLIEECISQIVFHKGYCDPNFENRNFNIDTSLLLDDIVEKAKAKESKRSEEYEKKIEQLESAKQEAEAKAAHLEEKVKLMEANGVAAPSPNKLPKVNIPMPPPPPGGGGAPPPPPPPMPGRAGGGPPPPPPPPMPGRAGGPPPPPPPPGMGGPPPPPMPGMMRPGGGPPPPPMMMGPMVPVLPHGLKPKKKWDVKNPMKRANWKAIVPAKMSDKAFWVKCQEDKLAQDDFLAELAVKFSSKPVKKEQKDAVDKPTTLTKKNVDLRVLDSKTAQNLAIMLGGSLKHLSYEQIKICLLRCDTDILSSNILQQLIQYLPPPEHLKRLQEIKAKGEPLPPIEQFAATIGEIKRLSPRLHNLNFKLTYADMVQDIKPDIVAGTAACEEIRNSKKFSKILELILLLGNYMNSGSKNEAAFGFEISYLTKLSNTKDADNKQTLLHYLADLVEKKFPDALNFYDDLSHVNKASRVNMDAIQKAMRQMNSAVKNLETDLQNNKVPQCDDDKFSEVMGKFAEECRQQVDVLGKMQLQMEKLYKDLSEYYAFDPSKYTMEEFFADIKTFKDAFQAAHNDNVRVREELEKKRRLQEAREQSAREQQERQQRKKAVVDMDAPQTQEGVMDSLLEALQTGSAFGQRNRQARRQRPAGAERRAQLSRSRSRTRVTNGQLMTREMILNEVLGSA

SEQ ID NO: 1942 - DNA, 4672 bp, DROSOPHILA
acatcacgacgttggtgtggtaggggggaggggggagggcggcgcttaaaacaggctctggcagagaaaaaaccgaattacaaaaaaagctgatagcaaaaattcattacaacaatgacagacacttaatcacttaatagagaaaatcaaaaacgagagcagatcaaccaggctttgtggcgctggtgaaatttttgcggctaagctagatttaattacggatttcaaacggagataacgagctattcaaacgaacggcctataaagtatagtttaaggctaatcaaatgtattacaactaatttaattagtctatctacactttggcattgatccctagcagatatttacaatttattgagactgattaggctttatagataaatatataaagaagttaatagctatatccattagagtaagcttcgaatattaatcacttcattaaaactgtattttaagttttttcttattacgttttttttttactcacactaaaaaatctcaaccactttaaatgcaattaatgacaaatctgtaaaaagtgattaactggagagctaagaacacaatatttcaacccaaattggtgaaggttatttgctctgcgatgattaaagttttcaaagctctcgaaatcaattgatattcttccatcatccagatcattatcgtttatcaatatgcgtacttatgagtcgcccctcgtttcgcagcttggcttcgcttgtttttgtttttccacacacatttctaatttttttgtttttgtttgccaaagttctctatctccatctctatacccctctgttctgtttgctccgatcttatgtatttccaagccgagttttattctcgctgcgttcgctttgccctcgctcttcttcgctcccgccgccgcagcttcagcggtctctcgctcttccctcttcgtcttgcccggtttcgtattctcaacgagttcacttaaagtttggatcacctccgccggcgaacagtttcagttttacctttaatgcgagcacaacaagtcagtggagagtcattctaatattccgttggtttttttttttctgtgatctgagttctttgcgccgtgtgataatttatatagtttttatggccaggaactggaactataacttctttgatatacacgtataataatccgagatttgggcttcttagaattccattttgtttgattctctaatgatgtatttattttatatggttcagcttcttcttcataattcttatctattaatagtcttctaagaatataacgtgcctagttttttgaattcagaatcacagaatgttaaaataagtcatttttccataataatcaggcatacaaaataacctaaaatcttaaaatctcacacataatgtgggtttactctggaactttccaacagttaacagtttcaatataaatacatatattttcctattcacagctatgaagctctacgccctgttctcccttctggtgggatctttggccattggtcagatttccgccgccggatctcatcatctactttgttactatgacggcaacagttttgtccgcgagggtaagtcccacttctagttcgttcttggctatatagttgataagaatcggggttatcggtggaaggaaaatgtacatatattacccgtacgtatgtacatatacatatgtgtattttgaaaccaagagatagagagctgcgcggactcaattcaattagatgattttcacttttcatagacacatgctaaaagcataaagcggtgtacttttttgcgattctgataattggcaacgggtcacaagatcagaggggaatgttttgcaaccaatttgagtaaattgcatatagagaggaaagcccacacaaaacgccagacttgaactaattgaaattggcatcgggtgttcgacgatgatgattcatgaccagaggtgccacctccaaggcgctaattgatgatgcaaaccgagcttattttagtacactcgaattttcagctgccagtggaagattcactgaatataaagtgttggcaatattaaacacatgctttttcggggacaacaatcaaatttattgattaactcaacgcttcctgttaacaaagcattagtataataagcttttacattcatgaatatatttcacaatttccttattctaaaatgaacatcaacaggcctctccaagctgatcctaaccgatctggagcccgccctgcagtactgcacccatctggtctacggatatgccggcattaatccctcgagcaacaagctggtcagcaacaatgagaaattggacctggatctgggcagcagcctgttccgccaggtgaccggattgaagcgcaagtacccagccctcaaggtcctgcttagcgtgggtggcgacaaggacaccgtggatccagagaacaacaagtatctgaccctgctggagagcagcaatgccaggattccgttcatcaacagtgctcactcgctggtgaagacctacggtttcgatggcctcgatctcggctggcagttccccaagaataagccaaagaaggtgcacggcagcattggcaagttctggaagggattcaagaagatcttcagcggtgatcatgtcgtcgacgagaaggccgaggagcacaaggaggccttcaccgccctggttcgcgaactgaagaacgccttccgtcccgatggctacatcctgggtctcagtgtcctgcccaatgtgaactcttcgcgtgagttaacataaataatttcgattgtattagatttcatttagtatgttttgttcgaaagattgcccagcatatttattatatattcaatatgtttttgtttatctggtttagtgttcttcgatgtgcccgctattatcaataacttggactacgtgaacctgcacacctacgacttccagacccccgagcgcaacaacgaggtggccgacttcccggcaccgatctacgagctgaacgagcgcaatccggagttcaatgtcaactaccaggtgaaatactggaccggaaaccgtgctccggccgctaagattaacgtgggcattgccacctatggacgtgcctggaaattgaccaaggattcgggactgactggacttccaccggttgccgaggctgatggtgtggctcctgccggaacccagacccagatacccggacttcttagctggccagaggtgtgcgccaagctcccaaatcccgccaatcagcatctgaagggcgccgatggtccgctgcgaaaggttggtgatccgaccaagcgctttggaagctatgcctaccgctccgccgacgacagcggtgaaaacggagtctgggtgggctacgaggatcccgatacggcggccatcaaggcggagtatgttaagcgcgagggtctcggcggcattgctgttgtcgatctgagcttcgatgacttccgcggcggctgcactggccacgacaagttccccatcctgcgccaggttaagagcaagttgtagagctcctcatccttctgattcttttcccgaacgaaagaacaacgtgtttttatttgccccactgttttttttatatgtaattgactcaacgcaaacctgtgtaaacgcgaaatgcaaattaaattaatataacattgacaccaaaaaaacttgtctcttacttgtttctgaatttttgtagcttacatatatttatataaccagccagccgaataacgggtatctgatagtcgatgaactcgattttagtgttccctcttgtttataatttgagtttcccacacttttccacatctgctttaagccactcgctttagctaattatttatgctaattgtactcaattgaattacataacatcattatataaagctattaacccattatgaacctttataaagtttactatcgtcaaataaattatgttaatatgacatcaatcgtgttgccgtgccttttatgccaattgttatcggccaattaattatgttgattttagtgcacttttcgcactcgcatcgcattacagtgagcactcgctgtgcgtgaaccgatgctcattgcacattaactgtaattgagtgcaacaacttccaattactttcccccgacggcaaataaactgattagaaggccggcaaatgaacgcactcatgtatgcattgtgccgccgcattgtccccgcctctgtccatgtgaaagaagtatccttctgctccccctctcgtggtccttgtcctcgtcccagctcttttcaatagcctagtgtggggctccttttatgattcggacttttgtgcctggttccttgtgctgctgtgacttcattttgctgctccttccggcatttcgtgtcagcctgtggtcgccggctgattgttttatgtgcggtgtttgtgcccgctctgcacgacccatcaagccctcggaccacccactgcaccacccactcactctaacggaaacggagcaaaaatcccctcctgctccagcgactgccttctgaacacagcaacggcttcaactgcagtcgtgtagcaacagtttccattgcattgtggccaatggctcattcatctttgggcggtggtcatgctgtgaccacttgaaccattgccgctgacacccaccaaaaatgggtg

SEQ ID NO: 1943 - DNA, 1503 bp, DROSOPHILA
tcagttttacctttaatgcgagcacaacaactatgaagctctacgccctgttctcccttctggtgggatctttggccattggtcagatttccgccgccggatctcatcatctactttgttactatgacggcaacagttttgtccgcgagggcctctccaagctgatcctaaccgatctggagcccgccctgcagtactgcacccatctggtctacggatatgccggcattaatccctcgagcaacaagctggtcagcaacaatgagaaattggacctggatctgggcagcagcctgttccgccaggtgaccggattgaagcgcaagtacccagccctcaaggtcctgcttagcgtgggtggcgacaaggacaccgtggatccagagaacaacaagtatctgaccctgctggagagcagcaatgccaggattccgttcatcaacagtgctcactcgctggtgaagacctacggtttcgatggcctcgatctcggctggcagttccccaagaataagccaaagaaggtgcacggcagcattggcaagttctggaagggattcaagaagatcttcagcggtgatcatgtcgtcgacgagaaggccgaggagcacaaggaggccttcaccgccctggttcgcgaactgaagaacgccttccgtcccgatggctacatcctgggtctcagtgtcctgcccaatgtgaactcttcgctgttcttcgatgtgcccgctattatcaataacttggactacgtgaacctgcacacctacgacttccagacccccgagcgcaacaacgaggtggccgacttcccggcaccgatctacgagctgaacgagcgcaatccggagttcaatgtcaactaccaggtgaaatactggaccggaaaccgtgctccggccgctaagattaacgtgggcattgccacctatggacgtgcctggaaattgaccaaggattcgggactgactggacttccaccggttgccgaggctgatggtgtggctcctgccggaacccagacccagatacccggacttcttagctggccagaggtgtgcgccaagctcccaaatcccgccaatcagcatctgaagggcgccgatggtccgctgcgaaaggttggtgatccgaccaagcgctttggaagctatgcctaccgctccgccgacgacagcggtgaaaacggagtctgggtgggctacgaggatcccgatacggcggccatcaaggcggagtatgttaagcgcgagggtctcggcggcattgctgttgtcgatctgagcttcgatgacttccgcggcggctgcactggccacgacaagttccccatcctgcgccaggttaagagcaagttgtagagctcctcatccttctgattcttttcccgaacgaaagaacaacgtgtttttatttgccccactgttttttttatatgtaattgactcaacgcaaacctgtgtaaacgcgaaatgcaaattaaattaatataacattgacacc

SEQ ID NO: 1944 - protein, 442 aa, DROSOPHILA
MKLYALFSLLVGSLAIGQISAAGSHHLLCYYDGNSFVREGLSKLILTDLEPALQYCTHLVYGYAGINPSSNKLVSNNEKLDLDLGSSLFRQVTGLKRKYPALKVLLSVGGDKDTVDPENNKYLTLLESSNARIPFINSAHSLVKTYGFDGLDLGWQFPKNKPKKVHGSIGKFWKGFKKIFSGDHVVDEKAEEHKEAFTALVRELKNAFRPDGYILGLSVLPNVNSSLFFDVPAIINNLDYVNLHTYDFQTPERNNEVADFPAPIYELNERNPEFNVNYQVKYWTGNRAPAAKINVGIATYGRAWKLTKDSGLTGLPPVAEADGVAPAGTQTQIPGLLSWPEVCAKLPNPANQHLKGADGPLRKVGDPTKRFGSYAYRSADDSGENGVWVGYEDPDTAAIKAEYVKREGLGGIAVVDLSFDDFRGGCTGHDKFPILRQVKSKL

SEQ ID NO: 1945 - DNA, 2503 bp, DROSOPHILA
aataacgtgctggcggggattggagcgagggaccggcggtgggcagcggggagtgcggggttgtcagggcgaacgaataaagaacacacgcacattttgtggtaacccgataccctggccagctaccctccagccaaccgtggcattcgacgaacgcaaaatgatgacgatgtctgggggagatgcggattcgatgggcaggggctggggtaggggcaggggtaagggcaagggaaggggagtgggatggacttgggactggaactggaagtggaactcggactgggtcgcctcggtggtgaatacatacatggagatgcaggggcaggggaagctcgtctgcaattgggactgtctgtgtgcaagagagggagggaagaacgcttaaggtactggattcccggagaaatggctcataatgcctggcagatcaatcaaatggcccctgaattcttctctttcataacgaggattccttgaaacagcaaagaagcatctctgtcttgggttagatattaactcattggtttaaggatcgttattctgctagaaggtttggccatatggatgatatcttgaaatactaagttatataacaaaatttaagtttaggacaatgttgaaacagaagaacattttgaaaatttttacatccttaatacaggtatataagatttgtaaaattgtatcttttcaagtatcttttacgaatgtttggcatttggcttatgctacctttcaacctgaggtcattaatcggatatttatgtaaccgaaagtcccagaatgccagaatgctattgtaaaggttggaaagttgataggaaaatatcggattacggctagattgtttgggttagttcttcaaaacttttcacccaactttgcattaaacaatgcgacggaaacccgatattgttattggcagtattttcgagctctcagtaagcagtgcccttcaattcaattcaaaatttacaaaattcttcgtaaagagaatatgcacaagacctggaataaggcgttccacaagcgcaagctggtgagctcagagcgtaataatgcatcagcatgcgaaactattcccaattcttccagtggaggagcgtgtccaagcccggaaagctggtgtactacatgcagccgctaatcgagcacctgttcgacacctggatgcaaccactgccctttccgacgctcctcaagttcatctacagctgggtgctgatcttcttcatcatgattccgatgctctatccgctgctcgtcctcctctcctactacggcatattccagtacgcggcggaggagcacttcggactgaagacgcccgagaagtgggacctcctgggcgccgccgccaggctgtggcacttcgaggtgaccaacaggaagtatctcctgttcgtgtccatgtacattgatcgctaccgagtcgttttaaccgccatatcttcgacagtcgactatatgcgcatggctctgtggttcgtcttcaactgaaccaacagccggagtccttcgatccctacttgcgaatcccgtttgcgggggagttggcttagtaactgcctttggagtggataattttaggtctttgggtggaagtgtttcgtacgaagaacttaaccaattaaaagttgagctgtattctattctgtaattctatgggtatggatataggatgaatcgtttggttccatctacctagtctttgagcactctgtcctccattctcttttggcccagcgaaggtagtgcctatgcaaacaataaccactttgccagttgctgggccgttcaaagtgccgctttggattcagatttggcgccgttgtggtttgctggctgccacaaagctgcatggaacatagatacacacaccctcatgcaaaagtaaaaaaacagaaaacgaaaagagcgcagaggagaggagcaaagcggagtggggaggggaggggaaacaatatgaaaaagttaaagtagcagcacactgagttgctcatcgaggcaacagccataaacatatatcaggttacctccaggaggagctggaggtatgcagctacgcagtccatagtacggcaaactatcgcagagaacgaacgacgtgtatctgtgagatactttcgacgactggccgtgcatgggtgtgtgcgcgagtgtgttagtgtgccttgcggttgccacggcatccaatttataatattttttgcattatttctgttttaccattttttatttccatttttattacgacaatttctcgcttttcgcctgccgttcgtgcggcgaaactgggcgtaagtgatataccatttagcataatggaactatcctggcgaaagtttgggacttttgccaatttgacccggctaatgattgtcccacccaactggaatggctagaaagacagcggaatggccactatcccattagaaatttgaattttcactctctcggctgtttgcacttcacatgacttccagccggatcgcaggac

SEQ ID NO: 1946 - DNA, 447 bp, DROSOPHILA
atgcacaagacctggaataaggcgttccacaagcgcaagctgtggaggagcgtgtccaagcccggaaagctggtgtactacatgcagccgctaatcgagcacctgttcgacacctggatgcaaccactgccctttccgacgctcctcaagttcatctacagctgggtgctgatcttcttcatcatgattccgatgctctatccgctgctcgtcctcctctcctactacggcatattccagtacgcggcggaggagcacttcggactgaagacgcccgagaagtgggacctcctgggcgccgccgccaggctgtggcacttcgaggtgaccaacaggaagtatctcctgttcgtgtccatgtacattgatcgctaccgagtcgttttaaccgccatatcttcgacagtcgactatatgcgcatggctctgtggttcgtcttcaactga

SEQ ID NO: 1947 - protein, 148 aa, DROSOPHILA
MHKTWNKAFHKRKLWRSVSKPGKLVYYMQPLIEHLFDTWMQPLPFPTLLKFIYSWVLIFFIMIPMLYPLLVLLSYYGIFQYAAEEHFGLKTPEKWDLLGAAARLWHFEVTNRKYLLFVSMYIDRYRVVLTAISSTVDYMRMALWFVFN

SEQ ID NO: 1948 - DNA, 2822 bp, DROSOPHILA
cctcttgaagctcagaaaaatatttacatagcataaattttttttacattaccccataagcaattgtcatacatttattattgtttatttcatcgagttcttaaaagcaatattcgtattcttgtcctaatgagatacaatttagaattattggcccaacgtacttattatttgattagaattcgttgaagacaactacgtatgttaacgaacggtaaaaaataataatttaaattaattatcaaatcgtaacgatgttaagctagttgtaagcttttgccaggctttggagtgtaaatcagttacgcatgcgttaaaaagaaatacttatcttgtattattagtttatatttgtaatttaaaattaacaatttagagtcgcagcgtgttcataatgtcattgcacctaaaaatgtatgcttagttacatacatcatctaggtcgtagatatctatataggtatctaggcaaatttcctaattacaaaatgattagacaattaacgggtatctgctggtcgagatcctagaccattgcattccttgttatttatgtgtataaaagctcttcgctctagatttgttctttccaatttgagttcctgacgcagccgcaatgacaatatatcactatattttttatatgacgcatgcggtaaaagcatgacaggacttttttgttgggcatctggtcctggacgacttatccacttccttttgggttggggttcctcagttcccttagaacctctgcgactgaccattttttatttatatttttttaacgaatgtcataattttagatagattatataaattaaattaaccataaaacagagctcaatgggatgccagatcgcaagatgtaggtcacattttgactgcatgctgcggcaactcttgtagtatagacaagaagatcctcaaccgttatttaaataatttgtataataaaaatgaatttttaaaacatgaaggcacacgaaactattcgtatgttggcaaacaattaacgagacggtagattaggtcttatcaaaggcataaaaagcaaatatgtattttgcttgacaaaccttactacattaatggcatcgatcatattttcttgttccttatctctcgaaaatgtcaaatgagtgcttcgcaaaatatttggagcaaatactgtagctagattatagctatccattttatttccaagcgttaaacaacatccctctgtagaccatatatcatcgctgtgtgctgccactttggctagaaatactagtaagacgtacaacgtgtctctgtgtgggatcggaagtagtcttatcaaatgtgatatagcctctagttgcaagcgtcgattccgaatacctgaaattcgtttggttaatgctgaatgcttacgcaagcttacaatacatgcgttgtgtttttaaaaacgttaaatagagtgtgttgcaaagtaatggttccggaagatcacgtaaaaattctttaagcagtgtggcaacatcatgtgggcatgtatcaacagaaatcccaaaataaatatctttatcgaattcctcccgcaactagtaaataaatcggatatagaaatataacaaaattatttaagtgaattttcaccacttacttgctttactctttttttggatgtgctcacccgaaagagtccaacctgttgtaacccgttgtcttctaaataatcaatacagttgtttacgaatattggtaccattaattgagaatgctcttgataggctttaacgaaattaagttcagtgtcttcattttcagactgagatagcgatgctaaaggctttgatatattggaaaaggagcctctaacatatgcagaaagttccgtgcttccatattcaagggattttgatggtaagctttcacatgacctgacctgaaaacaagaaaatatgctaacaatatacaaattttatatgaactttaagtgttgtgaactggctttaaaggcacaggtacaggggcctgggagctgaaccgaagtgcttcaaattttataaaaaacaaagcgtatcagccggagtgctgatttatttcgagaattaacctgggtcgtttcaataaatggttagtcgagttcctcgctatcagatacccgttaatcagatagtgaaagttagagcacacaatttcatcattgttcaggcatatctatagacattgaatctgatacattgaatatatagaagctcaacgttctagcttttatacttcctgaacatacgtcttcgtatgaacgctttgatctccataaaatctaaaatgttgagaaaaggctatggattctaatttgccacgcccaatataacataacactcataaacattttgagatttttcattattgtattagtcttgttaatttctatcgatatgccacagacattttaacgccgccactctaacgccacgtaacacttttgaaaaatatattgattttcttttttccgttttaacaatggtcttgccaaattgtatggaactaccaaaaacatcatggctacttcctgtttaacgcttacaaattacccaaatcttataacaaataacaaattacctcagaaacttctgaatcccgtaggtgttcggtaagcatccagttgtgagaattgatgctcttttcaattacctttttaggatgaggataaaatatgataaaaaaataccttttgctcccctcttatatactcaatgtctaattgaaaggcccacaagtttccactatctatgtactgtatgaactatgtactatatatttgtagtcaaagtggtttaaaaactacatttttt

SEQ ID NO: 1949 - DNA, 717 bp, DROSOPHILA
atatcaaagcctttagcatcgctatctcagtctgaaaatgaagacactgaacttaatttcgttaaagcctatcaagagcattctcaattaatggtaccaatattcgtaaacaactgtattgattatttagaagacaacgggttacaacaggttggactctttcgggtgagcacatccaaaaaaagagtaaagcaattgcgggaggaattcgataaagatatttattttgggatttctgttgatacatgcccacatgatgttgccacactgcttaaagaatttttacgtgatcttccggaaccattactttgcaacacactctatttaacgtttttaaaaacacaacgcatgtattgtattcggaatcgacgcttgcaactagaggctatatcacatttgataagactacttccgatcccacacagagacacgttgtacgtcttactagtatttctagccaaagtggcagcacacagcgatgatatatggtctacagagggatgttgtttaacgcttggaaataaaatggatagctataatctagctacagtatttgctccaaatattttgcgaagcactcatttgacattttcgagagataaggaacaagaaaatatgatcgatgccattaatgtagtaaggtttgtcaagcaaaatacatatttgctttttatgcctttgataagacctaatctaccgtctcgttaattgtttgcc

SEQ ID NO: 1950 - protein, 205 aa, DROSOPHILA
MVPIFVNNCIDYLEDNGLQQVGLFRVSTSKKRVKQLREEFDKDIYFGISVDTCPHDVATLLKEFLRDLPEPLLCNTLYLTFLKTQRMYCIRNRRLQLEAISHLIRLLPIPHRDTLYVLLVFLAKVAAHSDDIWSTEGCCLTLGNKMDSYNLATVFAPNILRSTHLTFSRDKEQENMIDAINVVRFVKQNTYLLFMPLIRPNLPSR

SEQ ID NO: 1951 - DNA, 9695 bp, DROSOPHILA
ttccttggcattctgggggatcaggggattattaattattattattattagtatagagtagatgtgattccagccggcttacatcattcaggttgaggtagaccggcggcagacccgccttgtccttgacgattccaccgcccaacgaataggaggaggaggatgatgatgatgaggaactgttcccagagcttcccgcttgctgggacaccgaaatgggcgaggatgcggataatgagccggatgagaggcccatgctatttggcggttttccgtgcaccggatttgacatatttacgtcttaatctcgagtagtttcccggtttttcttactttccttccgaaactttcccagtcaagttgctctctcgctctcttcgtagattttccgttgctttcctattgtttttgttgtggcttttccgttgtccttgacatttaacgcatttcgatttttcgattgtttggcagcccatgtgcgtggaattcgaaacgaattcggcctgctggcaagcgcactgaataaataataataattataaataattgttaactttgcaacatgaaacgtttgtacaaaacaaaaaaaaagtgcgagcgattatttttgaattttcctaatcaagctctctcgctctctctctctctatcgctatctcgcacgcagtgtgaccatgccaagcatggccaataatataccacagactgagcgaggacatctaccctgtacgtagcctaggtactcatcccgaaaacaaaatctcgcttggcaacactgcgcgcagtgcataaacaacaagaaagaagaagaccgccgacggagagaaaaatcgaagttgcattggtattggtgtctcgccgtgtgcatgtgacagcaagtgcagttagtttctaactaatcgtttcagggatttgggatggcacgcaaagagtagatatcactgcaaatcggacacaaatctgcatcccccgtcgttggactgcgcgatttagcatccggaggctgcggctagcccgctgcgctacacccgccgcaccaccccgccctcacttcgcccacaaatggaggagtcgggtccgccaagcaatccgtctccggttgcgtcacgtggccgcggacgtggtcgcccgccgaaagtggcgctttccgcgttgggaaatacgcccccgcacattaatccatcgttaaaacacgccgatgcagaggcatcgcccacggcgccggaggatcaggattccggacagagcgagtgccggcgcagttcgcgcaagaaaatcatcaagttcgatgtccgggatttgctaaacaagaaccgcaaggcgcacaaaatccagatcgaggcacggatcgactcgaatcccagtaccggccactcccagtcaggcacaactgcagcatccacatccatgtcaacagcaacagcatcagccgcatctgcatcctcagccgcgaccgtgagccgtttgttttccatgttcgagatgagccaccaatcattgccgccaccaccaccgccgccaaccgccctcgagatcttcgccaagccaagacccacacagagtctgattgtggcccaggttaccagtgaaccatcggctgttggtggcgcacatcctgtgcagacgatggccggcctgccgccggtgacacctcgcaagcggggtcgtccccgtaagagtcaactagcggatgcggccattattccaactgtcattgtgcccagctgctccgattccgatacgaactccaccagcacgaccacttccaacatgagcagtgacagcggcgagcttcctggctttcccatacagaaacccaagtccaagttgcgggtctcactcaaacgcttgaaactgggcggccggctggagtcctccgattcggggaactcgccatcgtcctcttcgccggaggttgagccaccagcactccaggatgagaacgccatggacgaacggccaaagcaggagcagaacctgagccgaatggtcgatgccgaggaaaactccgattccgactcacagatcatattcattgagatcgaaacggagagccccaagggagaggaggagcaggaagagggacggccagtcgaggtggaaccacaagatttgatcgacatcgacatggagctggccaagcaggaaccaactcccgacccggaagaagatctagatgagattatggtggaggtgctcagtgggccacccagtctctggtcagcggacgatgaagccgaggaagaggaggatgcgacagttcagagagccactccaccgggaaaggagcctgcagcggattcctgctcttcagctccacggcgcagcaggcggtcagcgccgttgagtggcagcagtcgccaggggaagactctcgaggagaccttcgccgagatagccgctgagagcagcaagcagatcctggaggcggaggaatcacaggatcaggaggagcagcacatactgatagatctcatcgaagacacgctaagtgagtcagaggttacgtcgtccgtgtcgcccactatcgagcacatggtggtggaagaagtcgtagtcgaagagaaccagttggtggatgaagcggatgaaatccttgattccaagcaagaatttgtcattaaaaaagtattttcagagtcagacaatattgctgcaagcttgaacaaagacattttcgagccaaaagtggaaactaaagctacgtgtggcgaagtggtcccacggccagaaatggtcaccgaagatgtttatattacagaaggaattgctgcaactcttgaaaaatcagccgtagtaacaaaaccaactacagaaatgattgcagaaacaaaactatccgatgaagtcgtaatagagccgccactaaaagatgaatccgatccaaagcaaacggaggtagaactgcccgaatcgaagccagcagtaaacattccaaagtccgagcgaattttatccgccgaagtggaaacgacgtcgtctccacttgtgccgccagaatgttgcaccctggaaagtgtaagtggaccggtactattagaaacatcattgtcaacggaagaaaagtcgaacgaaaatgtagaaaccactccattgaagactgaggcagcgaaagaggatagtccaccggccgctccggaagaagaggcatcgaatagttcggaagaacctaattttttgctagaagattacgaaagcaaccaggaacaagtagctgaagacgaaatgatgaagtgcaacaatcaaaaggggcaaaagcaaacaccgttgccagagatgaaggagcccgagaaacccgtcgccgaaactgtgtccaaaaaggagaaggcaatggaaaatccggccaggtcttcgccagcaattgtggataaaaaagtacgcgcaggtgaaatggaaaagaaggtcgtaaaatccacgaaagggactgttccagaaaagaaaatggattcgaagaaatcttgtgcagccgtaactcctgctaagcaaaaagagagtggaaaatctgcaaaggaagctattttgaagaaggaaactgaaaaggagaagtcttcagcaaaattagattcgtcatcacctaatacactggataaaaagggaaaagatactgcccaatggtcacctcagctccaaactttgccaaagagcagtactaagccaccacaagaatctgcaccgtcagtgatctcgaaaaccacatcgaatcaacccgcacccaaagaggaacaacatgcagcaaagaaaggtctttccgacaattcgccaccatcggttctcaaggccaaagagaaagctgtgtccggtttcgttgagtgcgatgccatgtttaaggcaatggatttggcaaacgcccagttgcgtctcgatgagaagaacaagaaaaagctgaagaaggtgccgaccaaggtagaggcaccgccaaaggtagaaccacccaccgccgtgcctgttcctgggcaaaaaaagtcgctgtctggtaagaccagcttgcgcaggaacaccgtctacgaagactcacccaatttggaacggaacagttctcccagctccgattccgctcaagcaaacacttcggctggcaagttgaagccatcgaaggtcaaaaagaagattaatccgcgacgcagcacgatatgtgaggcagccaaggatctcagatcgagctcgagtagcagcacacccactagggaggtggccgccagctcgccagtttccacctcatcggattcctcatcgaagcgaaacggatccaagagaaccacgtctgatctggacggtggctccaagttggatcaacgacggtacaccatctgcgaggatcgtcaacccgagaccgccataccagtaccgctgaccaagcgccgcttctcgatgcatcccaaggcatctgcgaatccgctgcacgatacccttcttcaaacggcgggcaagaagcggggccgaaaggaaggcaaagagtcactgagccgccagaattcgctagactccagttcgagtgcctcccaaggagcaccgaaaaagaaggccctaaagtctgcagaaattctaagtgcggcgctcttggaaactgagtcgtccgagtccacttcatcgggaagcaaaatgagccgctgggatgtgcaaacctcgccggaactggaggctgccaatccgttcggcgacattgccaagtttatcgaggacggcgtgaatcttctcaagcgcgacaaggtggatgaagatcaacggaaggaggggcaggatgaagtgaagcgagaagccgatcccgaggaggatgaattcgcgcaacgggtggctaatatggagaccccggccacaacgcctaccccatcgcccacgcaatcgaatccggaggactcagcatccaccacgactgttctcaaggagcttgagaccggcggaggcgtgcgccgctcccatcggatcaagcagaagccgcagggaccacgcgctagccagggcagaggtgtggccagcgttgcgctagcaccaatcagcatggacgagcagctggccgagctggccaacatcgaggccatcaacgagcagtttctgcgcagcgagggcctgaacactttccagttgctaaaggaaaacttctatcgttgtgccaggcaggtgagtgatcgattgggttccacacgatccgcactagaacttcatccattccataatttctgtgctttcaggtgagccaagagaatgccgaaatgcaatgcgattgctttctcactggcgacgaggaggcgcagggtcatctaagctgcggcgccggctgcatcaatcgaatgctgatgatcgagtgcggaccactgtgctcaaatggcgcgcggtgcaccaacaagcgcttccagcagcaccagtgctggccatgtcgcgtttttcgcacggagaagaagggatgcggcatcacggcggaactgctaataccgccgggtgaattcatcatggagtatgtgggcgaggtgatcgatagcgaggagttcgagcgccgacagcatctgtactcgaaggatcgcaatcgtcactactatttcatggcgctgcgaggagaagccgtcatcgacgccacctccaagggtaatatctcgcggtacatcaaccacagttgcgatccgaatgccgagacgcagaaatggacggtcaacggagagctacgcattggtttcttcagcgtgaagcctattcaacccggcgaggagattaccttcgattaccagtacctgaggtatggccgagatgcgcagcgttgctactgcgaggcagccaactgcaggggttggattggaggtgaaccggactcggatgagggcgagcaactggatgaggaaagcgacagcgatgctgagatggacgaggaggagctggaagccgagccggaggagggccagccgcgcaagtcagccaaggcaaaggcgaagtcgaagctcaaggcgaagctaccactggccaccggtcgcaagcgcaaggagcagaccaagcccaaggatcgcgaatacaaagccggccgctggctgaagccctctgctaccgggtcatcatcatcggccgaaaagcctccaaagaaaccaaaggtcaacaaattccaggcaatgctcgaggatcccgatgtggtggaggagctctcgctgcttaggcgcggcgggcttaagaaccaacaggacacgctgcgcttctcgcgttgcttggttcgtgccaagttgctcaagactcggctggcacttttgcgtgtgcttacccatggagagctaccatgtcgccggcttttcctggactatcacggcttgagattgctacatgcctggataagcgagaatggcaatgatgaccagctgagagaagcccttctggacaccctcgaatccctgcccatcccgaatcgcaccatgctaagtgatagtcgcgtataccagagtgtccaactgtggagcaacagtctggagcagcagttagctgtggtgccgcaggagaagcaggcggctcttcacaaacggatggtagccttgctccaaaaatggcaagctctgccggagatcttccgcatccctaagcgcgaacgaatcgagcagatgaaggagcacgaacgtgaggcggatcgccaacaaaagcatgtccatgccagcaccgctctggaggatcagcgcgagcgggagagcagcaacgatcgcttcaggcaggaccgtttccgacgggacacaacgagcagtcgaataggcaaacccatccgcatgagcggaaacaataccatatgcacgataaccactcagcagaagggcagcaacggagccccagacggaatgaccagaaacgataatcggcgcaggtccgacattggaccgccgtccgagcaaaggcgtacgctgtccaaggagctccggcgcagtctgtttgagaggaaggtggctctggatgaggctgagaggcgcgtgtgcaccgaggaccggctcgagcacgagctgcgctgcgagttctttggcgctgatatcaacacggatcccaagcagttgcccttctatcaaaaaacggatactaacgagtggttcaacagcgacgacgtgcccgtaccggcaccgccgcgcacagaactgttgacgaaggcgctgctatcacccgatatcgatgttggccagggtgcaactgacgtcgagtataaactgccgcctggagtggatcccctgccgcccgcttggaactggcaggtgacgagcgacggtgacatctactactacaatctgcgagagcgcatatcgcaatgggagccacccagtccggaacagcgccttcagacgctgctggaggagaataccacgcagcagccgctgcatgagcttcaaatcgatcccgcggtcctggaaaacgagctcattcaggtcgacacggactacgtgggctcgctcagtgccaagtccctggcacagtatattgaggccaaggtgcgggagcgacgtgatctgcgtcgcagtaaactggtctccatccgactgattagtccacgacgggatgaggatcgtttgtacaatcagttggagtcccggaagtacaaggagaacaaggagaagatccggcgacgcaaggagctctaccgacgacgcaaaatcgaggtcctaccggatgcggttgacgaaattcctgttcctggcaaggcactacctattcagccctacttgttctcttccgacgaggaagaaactaaagtcgcagcgatcgaacagcccgccgctgaggaggagcaggattcactgaacatggcaccgagcaccagtcatgccgccatggcggctctgggcaaggcagtggcccagccgactggattggggacggttggcaaacgtaagctaccaatgccaccgagtgttacggtgaagaagcatcgccaggaacagaggagcaagaaggtcaagaggtgagtttgcgtttggttgattgctatactgttgggcttattctaattacctgtgtgctatcagttcccagagtcccctgaccgcaaccagtgcacgcgaggcccacgagaagttccgctttgagataagcgggcatgtggccaatttcctgcgtccgtatcgcaaggagagctgcacgctgggtcggatcaccagcgatgaggactacaagttcctggttaatagggtgagttgtgaacattcgtttcttgctgcgcatttcctttatctcgactctctttccccgaacagctaagctatcatattaccaccaaggagatgcggtattgcgaggtcagcgggaatcccctgtcctgcacggagtctgtgaagcacaagtcctacgacttcatcaatcagtacatgcggcaaaaggggcccgtctacaagaagccggcggaaaacgattagaaaatcaagaaattgtgttcttctgcggcaccagaaatcgaacctgaaccaaatcccacacggaactagaactttaactttagatacgaatttagttaagcacattcgacccctaggatgcgatctacccctcgtagtgggtagcgttttaagtgggggcagccaaattgtacagttaatgaaatggcgtaagatgtaagtggaaaaattcacaatactttttgtttcttaaaattgtctaaaatttctaataaattcgcattttcattattattttcatcgacatttattagctgacaaacaataaataaaacaacataaaatgttgtgaaattctcattttattgtgattttggtagcaagaaatataaaataattaacatggaaagaaaagagatggtatgctagttatgtatgtcattccaataagaaaactgcttgcacgtaaaactgcttacttcacaaagcgtacagtagctgagagctgtactaaaatgttatccttagtgctttccaagttgtgtactaaaatacatcatattgtgcagttaactgcttgcctgttactaacatgcagtaaaggcgcaagtccaaactgcttggccacttggcgcgcattttgattattcattcaaacatttattgtattcattttgtaaaaatattcctattttggaaattaaataacaaaacttttaaattattaaaatgttatcgaataaaagcaacttttatgtactacttgctcaactaaatttcgtatcgtttcgcaaaattctttatttattcataatctattgagttggatttaatgtgaaaaacacaattgcatacgcattgttgttcggtttttttttctggcatttgaggagcgcttttcggttattaaaaattcgccatcagatcgactgggtagccacaccagaccaacaaaaaatcactccatctctgtgggcggtcgtatctgccggcggcaatctctgttggccagtggaagcgatgggaggaatgtggcaaaagccacgggtaagtggggcatgcaaatctcggggttttcgttagggggggggggggagggtgcagtgtgcatttgtggcggacgtcgatgtggcaaattaaccgcacaaagcggtggcaatatggtgagcgggcgaacacgtgacttggagcattaagcaatttgccagacggattgttggttctgttcattgagcgcctaagcaattgaattagcctttaccctttggacaacagggatcccgatctctggcgcttctctacgattggaggcgattggagtgtactggcagaaattgtcactagtttcaaattgaatctatatct

SEQ ID NO: 1952 - DNA, 3439 bp, DROSOPHILA
aggctgcggctagcccgctgcgctacacccgccgcaccaccccgccctcacttcgcccacaaatggaggagtcgggtccgccaagcaatccgtctccggttgcgtcacgtggccgcggacgtggtcgcccgccgaaagtggcgctttccgcgttgggaaatacgcccccgcacattaatccatcgttaaaacacgccgatgcagaggcatcgcccacggcgccggaggatcaggattccggacagagcgagtgccggcgcagttcgcgcaagaaaatcatcacggcggaactgctaataccgccgggtgaattcatcatggagtatgtgggcgaggtgatcgatagcgaggagttcgagcgccgacagcatctgtactcgaaggatcgcaatcgtcactactatttcatggcgctgcgaggagaagccgtcatcgacgccacctccaagggtaatatctcgcggtacatcaaccacagttgcgatccgaatgccgagacgcagaaatggacggtcaacggagagctacgcattggtttcttcagcgtgaagcctattcaacccggcgaggagattaccttcgattaccagtacctgaggtatggccgagatgcgcagcgttgctactgcgaggcagccaactgcaggggttggattggaggtgaaccggactcggatgagggcgagcaactggatgaggaaagcgacagcgatgctgagatggacgaggaggagctggaagccgagccggaggagggccagccgcgcaagtcagccaaggcaaaggcgaagtcgaagctcaaggcgaagctaccactggccaccggtcgcaagcgcaaggagcagaccaagcccaaggatcgcgaatacaaagccggccgctggctgaagccctctgctaccgggtcatcatcatcggccgaaaagcctccaaagaaaccaaaggtcaacaaattccaggcaatgctcgaggatcccgatgtggtggaggagctctcgctgcttaggcgcggcgggcttaagaaccaacaggacacgctgcgcttctcgcgttgcttggttcgtgccaagttgctcaagactcggctggcacttttgcgtgtgcttacccatggagagctaccatgtcgccggcttttcctggactatcacggcttgagattgctacatgcctggataagcgagaatggcaatgatgaccagctgagagaagcccttctggacaccctcgaatccctgcccatcccgaatcgcaccatgctaagtgatagtcgcgtataccagagtgtccaactgtggagcaacagtctggagcagcagttagctgtggtgccgcaggagaagcaggcggctcttcacaaacggatggtagccttgctccaaaaatggcaagctctgccggagatcttccgcatccctaagcgcgaacgaatcgagcagatgaaggagcacgaacgtgaggcggatcgccaacaaaagcatgtccatgccagcaccgctctggaggatcagcgcgagcgggagagcagcaacgatcgcttcaggcaggaccgtttccgacgggacacaacgagcagtcgaataggcaaacccatccgcatgagcggaaacaataccatatgcacgataaccactcagcagaagggcagcaacggagccccagacggaatgaccagaaacgataatcggcgcaggtccgacattggaccgccgtccgagcaaaggcgtacgctgtccaaggagctccggcgcagtctgtttgagaggaaggtggctctggatgaggctgagaggcgcgtgtgcaccgaggaccggctcgagcacgagctgcgctgcgagttctttggcgctgatatcaacacggatcccaagcagttgcccttctatcaaaaaacggatactaacgagtggttcaacagcgacgacgtgcccgtaccggcaccgccgcgcacagaactgttgacgaaggcgctgctatcacccgatatcgatgttggccagggtgcaactgacgtcgagtataaactgccgcctggagtggatcccctgccgcccgcttggaactggcaggtgacgagcgacggtgacatctactactacaatctgcgagagcgcatatcgcaatgggagccacccagtccggaacagcgccttcagacgctgctggaggagaataccacgcagcagccgctgcatgagcttcaaatcgatcccgcggtcctggaaaacgagctcattcaggtcgacacggactacgtgggctcgctcagtgccaagtccctggcacagtatattgaggccaaggtgcgggagcgacgtgatctgcgtcgcagtaaactggtctccatccgactgattagtccacgacgggatgaggatcgtttgtacaatcagttggagtcccggaagtacaaggagaacaaggagaagatccggcgacgcaaggagctctaccgacgacgcaaaatcgaggtcctaccggatgcggttgacgaaattcctgttcctggcaaggcactacctattcagccctacttgttctcttccgacgaggaagaaactaaagtcgcagcgatcgaacagcccgccgctgaggaggagcaggattcactgaacatggcaccgagcaccagtcatgccgccatggcggctctgggcaaggcagtggcccagccgactggattggggacggttggcaaacgtaagctaccaatgccaccgagtgttacggtgaagaagcatcgccaggaacagaggagcaagaaggtcaagagttcccagagtcccctgaccgcaaccagtgcacgcgaggcccacgagaagttccgctttgagataagcgggcatgtggccaatttcctgcgtccgtatcgcaaggagagctgcacgctgggtcggatcaccagcgatgaggactacaagttcctggttaataggctaagctatcatattaccaccaaggagatgcggtattgcgaggtcagcgggaatcccctgtcctgcacggagtctgtgaagcacaagtcctacgacttcatcaatcagtacatgcggcaaaaggggcccgtctacaagaagccggcggaaaacgattagaaaatcaagaaattgtgttcttctgcggcaccagaaatcgaacctgaaccaaatcccacacggaactagaactttaactttagatacgaatttagttaagcacattcgacccctaggatgcgatctacccctcgtagtgggtagcgttttaagtgggggcagccaaattgtacagttaatgaaatggcgtaagatgtaagtggaaaaattcacaatactttttgtttcttaaaattgtctaaaatttctaataaattcgcattttcattattattttcatcgacatttattagctgacaaacaataaataaaacaacataaaatgttgtgaaattctcatttta

SEQ ID NO: 1953 - protein, 925 aa, DROSOPHILA
MEYVGEVIDSEEFERRQHLYSKDRNRHYYFMALRGEAVIDATSKGNISRYINHSCDPNAETQKWTVNGELRIGFFSVKPIQPGEEITFDYQYLRYGRDAQRCYCEAANCRGWIGGEPDSDEGEQLDEESDSDAEMDEEELEAEPEEGQPRKSAKAKAKSKLKAKLPLATGRKRKEQTKPKDREYKAGRWLKPSATGSSSSAEKPPKKPKVNKFQAMLEDPDVVEELSLLRRGGLKNQQDTLRFSRCLVRAKLLKTRLALLRVLTHGELPCRRLFLDYHGLRLLHAWISENGNDDQLREALLDTLESLPIPNRTMLSDSRVYQSVQLWSNSLEQQLAVVPQEKQAALHKRMVALLQKWQALPEIFRIPKRERIEQMKEHEREADRQQKHVHASTALEDQRERESSNDRFRQDRFRRDTTSSRIGKPIRMSGNNTICTITTQQKGSNGAPDGMTRNDNRRRSDIGPPSEQRRTLSKELRRSLFERKVALDEAERRVCTEDRLEHELRCEFFGADINTDPKQLPFYQKTDTNEWFNSDDVPVPAPPRTELLTKALLSPDIDVGQGATDVEYKLPPGVDPLPPAWNWQVTSDGDIYYYNLRERISQWEPPSPEQRLQTLLEENTTQQPLHELQIDPAVLENELIQVDTDYVGSLSAKSLAQYIEAKVRERRDLRRSKLVSIRLISPRRDEDRLYNQLESRKYKENKEKIRRRKELYRRRKIEVLPDAVDEIPVPGKALPIQPYLFSSDEEETKVAAIEQPAAEEEQDSLNMAPSTSHAAMAALGKAVAQPTGLGTVGKRKLPMPPSVTVKKHRQEQRSKKVKSSQSPLTATSAREAHEKFRFEISGHVANFLRPYRKESCTLGRITSDEDYKFLVNRLSYHITTKEMRYCEVSGNPLSCTESVKHKSYDFINQYMRQKGPVYKKPAEND

SEQ ID NO: 1954 - DNA, 5044 bp, DROSOPHILA
actcccgctcacgcacacacttatataacaacaacagagtgtgtgtgatgatgctgctgctttgttgtgtagtagttattcacatttttgctgcatacttttcggctgctcctcccccttttgcgtttcgccttttgcgtgtatgtgtattgacgcagagtttaattagaattattttgtatatttattgctcctttcgtcctttgtttatttttgattttattacttattgtgccagttgttgtttttccgccacacagcagcttttccgctctgctcgccagtgcgattggtctctgctctgccggcgcctctgtctcggtcgacgtcgctgcgctgctctgcccgtcaatcgacgcaacagcgctactgtctgcctatcgatgggcaggaatttcaaaacagggttgtcagcccatggaaaattatagtattgtacgttaatggaaaaatatctatctagtatctctttcaaatatgaattttacgagctgtagatcggatgttactggtctcaacagttaatttgctgcagttttcaatcttaggtttgctttatataacaaataaatagaccataaaagctctacctaagcccaaaaaacaaggtaccaattaatccgtacagctttaagatagaaggatgtcctaaatcaatgaatgaaagaaaatgcttccatgccatttttggagtattgatacaaactccctcaccactttcaagccttggtaatttaatagactttaacagtttcaagaaaatataatcattaatttttatgatatgttgtgatatgaagttatgatatcgcgatgctttttattcattattatcattattgatgttaagcaacttgtgctaaatttgctttccatgattcgttggtagccctgctcgtcacttcttcaaatgggcgcctggattcaaatcggcatttatttacgccgttgcgttatttacgttcgattacccttcctaagaactcaagtatatacatatcgatttcaatgtgtttattttgcaattaaggccttttaaaggcttaagacactggcaagaggtatccggttactttgaacttaagctatcctgaatgtttctttaagaatgtttgcgtattcctatttcagaagtacttaaaaaacaaactaagtgcgaaacgtgatgcaacgtaatagagaattacttagtgaatattgtgctaaaactatgtacaatagaaacatttcgggtcaacgaaccaaagaacgaagaaaaccacgctgaagtgatgtaaagtgagcttattccacaaggacaacatcgccgcaggtcatgtgttgctccttgggttccagttcttttgtgtcctgggggatcctagtgatgtagatgccgaatcgcatgcgacccttctgcaggcgggatatggtggtcaaggtttctggcgaccgttcgcctgtcctttggttaatgcagatcatgtcgcagcgctggcagggaccctccacctgaaattggattcccccaatggacagggccttgtaggtaagctcctcaaaggcactgcccgtgtcgatgatgatatttgcccgaaaacgatccacagtctcgtcgaggggctcttcaaattgaagcgatcgcacggaagacttgtttagcagcaagaactgggcctgattaaccagacttagcttctgctgatccttggaagagtttctctggcccgattgtcgaagcaaacggaggccctccatgccgaggttttcgcttaaccactgggcaaccctatcgccgcaatccaaaccttccacgggctgtcggcacaccttgcttacgcattttgctgtgtcggctgcctggtcatccagagaaaggggcaccgagatggtggaattttctccaaactgcagctccaattggtcaaccttaatcactggcctaattaggcacaactccgtgcagcgtttctgggtcaacgccatgccattcatgtccacgatcatccactcacggtcatatttcaaaccttgatccgtcaatggccaggagcccggtaattcgatcttaaaggcggcacaagactttaccggatatatggccatctgcaatagttttggcctcaagagctggactcgctccttcagcaacggcggcaattgctccgcctgctcctcgatgaactgaatccgctgcagcggcttggttgccaaataactggagcgcagcatctggagcagcttgtctacgtcctgaatagttgtcatatagccaaaagatacccgtaccgctcccgtcggctgtccatcgatcagatcaaagtagtcgccgcatatgcgacctgctcgcttgtaaatcgcatccaaagcatcttcatcgaggcctaggtaatattggcaggctccgatgttgcagaagcaaccagtccgcaggagtattccgtgcagagcagccacacaggcgatctcgccgaatcccacaaacgaacccgattcagtgcgcacgttaaaggccacgatgccaccctgccgggatttgtcttggtagcccactttattgtacagcttcacgaggggctcaccattgggatgatgcagctggcgcagctgatcctccagatacttggccagaccaaagacgtgtctgaaaatacaatgattggaaaataaggctgaagtcatcagacttatcattatctaatcacctggaaatcctctccatggtgctaaactcgtccgttctgggcaccaatctctccagcgttcgaaagccctcgagcaacccgacaatggagaggaatggcagggtgccgtcctcgtagcgctgatggaaggtctctctcagctggtaatccatggcatgcggatatgcgtagttgatggtaccaccgccaaaaaagcggcgcttctggaagacctcggctcctcgtcgactcacgagcagggctcccacgcccgtgggataaccgaagatcttgtagaaactaaggcacacgtaatctggtctatacttttgcagatccaacggactggtggccacaaaagacgccgcatccaggcagatatagtaatcgttgtgcatattcttcttcttctctcccaaagagctccaaagctcttttcccggcttggccaagccatcgatttggatttgctcaatgacttccagtgggattttgtaaccactaaagttgcattgggccgaaaaggtcagcaaggagtttcctgtttttccggacacctcgtgaactttcccgttcgccttgtgctttccgccagagatttcattctccctcagcatgtatataccgttttcccggaccctttcccgcattcccagcactgaggtgtggttctcctggcagaagtgaaactcaccagaggatccaaagtcaaagttttccgccaccagggacaaagcagcggtggcattcgccgtgaatatcacatggtaatcttcggcggtggtgttaaagaattccagtattctaaaaaagtgtatatgaatagaagttttactaaaaacaacttaaccacaaatgaggaagataagcagcgacataaggatattttacgatattgctatatgcacataaataattattaataaaagcgccacacaagggcaacccaatgacagggggagaatggttgttttggctcgtggacacggatgaactcacttgaatcgcacctggtcgacgaagtcgccggtgaggcggcaggtgtgcggattgcagatgacattgcgctgcagttgctccgcggcggccgtcacctggctctcggcatagagagtggtgcccgcatgatccaggtaaacactcttgttgcctgttcgatagacggatagttaggttcgttatctgtttgcgctgggtatttcaccatggttctccacttactggccaatctagagaattccgcgtctatttgcgactgctccgatgcggagaactccggccgatatgatgtcatgttgggaactaactattcgtgttggctgcaaagcgggctttatttatttgcgaccggcttgcatttgttgcgccatactcttcttcgctggaaaaagccacggacagtatacatcaactatcacgttcagttgagcatttgctttgacttctctttgaacttactccaccctacacattttacgaagctcaatttattaagcttcttgtgcattatgtttgcttattgtaatatatatatcatattctcacactgctcaccaatattatagatgtagcattttaccaaatcttttccaattattaactctgaattgcatagaattttaaactcaaattgtacggtattaactagtcgttgtgcactttgcatggctattcaaacatatgttctgagtgttggcaaacaattggtgttaggaaaatggttgctaatggctaattggccaattgtatgacaataatttttggaaactacaatcttattatttaaaacatttataaaatgttttttaactacagaacattaaattcgttttcacatctagacgatagcctacacatacagctgattattcgatttacatcgatatcgggggccgataacagcctgcgttgattttttaaagtttttacctttttatttcacaattgtaagcagttggcaaactttgggactgcgaaatggagaatttcctgcggggcacgttgtccaaatgtctggactgtgtaatcacggatcagatgttggcgtaagtacatgatgcatccagatacgagcaaatgagtttctcaatggcttcatattcccttccagggccatactgaacatcaaagacgactatgaattcgacaactactttggcaatttactgagcgaggacaacgaggagcaccgcatgtttcttgtaaactgtcgccggatgctactgagtggcaaacagccgcggaacaatggaaaatatctctcgccccctctggcacccacatcacccaattgtcccaagcaaaatatcagcaagggtgccaagggcaagtcagggaaacacgtgaatctgtacgccagcgatggtcgcgtccagggcgac

SEQ ID NO: 1955 - DNA, 2717 bp, DROSOPHILA
cgaagaagagtatggcgcaacaaatgcaagccggtcgcaaataaataaagcccgctttgcagccaacacgaatagttagttcccaacatgacatcatatcggccggagttctccgcatcggagcagtcgcaaatagacgcggaattctctagattggccagcaacaagagtgtttacctggatcatgcgggcaccactctctatgccgagagccaggtgacggccgccgcggagcaactgcagcgcaatgtcatctgcaatccgcacacctgccgcctcaccggcgacttcgtcgaccaggtgcgattcaaaatactggaattctttaacaccaccgccgaagattaccatgtgatattcacggcgaatgccaccgctgctttgtccctggtggcggaaaactttgactttggatcctctggtgagtttcacttctgccaggagaaccacacctcagtgctgggaatgcgggaaagggtccgggaaaacggtatatacatgctgagggagaatgaaatctctggcggaaagcacaaggcgaacgggaaagttcacgaggtgtccggaaaaacaggaaactccttgctgaccttttcggcccaatgcaactttagtggttacaaaatcccactggaagtcattgagcaaatccaaatcgatggcttggccaagccgggaaaagagctttggagctctttgggagagaagaagaagaatatgcacaacgattactatatctgcctggatgcggcgtcttttgtggccaccagtccgttggatctgcaaaagtatagaccagattacgtgtgccttagtttctacaagatcttcggttatcccacgggcgtgggagccctgctcgtgagtcgacgaggagccgaggtcttccagaagcgccgcttttttggcggtggtaccatcaactacgcatatccgcatgccatggattaccagctgagagagaccttccatcagcgctacgaggacggcaccctgccattcctctccattgtcgggttgctcgagggctttcgaacgctggagagattggtgcccagaacggacgagtttagcaccatggagaggatttccagacacgtctttggtctggccaagtatctggaggatcagctgcgccagctgcatcatcccaatggtgagcccctcgtgaagctgtacaataaagtgggctaccaagacaaatcccggcagggtggcatcgtggcctttaacgtgcgcactgaatcgggttcgtttgtgggattcggcgagatcgcctgtgtggctgctctgcacggaatactcctgcggactggttgcttctgcaacatcggagcctgccaatattacctaggcctcgatgaagatgctttggatgcgatttacaagcgagcaggtcgcatatgcggcgactactttgatctgatcgatggacagccgacgggagcggtacgggtatcttttggctatatgacaactattcaggacgtagacaagctgctccagatgctgcgctccagttatttggcaaccaagccgctgcagcggattcagttcatcgaggagcaggcggagcaattgccgccgttgctgaaggagcgagtccagctcttgaggccaaaactattgcagatggccatatatccggtaaagtcttgtgccgcctttaagatcgaattaccgggctcctggccattgacggatcaaggtttgaaatatgaccgtgagtggatgatcgtggacatgaatggcatggcgttgacccagaaacgctgcacggagttgtgcctaattaggccagtgattaaggttgaccaattggagctgcagtttggagaaaattccaccatctcggtgcccctttctctggatgaccaggcagccgacacagcaaaatgcgtaagcaaggtgtgccgacagcccgtggaaggtttggattgcggcgatagggttgcccagtggttaagcgaaaacctcggcatggagggcctccgtttgcttcgacaatcgggccagagaaactcttccaaggatcagcagaagctaagtctggttaatcaggcccagttcttgctgctaaacaagtcttccgtgcgatcgcttcaatttgaagagcccctcgacgagactgtggatcgttttcgggcaaatatcatcatcgacacgggcagtgcctttgaggagcttacctacaaggccctgtccattgggggaatccaatttcaggtggagggtccctgccagcgctgcgacatgatctgcattaaccaaaggacaggcgaacggtcgccagaaaccttgaccaccatatcccgcctgcagaagggtcgcatgcgattcggcatctacatcactaggatcccccaggacacaaaagaactggaacccaaggagcaacacatgacctgcggcgatgttgtccttgtggaataagctcactttacatcacttcagcgtggttttcttcgttctttggttcgttgacccgaaatgtttctattgtacatagttttagcacaatattcactaagtaattctctattacgttgcatcacgtttcgcacttagtttgttttttaagtacttctgaaataggaatacgcaaacattcttaaagaaacattcaggatagcttaagttcaaagtaaccggatacctcttgccagtgtcttaagcctttaaaaggccttaattgcaaaataaacacattgaaatcg

SEQ ID NO: 1956 - protein, 781 aa, DROSOPHILA
MTSYRPEFSASEQSQIDAEFSRLASNKSVYLDHAGTTLYAESQVTAAAEQLQRNVICNPHTCRLTGDFVDQVRFKILEFFNTTAEDYHVIFTANATAALSLVAENFDFGSSGEFHFCQENHTSVLGMRERVRENGIYMLRENEISGGKHKANGKVHEVSGKTGNSLLTFSAQCNFSGYKIPLEVIEQIQIDGLAKPGKELWSSLGEKKKNMHNDYYICLDAASFVATSPLDLQKYRPDYVCLSFYKIFGYPTGVGALLVSRRGAEVFQKRRFFGGGTINYAYPHAMDYQLRETFHQRYEDGTLPFLSIVGLLEGFRTLERLVPRTDEFSTMERISRHVFGLAKYLEDQLRQLHHPNGEPLVKLYNKVGYQDKSRQGGIVAFNVRTESGSFVGFGEIACVAALHGILLRTGCFCNIGACQYYLGLDEDALDAIYKRAGRICGDYFDLIDGQPTGAVRVSFGYMTTIQDVDKLLQMLRSSYLATKPLQRIQFIEEQAEQLPPLLKERVQLLRPKLLQMAIYPVKSCAAFKIELPGSWPLTDQGLKYDREWMIVDMNGMALTQKRCTELCLIRPVIKVDQLELQFGENSTISVPLSLDDQAADTAKCVSKVCRQPVEGLDCGDRVAQWLSENLGMEGLRLLRQSGQRNSSKDQQKLSLVNQAQFLLLNKSSVRSLQFEEPLDETVDRFRANIIIDTGSAFEELTYKALSIGGIQFQVEGPCQRCDMICINQRTGERSPETLTTISRLQKGRMRFGIYITRIPQDTKELEPKEQHMTCGDVVLVE

SEQ ID NO: 1957 - DNA, 7587 bp, DROSOPHILA
actggctcctcgtcatgaggttctacgcgcttattaaggtccagatccgaaataccgggctgagatctttcgaagcctccacaggtgacacaggaagacgatgagagcagcattgaggaatgcggggatgtggtggacaagggtgcactgctgctctgcgttttcttgactcccggctgcgcggcccgcgcacttggcttcggagcataggtcatggtggtctgctgcgatttgtcctggatagccacatccggtcgctgctggcactggttgctgatttccggcatctttggattgctgcgcaccaggtaatcggaaacacgcaccttccagttctcctggctgcagtcggtgttctgcattatgtcgtagatctcctcgagcagcggcttaagcatcggcctgttgcagaagttgttgtggtcgaacatttgatggggctcgtgaatatctgaaaaattcgatatattattttttactttattaatctctgtatcgctacttacagttgggaaaaataaagtttatctcacgagccacgctgtaactgttcttggtgacatggatattgcgttccagatccgatgccgaaccacttaaagtcaaattgtacctagagaacttattattttattttaaaagcaaactcacaaataacaaatcatgatgttgagcagctcctgcacggcgttttccttcgtaactatgaacgcctcggaaacacccttcgaaagcagaatgacctccagcataaaccccttttcatcggcataatcggcatagaactcggcggcagtttctggcgaaaaggcaatccgtcgattaccctgaatctggaagccctcggccagcaactttaagagcaccggacgccgcttgtgcagatagtccggcttaatgataaacagggagttctcaaacatgtcggctagaaaatatatactattccaaggggaattgggaattttcaataatgtgctactatgtcggtttaagttttctgtatgatttataagatcaatgttcgtattttacacagttttgcttgatatcttaaactacacacactgctcaaatgacttcggacacatggggatatcgatacaaagtttgcggctcgtgaatttcgctaatttttatgttgaaattacgataagggtactgcttagtgtaagtgttagtttagttaagtttaacttttttcagccggcgtttgagtgcgtttataaattcagtttcatcacaaattcacctaacaaatttagagccaaaaaccggggtacaaaacgaaaagtaagtaattatgtttcatttacagtaaatcgttatagaatgtaaacagatatatgtaaaggtatatgcatatataaagcgtgggatcgggtcccttctccttcaaatcctccgcgcctggttcgtacatcacaacgcatcacttaggctgttgaagatagtaaattagtaaatgtattgtttgggtccttcaacctatagcttacctgaaattctagcaaaggccagcgaagacttctcgctttcgaaacacttgccaatctcggcgcaaatatgcgactgatcaatatagggtcgtttggccaagttcttaatgctactgccatagatggagatcatctcagagcactgcaacgcaaaggaacttatagatatttataacattcaggattgtaagttacatacgatcttgtagtacttggctggcaagttctcgcatcccaccgatgtcatctgtagggctgtcacttcggatacgttatctttcttctcgcgcaggaagggcaacagagcctgggtgactccatggcacacaccacactccaaaacttcatcggtgacggccacgctgaagcagagctgcagtttctggcacacctgcttgggcggcacatcgctcagcaatttcaggaccgcagaggcatatccatcgacgaaggtgtcgcactgtttgcgcaccgtggctggcaggcgattgcacacggcttcaatcgctcgcttaatgtcgtcctgttcggtcttattctttagatcggcatccaacttggtcatgataaattcgcaaaggacgcaggtgggcggctccttgatgctgctagacagcttgttgtcctggcgcggcagagcaatcacgtcgtacttcaaagcctcatccacttcgactgtattacgaaaatgaaattcattagtttaaacgtatacttaacgtagctctagaatttaatactcacgatcatccagatcagccaggatgcacattcccaactccgtgcagataagcttgggatccatttcctttaacagcagatcggcgatcttatcgccgtacttgtcgataaccttgtggcatttagtgttcattggcttcctcattcggtcgcaagactcctccaggatatgcttgatgctgtctctggtggggtgcttgcccatacgcttctccaaggtcttaaccaactcctcgcagatcaggcagttcggagcagcggtgaatcctgggtcgaaggccagctgagggggcagctcctcaagggactcaatgtcattgaagctgatttcctcactgctggatttgtcctcaccatcgacatcgtcctccagcgagatgcgcaagtcccagagagcgtaagtggtctttgggcagagcttcagttggacgcagatctcctgcggcttaaaatctgtgatcagcatgtcgatcagctcattggaataggtgttcacgaagtctacgcattcttcctttatctcgttgggcagatggctgcaaaggccattcagaacctttttgatattatccttggacttgttgtcgcggatcttcatctgggcctgctcaacggcaaagaggcacagagggcaagttgggggatcctgctcatcgctggctggctggggattgaacacttcgacatcttccttcttgggcagattcttcgggcacatctgcatgagggggcacacgtcacgaggattcagtccttggacgagcagagctatcacagcatcgccatacatctccacgaagttgcggcattgaccggcaactcccgagggcagtttggcgcagatgttctccacggtgtgcttgatctcgtcatccgtggagggggtagccagagtctcctgaatgaaatgcagcatgtactcacacagggtgcacagctctccaccctcgaccaaagctccgggattagctgcacccattaggtgatcaatgggcagctgcatgtccaggatctcttgctggctgaacttcggctcactggcgcccagttgcttcttctcgtgcttctccagcttctcgatggtgatctttacctgagccggctcaataacaggcagcagcggcatgattgggacatccttcatcgaggaggcggagttcttctggcaaatgccgatcatgcagcaggctccattggcatctaacttgctgaccagagtctcgtaaatcacatggtagtattggtcaacaatgctaaggcactcgtccttgaatccctttgactgcttgcagaatccttccataacttgcttgaactccgtttcagtggtgttggccaccaagacgtcgcgaaggtgctttactagttgctcgcatagttcgcatggaatatcatcgccggcatccaaggcaactaaggcttcttgcggttgcttttcctcttcatgctggtgatatctggaggcacacactccggacacatggcacacggcatccgtggtcaagtgcttgctcacatggtcgtagatatcattaaaataggtgagcacaatgttggcacaggcgtctgagaaactagatagcgatccgcacatatgaagcatcgtttccaccatgtcatcgcgatcggtagccgcaaatttcgagtgcatcaggcgggaaagcaggttgcagttgccgcaggaaagttggttaggctgcatggccaactcggtctcctcggagctgtcatcttcattctggacggttccatcaagaccagcctgaatgccgttcttatacaattcgtcgatgcgagcactgttgcaaagtccggccacagagcaaacttgctgaggattgaagggaaacattttatatatcaataaaaggtttaggaggatgtgttgtagaggtgaaaactcacatctggattcatctgcgaggccagggcctcgaccaactcgggcaggaagtcatcggccaccttgatgcactccttctggatcggcttgatcggaatcagcttgcaggagccctcgaagacctccttcagctcctcctctgtctggttgctcttcagctggtcgcgggcctgagtaaccatgtccttgcatatcgtgcagatggagtccgtgtccaccggcaccttttgggtttcccaaacggtttggatgcagtggcgggtggcacgacattccttggagttgctggaaaggaagcagacataaagttagcaaactttttttttgctgttaagataaacccatcagagtaagcagtcggatactaagctgattgtgcgaaatgccgctgttcggatcaaatgacccgcattcgtaatcgagtggccaagccagaatcgacgagtcagcaaagaccagagtccactaaaaagggagtagtcccctatccactttaagaatgcacccacagctcacatgataatgttgggtcttcaatgaatacaacgaagcattggactggtaataattttgatttttgaacatccgagacggaacgaaatggtttaataatcatcaaacttatgctgactaaatcaaagcccatatcatctcatataagcaaatagcatttaaagcacaacactttgatggaaagtaaccctatatttgttcaatataaatcgatttgactgattcgaacggaaagtgctaatttccattaacatgaagagacgcctgcggtggaatcgccaggaataccaaacaaaagcgtctaaatagcaaaaaatcagcactgataagcacggaaataaacagtacatatgtatgaatgatatatctggacgtatccacgtatatattattcacttggctgcgcattcacagatattgttttctgaattttcaacagcaatggcgacgtttttaatttttgacactctgcaattgagaaacaaagaaacggttaagagccagaaatggcggattttcctggccatttaaaaataaatcaatcaataaacaaaggaattacgactagcgataagcgatggatgggtgcttaacaaatgttttcagttgcctattgatcgcttttactctattaatgatgcagtccatgtaaatgttttcaagtttatcttggtgtaacatacatacatatgtacgtacagtatagcttctgtaaggtgatcctttgtggccgcaatgtaatatcactccattgaggaatttacaattgtgagtatggctaagataagggtttcaagtgcattgtgattgtgttaaggcttagaagttgcactttcggatgttcccctgtactcatcatacgcctgagggattagtcagaattcgttgataaggaacaactgttgccgcctacagcgaattaacaatgataaacaaagcaatcatgtggtttgtttggcggtgcacagaaaagggagctgtgtcaaaacgatctgctcctctggattactcatgcatataatcggtgtcgataaagttgtgccccctacgagcgcttaactctgccgtctaaatgttccgactggcggtactgttaatttgatttgtacagcgaatgtgcagacaaaggaaatccagaaatatgggatatgaaggcagagagtattgcgaaaagtgcactcagagaaaacatcgagtctgtaaaacaatacaacgcaaaataaggggacgcaattagagcggcactagtgttaagtttgcaataacaggggttatcggcgaatagagctatgtagagcaaagtgattcgattcccgattcgagtgatagtcttatcggccgagaacaaaacagaacagacgagtcttcgctgcaaacaatgggcaagtgaggcggagaagtaatatcgctatttggaggggggttaagagaggttagcttttcgccttcgagaactttgtggtgttcgatgaccaagcgatttatccgaatataccgtttattgtatcacccacttttttgcactcacctgaaatttccgcaccagtaggagggtccccaggtgcacttgctggagcccaaaaggggcgtggcagcggcgaagacgcctgcaagaaagcaaacaaacaaagagagcaacggttgaggaacagagtgcacagcacgaatacgcaataagctatgactaaactattattgtggttccctttcaacgtcgcttttcgcacttctctccatctcttctccactcaccaaaggcgcagcacagtgccaaaacggccaagaggcctgctctctccattttcccggttttaactgtacttcttaaatgtcggcggagatagtcctctatttgcagctacgtatttatttctgaacgaaaactgaagtgcaattgcaacgattggttcaattttttatttgtctgtagtgtggccgccgtctgtttcgtcaaatatataccgtagcgatataatagtgcgaccagtcagcgattgaattattgttaaatttatttaacgatacttatggagcaagacttggataatgcttttagcataaaaccaacccagtgtatacttagcaatcaggggggagcatggactcgaaccgcactctgttaataacagagatctgtttttgcctttcaaaaagccataaaaacctccgaggaagctatcataaaatggggtcagcaaatcattaaacttaaaatggtataataaacaattaagtaaccgatatgaaactattagatttgggccacctttctatagggtgttaagtacatggagtacttgaatacgttgtccttcaaattataacttcaattatcgtagaagaaaattattgctcctaaagtcggaacaatttattaaatcactcactcaatcaacaaacaaagccttcgccacccgcaaatgcctcacaatgtatttataatcgattgcaatccgcagatttaattacatattgccgcgacgaaactatgacaataaccatcagcgatgttcttgaacttagcgcggttattaatacgcccctttttgcccagccccatcgcttaacccccctttggccaacttggccaactgtgcgacgtgaactggcaggcacatgattaaattctattgtaattgcgggttaattgatgtgagcctgcccagatgtaaagctcgcaggcataaatgttggggaaaatgcatctcactcgtaatggccggctagtagatttttctcgcgatgcctatcggcgtgtaattctcgattccgaggtgcgtatcaagatctgtgtgagaatcgtctgaagatacattcgcaaagaatgccagacacattctcacagcgattgaaagtcgaggtcatctggtggtgtttgcccaacgaaatgccaaatgcaagcgccgatccggccaatacggccataacatg

SEQ ID NO: 1958 - DNA, 3428 bp, DROSOPHILA
actacagacaaataaaaaattgaaccaatcgttgcaattgcacttcagttttcgttcagaaataaatacgtagctgcaaatagaggactatctccgccgacatttaagaagtacagttaaaaccgggaaaatggagagagcaggcctcttggccgttttggcactgtgctgcgcctttggcgtcttcgccgctgccacgccccttttgggctccagcaagtgcacctggggaccctcctactggtgcggaaatttcagcaactccaaggaatgtcgtgccacccgccactgcatccaaaccgtttgggaaacccaaaaggtgccggtggacacggactccatctgcacgatatgcaaggacatggttactcaggcccgcgaccagctgaagagcaaccagacagaggaggagctgaaggaggtcttcgagggctcctgcaagctgattccgatcaagccgatccagaaggagtgcatcaaggtggccgatgacttcctgcccgagttggtcgaggccctggcctcgcagatgaatccagatcaagtttgctctgtggccggactttgcaacagtgctcgcatcgacgaattgtataagaacggcattcaggctggtcttgatggaaccgtccagaatgaagatgacagctccgaggagaccgagttggccatgcagcctaaccaactttcctgcggcaactgcaacctgctttcccgcctgatgcactcgaaatttgcggctaccgatcgcgatgacatggtggaaacgatgcttcatatgtgcggatcgctatctagtttctcagacgcctgtgccaacattgtgctcacctattttaatgatatctacgaccatgtgagcaagcacttgaccacggatgccgtgtgccatgtgtccggagtgtgtgcctccagatatcaccagcatgaagaggaaaagcaaccgcaagaagccttagttgccttggatgccggcgatgatattccatgcgaactatgcgagcaactagtaaagcaccttcgcgacgtcttggtggccaacaccactgaaacggagttcaagcaagttatggaaggattctgcaagcagtcaaagggattcaaggacgagtgccttagcattgttgaccaatactaccatgtgatttacgagactctggtcagcaagttagatgccaatggagcctgctgcatgatcggcatttgccagaagaactccgcctcctcgatgaaggatgtcccaatcatgccgctgctgcctgttattgagccggctcaggtaaagatcaccatcgagaagctggagaagcacgagaagaagcaactgggcgccagtgagccgaagttcagccagcaagagatcctggacatgcagctgcccattgatcacctaatgggtgcagctaatcccggagctttggtcgagggtggagagctgtgcaccctgtgtgagtacatgctgcatttcattcaggagactctggctaccccctccacggatgacgagatcaagcacaccgtggagaacatctgcgccaaactgccctcgggagttgccggtcaatgccgcaacttcgtggagatgtatggcgatgctgtgatagctctgctcgtccaaggactgaatcctcgtgacgtgtgccccctcatgcagatgtgcccgaagaatctgcccaagaaggaagatgtcgaagtgttcaatccccagccagccagcgatgagcaggatcccccaacttgccctctgtgcctctttgccgttgagcaggcccagatgaagatccgcgacaacaagtccaaggataatatcaaaaaggttctgaatggcctttgcagccatctgcccaacgagataaaggaagaatgcgtagacttcgtgaacacctattccaatgagctgatcgacatgctgatcacagattttaagccgcaggagatctgcgtccaactgaagctctgcccaaagaccacttacgctctctgggacttgcgcatctcgctggaggacgatgtcgatggtgaggacaaatccagcagtgaggaaatcagcttcaatgacattgagtcccttgaggagctgccccctcagctggccttcgacccaggattcaccgctgctccgaactgcctgatctgcgaggagttggttaagaccttggagaagcgtatgggcaagcaccccaccagagacagcatcaagcatatcctggaggagtcttgcgaccgaatgaggaagccaatgaacactaaatgccacaaggttatcgacaagtacggcgataagatcgccgatctgctgttaaaggaaatggatcccaagcttatctgcacggagttgggaatgtgcatcctggctgatctggatgatctcgaagtggatgaggctttgaagtacgacgtgattgctctgccgcgccaggacaacaagctgtctagcagcatcaaggagccgcccacctgcgtcctttgcgaatttatcatgaccaagttggatgccgatctaaagaataagaccgaacaggacgacattaagcgagcgattgaagccgtgtgcaatcgcctgccagccacggtgcgcaaacagtgcgacaccttcgtcgatggatatgcctctgcggtcctgaaattgctgagcgatgtgccgcccaagcaggtgtgccagaaactgcagctctgcttcagcgtggccgtcaccgatgaagttttggagtgtggtgtgtgccatggagtcacccaggctctgttgcccttcctgcgcgagaagaaagataacgtatccgaagtgacagccctacagatgacatcggtgggatgcgagaacttgccagccaagtactacaagatctgctctgagatgatctccatctatggcagtagcattaagaacttggccaaacgaccctatattgatcagtcgcatatttgcgccgagattggcaagtgtttcgaaagcgagaagtcttcgctggcctttgctagaatttcagcctaagtgatgcgttgtgatgtacgaaccaggcgcggaggatttgaaggagaagggacccgatcccacgctttatatatgcatatacctttacatatatctgtttacattctataacgatttactgtaaatgaaacataattacttacttttcgttttgtaccccggtttttggctctaaatttgttaggtgaatttgtgatgaaactgaatttataaacgcactcaaacgccggctgaaaaaagttaaacttaactaaactaacacttacactaagcagtacccttatcgtaatttcaacataaaaattagcgaaattcacgagccgcaaactttgtatcgatatccccatgtgtccgaagtcatttgagcagtgtgtgtagtttaagatatcaagcaaaactgtgtaaaatacgaacattgatcttataaatcatacag

SEQ ID NO: 1959 - protein, 953 aa, DROSOPHILA
MERAGLLAVLALCCAFGVFAAATPLLGSSKCTWGPSYWCGNFSNSKECRATRHCIQTVWETQKVPVDTDSICTICKDMVTQARDQLKSNQTEEELKEVFEGSCKLIPIKPIQKECIKVADDFLPELVEALASQMNPDQVCSVAGLCNSARIDELYKNGIQAGLDGTVQNEDDSSEETELAMQPNQLSCGNCNLLSRLMHSKFAATDRDDMVETMLHMCGSLSSFSDACANIVLTYFNDIYDHVSKHLTTDAVCHVSGVCASRYHQHEEEKQPQEALVALDAGDDIPCELCEQLVKHLRDVLVANTTETEFKQVMEGFCKQSKGFKDECLSIVDQYYHVIYETLVSKLDANGACCMIGICQKNSASSMKDVPIMPLLPVIEPAQVKITIEKLEKHEKKQLGASEPKFSQQEILDMQLPIDHLMGAANPGALVEGGELCTLCEYMLHFIQETLATPSTDDEIKHTVENICAKLPSGVAGQCRNFVEMYGDAVIALLVQGLNPRDVCPLMQMCPKNLPKKEDVEVFNPQPASDEQDPPTCPLCLFAVEQAQMKIRDNKSKDNIKKVLNGLCSHLPNEIKEECVDFVNTYSNELIDMLITDFKPQEICVQLKLCPKTTYALWDLRISLEDDVDGEDKSSSEEISFNDIESLEELPPQLAFDPGFTAAPNCLICEELVKTLEKRMGKHPTRDSIKHILEESCDRMRKPMNTKCHKVIDKYGDKIADLLLKEMDPKLICTELGMCILADLDDLEVDEALKYDVIALPRQDNKLSSSIKEPPTCVLCEFIMTKLDADLKNKTEQDDIKRAIEAVCNRLPATVRKQCDTFVDGYASAVLKLLSDVPPKQVCQKLQLCFSVAVTDEVLECGVCHGVTQALLPFLREKKDNVSEVTALQMTSVGCENLPAKYYKICSEMISIYGSSIKNLAKRPYIDQSHICAEIGKCFESEKSSLAFARISA

SEQ ID NO: 1960 - DNA, 15405 bp, DROSOPHILA
tccacagctggcagacagatttcaatttgccagtctatatcggctctaatgccagacgctcattcaatttgtattactcactgcctatatggacttgagctttgttatcatttttatgggcttaatcgatgggatccgataatatgttcattgtgggcggacttaatcagggctttaatcagaacttaaatgagaatcgatatgcaaatggattaataaatagtatttatgttaaatgaatttgtcactttttgattaaaacaccatttacctcgtaagcgttgattctgcttttttttattattcaaacataaccacaacataattaagttattaagtgcatgcaatcacgtattttatttcagtgccataaaaaaatattaatttaatcgccactcatttattatcgtacaagcgtctgctgcacggccaactattgttttaagccaatcataataaccgttgaataaacgtaaacatttcattcgtctgccatttttcctttcccacattccacttgccactgaccagtcgaatggcctgggccttaaagagttgctaattagattaagtgaagtgtcgaatttagtacgtattcactttgtgtgcgcttaacctactaccaagtgcactccaacggaagcagccaggcagcagcaacaactgcaacaatatgactaccgactacagcatacaaatgttttcaattacaggcatgcagcactgcgaaacggaggggaataaactggcacaacaactttaaaagtacaagcgaccgggggaagcaggcgtccatggagtgcatagaccaggaacaatggtaaatgccacgtcagcgacatcagcagcagcagcaacaacagcaacagtagcggcaacatcatcagcaaaagcaaaagcagcaaaaacgagtcaacgacagcttaaaacataatacgccagctgaaggcaacaagcggatagaaagacagccgaccaacagaacgacagacagacagacatccaggggacaaagatataggggcgatatagggtggtatatgggcagaataaagcggcattgcgagtgatgagaaatcgctgttgcaattagtaagccaaagggctgggcgagccatgaatcacgagctgtgctgccagcggaaacggaaatgctcgctgcaaacggaagcgaaaacggaagccgaggagcagcaggtggccactaaatgccattgaacactgagcgatcatgtccgacgttgagcaggcgattaaggccaagcaaccgcagccgtctcagttggactgctccattgacgatgagacggatgccaccgaattcggaggcctgggcggagtgggtggtgcgggttgtggatcggagatgggtgccaagaccaccgcttcgctgaccgccaagccgcgcagcagtctccggcgctgctgcggtcacttgctcaagctgctcttctccacgcccggcctggtgctcctggtcatcggctactccgtgctgggcgggctcctcttcccgctgctggaggcgccgcaggacatcagcaagtcggctgccattgccaagagccgggaggactgcttgcgcgaactctggatcattacaggtgagcttatgtttctcaaaataaataatattatcaagctgatccttaataactatgcaatttgatcgtgtattcaaaagcaatcaattctacccctgatcttataagaaaatcaatatcttgtcctgatatttctataaaagtatttctttcggtatttattattgtattacatatttcgcacatttcttaaatatagcgattacatttaatttattgagtgtgccaaagtggcctacttatttactaaaatctttaaataaatttcgatgacgtccttgtaagagaaatcaatataaatataataatatggtatctctcctttgatccttatactgatcaatttatttgcgtaaatatgcagcaaatttttgtacgcttcgctggcgatgaacaaaaattcgcataaattataatggccaccacatttttgccgcattggccgtaaattttcggcgtgttttgcacgcttgatttgcctgcaaattgccaaagtaattcgcacattaaagcgacaatgttttgttatcgcccattaatactaagtaaatagtagcgattgtgagcgcaggtccagaacaaatattttaattataggtaccagcaaacatgagtcctccacaaacacccaccccaccccactcgaaagcaaacaaaagaccgtccaaatgcattttcgcagctaccgaattgaataatagctaaatatttgcataaccaaatatttggtcaggcgggccatttaattcgcttccgcaacggagtgatattgcatcgattccacgaatttatcgcaactattttgaggtttatttgctggcctgatttatgtgaaattaattactttgtcgcacctgccagtggcactggatgaaaaaaaaaaatccaacggcacagcggcacgtgcatgagcattagatccgatgttatttaattaaaatttcacctaataaataaaccaattaacttgagctcatccgcggcacaggcgtcccacctggcgtatgattaatttgacgagtcctttaacggaggcctaatgatgtgctaagttcatcttggctcgcaatataggtcatttattatgtgcttcaacgaaagctgagatttttaatggtacatgtggtcttgaagatggaaacattcccatatgttatccttttgctttgtttaaataataactttagtcatcactcgtttatttcatatgaaatctatgaaaactacattaaaactgttctaattcatttctaattaccaaaataaccagacccaagtatcttattaacagaaataacataagatggctcaggagagccatgtataaatacattagtaagttttctctataccatagtagttcatggagctgaaatacaaatttcaatattcaagattactgaagccaatgtctaattttactagaactaatgaaatataaagttttaagacagcaaaccaatcatttaagaaacaagtctgaaatacctctttaaaagtttcctattgtttctaaattgttattcattgccaattagtttcttatgaactccaaagccctgccctcaaatcactcgattaagctgcaaagattggcacagaaaatcttttgatttcggttttgttctcggcaactagcttcagtcgattggggcgggtggcctttaggtggatgatgtctggggaggtgcaccatcgaggcttcaagactcgagagacttgtgcccacaattcgcccacctcctgccatctttcacccactcccacccactgccacccactaccccaaggccagagggcgtaaaaggggcgtgaacgacaagcacgacggcaaacttgtctcgaactgctgttaacaagcgacctctgcaatttgcaagaggcgaacacactacatcgaatgggagcagattcctcaagacaggcgaacgaaatcgaagggcaggaggattggtaggattgggaacttggagactgagttctgggcaacgtgaacgaaggatagtccgatttgtcggcacttgtcgattgggtcgatgggaggtcgaaggctgttgctgcacttggcatgaaattgcataattacgaaaaggacacttgaacgcattctggaggagacccgacttaaccatttttccacctcccacctttccttgcagagaaactcaacgttctgtacgaacgcaactggacgatgttggtccacgagcagctgcgtcgcttcgagggctccattgtggcggccacgcgccaaggatctgctggctcctccggcggaggaggagcaggactcttccacgagggcagtgcgagtgccctgggccactttggctacgatgccggcgactcgcagagctggtcattcagcgaagctctgctctactcggtcactgtgataacgacaattggtgagttccgttcctgtttccgtttccgcactttcactttcgcttccactgctccaaaatacccaagccgtttggatttatgtttcgtgtttatcttggaacttggcgagcacggctgcttattattattttcgaccaggccacaactcgtgctgtggcccacaaatatttactttgcagggggcaaatagacctcgacatagccaacgccttggatggcaaactaagccacaagagcagccattgcagagcacggacatcagacatggcgtatacgacccggaggccgggctaaatatttgcatatgctaaatgatgggacatccttgttgctacaaattaactgtatctcatgggctttaactttaacagcctgccagttatccagtaagacagtccattggtagggatacatatatgagccagaagaatgccgctaaacggatttattgtcgacattgtttaggtcaaacacatctgggttagagtgataaatatttgctgtctaatgagtgcttgtgcattggcatactttaattaagtgcaaagatgcacattaaacgtacacagctgagcaataattagttcaatatgatagaaaattattattgctaagaggtgcttcttatattacctactcagtccttgtgggttattgctgtataaactatgtacgtatttgcaatgtgattttataagtagacacagataactagacagcttaagttgtgacccattaaacacaaacttcctgcactttctactcgtggaaagtaattccatatgctgcagcgccatttcaccacagattaagtttccagaaggacccgcacccatttctccacttgtcctcacccatccgattaaaagtgcatgcatttatattagcctgttcgtgcttgccatgcttaagttctaaaccagatatatcattccgatccttgcaggtcacggcagcctgacgccgcgcaccgccgccgggaagctggcgaccatcttctacgccctggtgggcgtgcccctcatgctgatgtgcctgtccagcttgggagccctgctcgccgatggcctgcagtgcacctacgtgcgactgtgctgccagctgcagaggcaccaggagcacagaagaaagtccacaccaggcacatcgacgccatctgccagcagtgcggccaactcgagggaaaaggacacggacaagaggtccaagcggcgaatggtaaggccaccacggcgcatgattgatattattttagtgagggcaccagatgcagttcatcagagagtgcaacgcaatagccgctagctatttgtaatggcgctgactagaagacattaataccaaattcaacgttctgggtccatgttaaagaaaaaaagctccgatttatatcgggttcctttaaacacatatacttaagggtacgaaataaccgtcagattgatttcccaaaggcttccttccattccccacacttcacatttctgccagcagccgtggcgtatgattgatattgtttaccctagaacagcagctgcatccacagtcactccatcgactgactgcaagtcgagaacatttttatggatcttaattcgatggttgaagggacaacttactcactttattctaccagcagcaactgttgctgccgagtaacccaaaaggaaaaggagtccaaagtgtattgctgtgcattccgatttaaagtaaactttcgacattgttctgcgtgtccaaagttcccatggaaaagtttcgctggctactccgctgttttacgcatgaacttttcccactactcactaagtgtttcgctcgtagtttttcccaccccatcacgaaagtttttccccggcaactaagacagtttcgtttttggccagcggaaaacctgaatccctggtcgcttatgtatggaaatggaaggctggcaagtcaggatgtgatgggaatcttcgattgtccggcgatttgctttcctcaatggaattcaacccatttttcgcagatcagactgcactggggtctcaaattacggcttttaattacgacagcagaagccttttaagtggatctccaagccggtccggatttctattaacgcaaactgaaagtttgtaattgatttgggcaaaacaacaaagaactttcccgtttgcctttttgtttttcgttatacattctaggttttcccactgcagacggttttgggtttggtttcacgtttttcctggtttattgcgtttttatttgctcagcaaacggagccacggttgtatacattataaataattttttaggatatcaaaactctgactaggttgcgcagtcctttttttttgcgccaactgtatttgtttgtttgcgtgtcctgtgcattcgtgcataagttttgtaagtgatttgctggcctttcgtaatgacatttctgctttcggaagtcccagttacggattttccatgtacggctcactctttttcccattccgggctaaatattcaactttaaagctttaaggcacaaaaactgattcgctctgtttgcattcacagcctttttcaattgtggccactcatttgtccgcgccgttgtttgttttgcttgcacaaatttttgtttaattggcaatttatggctgagcgggaaaaacgaaagcgaatggcagggttcaataaataaataagtgattttgcggtggccacgccaacttcgatggcctgtttgtcatctggcggagcggcaaacaaacaaaaaatgtatttcataaattaacatttacttgcggacgcgcacccaactcgacacttttaatgaactcgccgccaaagtttgcccgtcaagctcgaaagttgaatctttaagcaagaaacaagaaccccctttcgacactttaaacttggtcgcaaactttagtttgcagtttgagccgggtcaaatggcggcggcataaatttaatttttcccggccaagtggccgggtttcgtgccaggtaaattgaaatgagtgcgagccactttaatgcggctggggaaaaagtttacccgccactcaacaattacactggaggcatgcaataacttctcatttccgccacttttggccctaattgatttgatttggccgggagctccagctccagtttaagctgcagtccccagctgcagctgcagctccagcaccagctccagctaacgtggcaggtgccacgccattgaagctgtaggatttcggtgctagaaattgaaaactttccgcatcctccatgttcgagtggtaatctacttgccgtgtttccagccactcaggcatggcattcctttcacgattgctagtttcccaggccagcgacttgttgaacaggatttttgcatttgccaatatggagacggcttgttttccgtctccatgttgcgttcaacaactcattagggcacaatccaatctggcaggacgtcacgaggccggccaagtggacttttgggctttggggcagcacaaggatgcgtctggcaattgataagactgccagcagattgcggttggctctggggatgtgcagtcatcggttgaattattatcgccatcgtgttgactgctgccatttcggcttttggtcttttgctcttttggcctttgccatcgttcttgcaattatcatgacgcatgctgccgtaacggtttttcggtatgggcttgatcccaattcgggggatggaaatgggttttccgggcccaaaccgcaagactagcagggagacatttcacatatttccctcatttccatcggttgtttgcgtgtgtgtccattagattcgcctggcatttgatgatgatgccgcagaaccgcaaagcacacgagatgctaggcgtttggccgcaaacagcttttgaggacaagggaccacggagatgatgacatcagtttccggcttaagaaaggcatgtccttgcgcctgtagataacgtgccttattggcattgcctccatcatgtcaaatagccgcagtgtggacacaggacatccccggaaccagggagataattattcggcattatcttttaagtgcacagtgagcaattgatcgatttcaaatggaatacaattgtttcatgtagccttaggtaaaaaaaaaaaacactagtgatttaagtcaattttaccaaagatgtttaaaatgattccactaaattgaactctcaagttgaactttattgttggtctcagtcctctggacattcagattggatatcgattggaattgcaaattaatttcaagtaaatgtcttcttttccatccgcaggccaattgcaagggctgccagtacgatgcggctaacagtgagacgagcttaaatgactgcttggagtatggccaaaagggaaagctgccgccagacaaaaaggaaggaggtgagtgtcggccgcattgttcggatgctaattgtattgtcagcacaattgcaagtcgttaatcatcttgaacacgtctgtttctccttttgttccgtgcggtcagcagatgcctgtcaattgttgcgcaacttgaatccgcagcagcacttctaccagcagcagcagcagcagccgcagcagccggatgtcatgctaatgacaacgacatcgggcagtgcgctgctgaaatacgcaccgcaacagcaacaactgcagcagcagcagcaattatcgacagcaacactcccgcgacaacatcatcagatgcagctgcagcagcagcagcagcaactgcaacagaacttcgtggctgtgcccagcagcatgctgcgaatgccgctcacagtgccgccaaattgttatgcgcccgcgacagcaacgatctactttccgttcggccacgccccctccgccccgggcagtcccgcccacaaccaagcccacccaacccagaatccgaatggcaatgcactgggaaacactaccctcggttcccagccgctggtcaagtaccacacgatacacttgcaacccgcatccgggaagcatcgagtgttggcttctggacttcaggatgcaacagccgtgaatctcgtgacagcatccgaggcatccacttccaccctggaggccatcactttgccaccgcctccggcctaccaaacagccagcgtgcacggtaagtgatgaatcgcattgtttattgcccttcggtaggaaattgaactatgaaaatgtcgaaaattcaactactatactcagctattatttcgaatttttcaattagttttcgaaaaagtaattaaagaaacaaagattaaaacaatttgtaggccaaatcaatttacaactaactgtattgtagccagcaataatttgctttacatatgccacatttttgaaattaaatgtgctagtgttttaaggtgaattctaaaataattgaagtaatttaccagatatttgtgaattgttaataagtgctaatgctggtgcggtgggaaatttgcataaatcgaacaaaggaaaatggaatataattggatgaacaatttgcaccagccctaatggcaggcgaaaaccgaaaatgttctgctgacagatttggcttaacctgagccccgaaacaaaaccgaacgaacagtaatcaatcaatcatacgccctgctgtcgcaggacgaagcccccctcggatgtcccccttcaacgccacagtgctcatttacgctttcaattatataacaattttcatcatcatcatcatcatcagcagcttgcagcagcgtgttaaaatgacagagtaaagcagacacacacttcgctggcattaaaagttttcaacttgtgctgctcgacatgccaggacatcaacagcaacagcaacaaggacgtaaggataaggacaacatgcacttgaggcaactttcgacatgtgcgacagttttattgacgataatgatgagttggcataaagatgacagtcccgccggttgcgttgagctctcagcttgtgcaacgcatgcaaaactcattaaagttaacagctctttgtcattgaggcgacggcacgtgactcgttttgtcaaaggattccgcttaatttcgcagcaaaatctagcgtgagaaccggtcatttgtctccgaacggaagacatcgccatcgccatcgccatcgcccccgccattgattccccatgcatgttaattgtctgccagtggtactgggacacgacactggaataggggatcccactccccggagtccgagtccgcggccaaccgcaccattaaagcactgctaaagttgctgccacaccactgaccgcaggtccaaagtgactttcctgcgcgtccggatatatagtgctatatatatatacagtcctgcactctaatgaatgtctttctttgctactcgctctaaaagccagtacatgtgtgtgtggtgtccaagtttaagtaaatattttcaaattggccatgtccggagcagaagggttcactccgggctgcaccgcggacttctggtgtcctgctgacagcactaaactgaaagatggtagcttccttccccttttccaaagaaactttaatgtcagcacagtgggaacagtatcctgatatagttttatataaaaaaaatttataaaggaacttgcaggaacttaaatctaccaaattaataaatttagttcttttttacgtctccaaggaccaggaaagttattcactacttagtgtccgaaatatttgtatatagaaggaactactatcctatttcgattttaaagtttgacccattaaagcaaatagaaatgaatagcttaacccctaatagctgtaatgcccttatttcacaacgctgcaacaaagtgcgctgaataatttaccacagcggtgaatagtggagggaatgtagcgcccccgacctcggcaattgcccactgtgtggagcgccagatgttgcagtgccccctgacatcgcgatgactctgccactggcagccgctaatgaaagctaacgccaaacttttggtccacaagtcgggggcacgggcatggcaatgtgaatccggatccggatccgaatccgaatccgaagcgttccgccacattgttgcattgttgggcgaactttgaaaatgcaaagcaaataattttcacagtgtggcccagtgtttcccccactactcgagtgacgaggctaaatgcacaacttttccggcttttcccgctgctgccactgccacttccgggggaactaacgggctaacgggataatctaaccgtgtgtggcagttgccggaagttgttttgccaatttgtgcggcaactttttttatttttgggctgtgtgtgtgtgtttcgtttaattttgttattgaaatacaattttaccaaggtctgttttagttctcgtttaaccttttcaactgcgtattcgttgtataatgcatacattacgtattatgaatattaaattatttaaatattttttaacaattgcagctgtgcggcgggccaagttcgtggcgaagccattgccacaagagatcaacgcactgatggactgcggaacgggatcgccagacttatccggcagacatgatttattgccgccaccccattcggggtcaccagcaacaggcaccgccgcaagtcctttgttgacctacacagccgcagcaacaagcccacagctgtcagctggaattaaaggcggatcaggaccagcacccacggctggagcaccaatgcttgtcagcggagccggcagaggggcagccgctctgaccgataacggttttatggccgcaggtgtctgtggcatgggtgctgctgctgcaccccttccagtaacatcaatgggtgcagccactacaacagcctcctcggcagcatccacattgtcggctcttctaagcgccaactccacgggcaacgtggacatcatggaggacgaggatgagcaggaacgggagcgtttgaggtatgtagaatgcaaatggaaccagtatggtaaaagcgcatgaaaatcatattcaattgagctgaaagcgttttcaatcttttattttggataagcaaagtcgatcaagtcgtgtccgtccgtataaaagtgcagatgtctggaaccaaagaaataatgtgggtttagatcaggcccactgattcttctgatgatgcaaaaacaacagaaatataaattacttattgagttacattttaaaatttatataattcgactatagccaaatttctcaaatttagggttctttctgttttagtgcagtaaaagagctccaaaaaagattgattcgcattttcttctctgtgaaggaaagaatcccaaggggataactccaggtgcttaagttgcgtttgattaaagccttggcttgttgccatctaaaatcgaaaaccaaacgctgggggaaaactgttaatttaatttccaaaacaaacttccagcctgccagcaacactttaaatcaacacttcacaatctgcatgatgcacactgcgacccttccaagccacccaagccacccactttcccttgaacagccttgcgaattcgcgctcccccctgcggtggctgcctccccttttccggctgccattttctgccagagtgaagagtgctccgcttctgatgatggtttccttcgcctttttgagcgcacattttgagcattttatttaataaaaagcagtagcagcagcagcagcagcagcatctggtaattaattttgacagtgaacctgggcacgcgtcgcggggcgccctgtggcagatatatgtatgtagtatatatgtatatacatacactctttggtttcagtttcagccttgtctgtaattaattgtaagccgagccgagccgggcactcactcgcaatgaatcgggtcaattaatcgcagcatcccaagccaacagtgctcctgcctggttgctccttctatccttcttgctttgggtaaacgtgtacgtgatgttgtccttattgaccgatgccgaaatcggaagtagttctctggcacttcttcggccaatctcaatgctctgcaagtgcatctcgagcaagtgtttgcccagccaagagctcgccatcccgagaggcttttggccaagttcaataaatgttcgccaaattggtttgacagagtgaactcgaggcaaccggagtgccgtccaacgagaattccccgcagactgttgcaagttctcgagaccctcgttcgtggcaactcaaggggtatttggattgtcaatcaaatcagactcgatttgggacttgaaattttgacttgatgtgattgagactcagttttaaggctgtttgggcaacttttcacttaaagccaactaaagctctactagaagtgcatcagtataaatgaataatttcattggaaggacaaatgatggacttatattttggtctttcctactttcttaatttacacatttaaaaaacagaatagagaactgaagctctttccagccgtcggacgtcgttttttatagttggtcttctgaatataacaaagctgtctgaatgtaatgcatacgcctcatgttccaagccggtgtagcccacgtgaaccgacagttttatgctttattgattggaggtcagcccagctatttccttttttacgacctgaggttgctcgggggttagctttttatgcctaattgatatgttttatggtcagctgcaacataaatatttattgtccatccgtgtttcctatcatttcgcagcaactgtccgcacggaacgccgtcccgagtgccgctgatagcgagtcctttgagtgtgccgcaggactcgggcgagaataccacccgcaacaccgccttcaaccgccacacactgcagccgctgagccgcaagacgctgctgctgactcgccgttgccacagacacgcctctggaacgctgtacgacagtacggcgaacaacacggagacctccgacgacgaggagtacatgcaacacggcagcgagcagtttgtgctgaagaagttgcgctaccactgcgacggcaaggactgccgcgaggcggaggactccgaggaggaggacgagaaggcggacggtcggcaggtgcccatcagcctggtgctgctcatcctggccagctacatctgcgtgggcaccgtgatcttcgctctgtgggagaactggtcgctggtggacggagcgtacttctgttttgttaccctgtcgaccattggatacggtgattttgtgcccgcgcggagctttaacgggcctgagttgcagctatacgcctgctgcgcttacttgcttctgggactcgtcctggttgcgatgtccttcagcatcctggaaacgcagctcatgtggaagtgcaaacgcattgccgtgcgactgaagctggcccgcgcggatggataatgtgctcatcctaatcctcctctcccaaccatctgcaatcttcaatctgcaatccgaatgcttgaatcataggctaagtgaactgtgtaattaacccaaactagcccatctctgtgtacatttgtctgcctatcgaaatagtgagaactcgtatgttgtctggaattcaaatgaatttgtgtaaataaacggaatttttggaattttcgaatttctctgctttttggcattcggcaggtaatcggatacagaggccacaaacgtttctcgcataccaagtacttgtgaagaagttaagcagcttttcatctgagtataaatatctggttcttcatgtcaccttttgcatctgctgaattatgtgtaacctaatcacatttacatatattattgcccactccgtcataaaaaagcagaggaaaacggcatttgtatttatcttaattctggctgaaaacccaaatgtttcccccaataaacaataattcctgcgcttatccccgctgagtgttagccaaaaaaagcatcaggtttcatgcaaaacacacaagcacacctgaaacattgttgccaaaaaaaaaatacgtacacgttctgaaacttcgaacgttcatcatcttttcgagacacacgacgcatacaaagtgtgtttagagtggcgcataaatttcaaagtgccacgcgtcatcaaaatcaaatgccagccgcagctaccactccctccaacttggccaaggacctcaatttacatatatagaagccccaaaaaaagagcagtactggaagcggcaggccaagcggcaaaaagttgtggcccaaatcaattgatacgacatcaaattgaatttataattctttcgtttatccgccgacttgtgtatgtttgtatctcaattgcctttgatgctcctggcttgcgactttacgcacgttttcaccagaaagaacttaagccccggagggtcagtcatggttgcttcattctaaggacgcttcattg

SEQ ID NO: 1961 - DNA, 2988 bp, DROSOPHILA
atccaggggacaaagatataggggcgatatagggtggtatatgggcagaataaagcggcattgcgagtgatgagaaatcgctgttgcaattagtaagccaaagggctgggcgagccatgaatcacgagctgtgctgccagcggaaacggaaatgctcgctgcaaacggaagcgaaaacggaagccgaggagcagcaggtggccactaaatgccattgaacactgagcgatcatgtccgacgttgagcaggcgattaaggccaagcaaccgcagccgtctcagttggactgctccattgacgatgagacggatgccaccgaattcggaggcctgggcggagtgggtggtgcgggttgtggatcggagatgggtgccaagaccaccgcttcgctgaccgccaagccgcgcagcagtctccggcgctgctgcggtcacttgctcaagctgctcttctccacgcccggcctggtgctcctggtcatcggctactccgtgctgggcgggctcctcttcccgctgctggaggcgccgcaggacatcagcaagtcggctgccattgccaagagccgggaggactgcttgcgcgaactctggatcattacagagaaactcaacgttctgtacgaacgcaactggacgatgttggtccacgagcagctgcgtcgcttcgagggctccattgtggcggccacgcgccaaggatctgctggctcctccggcggaggaggagcaggactcttccacgagggcagtgcgagtgccctgggccactttggctacgatgccggcgactcgcagagctggtcattcagcgaagctctgctctactcggtcactgtgataacgacaattggtcacggcagcctgacgccgcgcaccgccgccgggaagctggcgaccatcttctacgccctggtgggcgtgcccctcatgctgatgtgcctgtccagcttgggagccctgctcgccgatggcctgcagtgcacctacgtgcgactgtgctgccagctgcagaggcaccaggagcacagaagaaagtccacaccaggcacatcgacgccatctgccagcagtgcggccaactcgagggaaaaggacacggacaagaggtccaagcggcgaatggccaattgcaagggctgccagtacgatgcggctaacagtgagacgagcttaaatgactgcttggagtatggccaaaagggaaagctgccgccagacaaaaaggaaggagatgcctgtcaattgttgcgcaacttgaatccgcagcagcacttctaccagcagcagcagcagcagccgcagcagccggatgtcatgctaatgacaacgacatcgggcagtgcgctgctgaaatacgcaccgcaacagcaacaactgcagcagcagcagcaattatcgacagcaacactcccgcgacaacatcatcagatgcagctgcagcagcagcagcagcaactgcaacagaacttcgtggctgtgcccagcagcatgctgcgaatgccgctcacagtgccgccaaattgttatgcgcccgcgacagcaacgatctactttccgttcggccacgccccctccgccccgggcagtcccgcccacaaccaagcccacccaacccagaatccgaatggcaatgcactgggaaacactaccctcggttcccagccgctggtcaagtaccacacgatacacttgcaacccgcatccgggaagcatcgagtgttggcttctggacttcaggatgcaacagccgtgaatctcgtgacagcatccgaggcatccacttccaccctggaggccatcactttgccaccgcctccggcctaccaaacagccagcgtgcacgctgtgcggcgggccaagttcgtggcgaagccattgccacaagagatcaacgcactgatggactgcggaacgggatcgccagacttatccggcagacatgatttattgccgccaccccattcggggtcaccagcaacaggcaccgccgcaagtcctttgttgacctacacagccgcagcaacaagcccacagctgtcagctggaattaaaggcggatcaggaccagcacccacggctggagcaccaatgcttgtcagcggagccggcagaggggcagccgctctgaccgataacggttttatggccgcaggtgtctgtggcatgggtgctgctgctgcaccccttccagtaacatcaatgggtgcagccactacaacagcctcctcggcagcatccacattgtcggctcttctaagcgccaactccacgggcaacgtggacatcatggaggacgaggatgagcaggaacgggagcgtttgagcaactgtccgcacggaacgccgtcccgagtgccgctgatagcgagtcctttgagtgtgccgcaggactcgggcgagaataccacccgcaacaccgccttcaaccgccacacactgcagccgctgagccgcaagacgctgctgctgactcgccgttgccacagacacgcctctggaacgctgtacgacagtacggcgaacaacacggagacctccgacgacgaggagtacatgcaacacggcagcgagcagtttgtgctgaagaagttgcgctaccactgcgacggcaaggactgccgcgaggcggaggactccgaggaggaggacgagaaggcggacggtcggcaggtgcccatcagcctggtgctgctcatcctggccagctacatctgcgtgggcaccgtgatcttcgctctgtgggagaactggtcgctggtggacggagcgtacttctgttttgttaccctgtcgaccattggatacggtgattttgtgcccgcgcggagctttaacgggcctgagttgcagctatacgcctgctgcgcttacttgcttctgggactcgtcctggttgcgatgtccttcagcatcctggaaacgcagctcatgtggaagtgcaaacgcattgccgtgcgactgaagctggcccgcgcggatggataa

SEQ ID NO: 1962 - protein, 918 aa, DROSOPHILA
MSDVEQAIKAKQPQPSQLDCSIDDETDATEFGGLGGVGGAGCGSEMGAKTTASLTAKPRSSLRRCCGHLLKLLFSTPGLVLLVIGYSVLGGLLFPLLEAPQDISKSAAIAKSREDCLRELWIITEKLNVLYERNWTMLVHEQLRRFEGSIVAATRQGSAGSSGGGGAGLFHEGSASALGHFGYDAGDSQSWSFSEALLYSVTVITTIGHGSLTPRTAAGKLATIFYALVGVPLMLMCLSSLGALLADGLQCTYVRLCCQLQRHQEHRRKSTPGTSTPSASSAANSREKDTDKRSKRRMANCKGCQYDAANSETSLNDCLEYGQKGKLPPDKKEGDACQLLRNLNPQQHFYQQQQQQPQQPDVMLMTTTSGSALLKYAPQQQQLQQQQQLSTATLPRQHHQMQLQQQQQQLQQNFVAVPSSMLRMPLTVPPNCYAPATATIYFPFGHAPSAPGSPAHNQAHPTQNPNGNALGNTTLGSQPLVKYHTIHLQPASGKHRVLASGLQDATAVNLVTASEASTSTLEAITLPPPPAYQTASVHAVRRAKFVAKPLPQEINALMDCGTGSPDLSGRHDLLPPPHSGSPATGTAASPLLTYTAAATSPQLSAGIKGGSGPAPTAGAPMLVSGAGRGAAALTDNGFMAAGVCGMGAAAAPLPVTSMGAATTTASSAASTLSALLSANSTGNVDIMEDEDEQERERLSNCPHGTPSRVPLIASPLSVPQDSGENTTRNTAFNRHTLQPLSRKTLLLTRRCHRHASGTLYDSTANNTETSDDEEYMQHGSEQFVLKKLRYHCDGKDCREAEDSEEEDEKADGRQVPISLVLLILASYICVGTVIFALWENWSLVDGAYFCFVTLSTIGYGDFVPARSFNGPELQLYACCAYLLLGLVLVAMSFSILETQLMWKCKRIAVRLKLARADG

SEQ ID NO: 1963 - DNA, 5330 bp, DROSOPHILA
ttctccttgtccctctcctgccccttctccgcctgctcctgctccagtgcatcatcagctgtccaggaggcggtgatgctgctgctgcgatgctgctgctgctgttgttgggggaacaccttgcggacggtgccgcaattgaagcacttgagcgactccgtgggattgatagtgttacatttggtgcacgaccactgcagcacggatgagatggtgcccattgcgcgggggagtcgcaggagttcccagattcctttcgacttctgagttgtttctcttgctgttgttgtttttgttgttgttggctggctggcgggggagtggatgtggaactgggactgtctatggaaactatgatgtgtaggtgcgctttcgagctggtggccgggcggagatggagatcaataggaggaccagaacccgggaccaaaacgaggaccaagcagtggcttccaacagttgcacgccgcgttctccgtcgccgtttcacaccattttttaactgttgccgctagggttgtcgacgttcgcgaacacctccaacgacaaggttgcccgagtgcgtgaactctgccggacagggttgccagcgcgagaaacacggctgctaccccgcaaagccagtgttggcaagtgccgttaatgaaaaatcggtaccttcaatttttagaccaattctaatatgtttttgggaatgaatacatacatatattcataaaacgacgcaaatacatgcataaaattatttgaccttctataacaagtaatcaacattgaggagcttagtttaggaagagtttaaatttaatatttagacatggattattattttttagccgctttcaaatggaaagtcaaattgaactgaacgcattaacttgagttaaattttaaacaaatagaagcacttcattgatacttactgtatgtggaacgaaaataccagattttggtatttacacagcttgggtatactgcaacaatctggtcactctgcatcagcagcacgtgtagttcgcttttttggcaaaaacatttgctgttatttagttgtagtgtccaagaaaacgcagcaaagatggttagctcggagccgaaaggacctgctaacgtggccaacacggcctcgcccctcaaggcccatgaatcgtccggcaagcgcgccaacggacagaagtttaagcccggtggagcaggaggcgccaggaagttcgacaaattcggcggaggagcaggcaagtcgtttgtaaagccaggcgctggtggtgccaagaagttcgacaagtctgggcccggtggcttcaagaagtttgacaaatccggagccaccggcgacaagaggcttggtggcaacaagttccgcggaaaaccacaaacacagccacaggcgccggcggagggcgagaaacaggactggaacaagttcaagaaggagaagaaggacctcaagctgaagcgcaagagtgccaaggacacctacgagatcagcaaggaggccaaccagatccacgagaagttgcgatggtgagcatccccaaaaacacgatgaacagcccaaacaatcggttattatcatccttagcgctcaaattacctatacaaattatgatagctcaacaaaatcgggctctttcatgcacttatgtacattcagaacgtacaaagttgtttaaatttcataaggcatcaatctatacgatatagttttaataattataagtcattttggttccttaaaggacaagatatcgataaacatggccatgtggatcccaaaacgaagcacctgttcgtggaaaaaccgaacattgccacttggttcgaattcaaaaacaccaaacattttattcatgttcttgaaacaataatagctagttaagcattttgatcagtatcaaaactaagttaatatagccttgtatttctgtataaatgttgagttagaaccaagagcgtagattccaaagacgcctatttagcgcatgctgttttgtttggtcataaacaaaccagctctatcctctgtcgcgttttttttttttttcgtaaaattacaactaatgaatgcgcaaatcctattgctctgatatatatatatcaacataatttggtgcttgtcttgcagccgccgaacggagaacaaggacaagctggtggagcagatatacaaggtgctcaacgtgggcgacactatttcaaaggtggtgaaggcccacgacaccgcccgcgtgatccagagcatgctaaagtacgcgtcgccagctctgcgggccgagatctctgagaagctgcttcccttcaccgtggagatgtgccagtcgaaatacgcccagttctgcgtgcaacggatgctcaagtacggtgcgccagccaccaaagccaagctggtggacagcctgtacggacatatagtgcgtttggccggacacagcatcggcagtgggctgctggattcgatgtatcagagcgccacacccaatcagcgcatctatatgcgccaggagttctacggcgatctgtaccggaaggccaaggattcgaatgtgaagactctgagcgacacctataaggaggccacgaacatgaaggcctccattttggggtcggttaaagcaaacctggatcatgtggccaacaagcagctggtggacagtgcgctggtgcacgccgtgatgctggagtacctgcgcgcctgcgacgaagatgaggagaagctggaggagacggtcactgcgtttgcggctctagtgcctcacatgctgtccaccaaggagggcagcgaggcggctgttatatgcttctacaagtcgacgcccaagaatcgcagagtaagtggatcacgtataacgtgtgttgatgaaacagaatcttatatgtattctaaccccttcttcaggccattatcaagaatatcaaggagcacctgctaaagatcgccaaccatgagcacggccacgtgttcctcatctcgctgctaaacgcactggacgacactaaggcgaccaagaaggcaatttacgatcacctacacggagatctaaaggcgctaatgagcagcccgtacggccgacgagtgattcaatggctggtggctccgggtgatacgacatgcttccatccagagttcattcgcacggtggaggagggtctagcctttggaaaaaaggagaaggagctgcgtcgcaaggagatccttgagcagatagaggcgccgattgcacagtccatcgccgaggatgccgccttttggctgtccaacagccacatcggcctggtcaccggcgatattcttaatcacagtaagtgcacacttctgaaagccatagcagaaacatacatatggatttacaagaatatgttcacgatattaatgtacgtttgcatctctgccttttagttcaaggcgagtcctatgagaaggctgcttcggcccttgcccaagtcgtcgtccaaccggagtggcgcatttcagcagacgccgccggtccgcagccgcaggataagaagaagcctcacaatgacgtggaggccattatagcccaggccaccaaacagcgcagaaaactgctttatgtcgagagcagcagcgacgacgaagatgaagatgaagatgaagatgaggagagcgacgatgaaggagacgagaaggagcagaaggaggcggccgcagatgatgccgaacccaaggtgaagaaagccaaaaaggagcccaaaaagccaaaggcaaaggaggaggagccggcggctccgttggtctccggaatcgaggaggccggcatgcacattgtattgaagaagatactcaagaacgatggcaagcgagagggcaccccgttcagccaacagctactccaaaacttgtcctccgatgtggtaagtacccaaaaatcatgccatccggtaaccgagggtatcttcctttttcccagtcatgagaaacgcatcgtacttttgagttttttcttttatttaatgacgtttcgacattcctttagctttagtctaataaataagtagtcgcaaagtaaacagcttcactcagattccaattcctaattgcgattccctttcccttttcagctgaaagcctggctgggcgtcaaccgggcctgttttgtcctgctcaagctggtggaggagtgtcccgcactgctggacgactgcaagaaagccatcgcggcggagaggagccttagccagatactcgcggaccgtaagacgcccggagccaagctactggccgccaaactggacattggcaaatgagaaacgcttctagcctagacaagacctaacattttaaaatacaataaataattctatattgaaatggctgggcattccgttttattcatgtgaagggacgcgagttgtgctgtgggtcggtgctcgatgagtctatgccttgcgcaggatgatgtgcaggccggagtcgctgtcgacgatgcccgacagctggttgacgttcaatttgaaggcagcgtcctcgaaagccgcctgcatctgacctgtgagatgtgaaatgtaattagaagcagttgcaggtcggttgggtggcctaaactctacgattgcaagtagctcgcgaagttataggtacaaaaatgtgtaaggtaaggaagattaaaaaagaaatgccgcggagccaattgcaaatagtgtttgtctataactatgcatctataatctattagtggtcgatatatcttctcttctcttctcttgaatattgaaaacaatcagagcctctagtggaagtaccaatctgtttctggattgcgcctcaagtgggaagcgccttattcctaaacggacacacatcgaggaccactcgatcctggacgtgtgacaaatgcacagtggggagatatacatacctctgccgaactttcccaggtcgccgcccctcttggcggagctgcagtcggagtaggagcgggccagctcgtcgaatgtggcctcctgctggacgattttgttgcgatagacctcgaggagcagctgggcctcctccttggtgcgcgtgatgttcgcctcgcgccacgagctgggacgccgactgcccttgtgcttaaccagcagatgcaggcaatgcacctcgtccggtgcatctccgccgccggcggatcctccgcccgccttcttcgccggctctgtgggctgatcccactgcgactcctttgtgtacatattgagataatagctcattcctgcaaaatcaatcatgatcaatcaagtgcaggttcagtttagcgtgccggttccgcattccgccggaaaaccgccggcatggcacgagcgggactgcacacgatgcttacctgtggagc

SEQ ID NO: 1964 - DNA, 2356 bp, DROSOPHILA
agcagcacgtgtagttcgcttttttggcaaaaacatttgctgttatttagttgtagtgtccaagaaaacgcagcaaagatggttagctcggagccgaaaggacctgctaacgtggccaacacggcctcgcccctcaaggcccatgaatcgtccggcaagcgcgccaacggacagaagtttaagcccggtggagcaggaggcgccaggaagttcgacaaattcggcggaggagcaggcaagtcgtttgtaaagccaggcgctggtggtgccaagaagttcgacaagtctgggcccggtggcttcaagaagtttgacaaatccggagccaccggcgacaagaggcttggtggcaacaagttccgcggaaaaccacaaacacagccacaggcgccggcggagggcgagaaacaggactggaacaagttcaagaaggagaagaaggacctcaagctgaagcgcaagagtgccaaggacacctacgagatcagcaaggaggccaaccagatccacgagaagttgcgatgccgccgaacggagaacaaggacaagctggtggagcagatatacaaggtgctcaacgtgggcgacactatttcaaaggtggtgaaggcccacgacaccgcccgcgtgatccagagcatgctaaagtacgcgtcgccagctctgcgggccgagatctctgagaagctgcttcccttcaccgtggagatgtgccagtcgaaatacgcccagttctgcgtgcaacggatgctcaagtacggtgcgccagccaccaaagccaagctggtggacagcctgtacggacatatagtgcgtttggccggacacagcatcggcagtgggctgctggattcgatgtatcagagcgccacacccaatcagcgcatctatatgcgccaggagttctacggcgatctgtaccggaaggccaaggattcgaatgtgaagactctgagcgacacctataaggaggccacgaacatgaaggcctccattttggggtcggttaaagcaaacctggatcatgtggccaacaagcagctggtggacagtgcgctggtgcacgccgtgatgctggagtacctgcgcgcctgcgacgaagatgaggagaagctggaggagacggtcactgcgtttgcggctctagtgcctcacatgctgtccaccaaggagggcagcgaggcggctgttatatgcttctacaagtcgacgcccaagaatcgcagagccattatcaagaatatcaaggagcacctgctaaagatcgccaaccatgagcacggccacgtgttcctcatctcgctgctaaacgcactggacgacactaaggcgaccaagaaggcaatttacgatcacctacacggagatctaaaggcgctaatgagcagcccgtacggccgacgagtgattcaatggctggtggctccgggtgatacgacatgcttccatccagagttcattcgcacggtggaggagggtctagcctttggaaaaaaggagaaggagctgcgtcgcaaggagatccttgagcagatagaggcgccgattgcacagtccatcgccgaggatgccgccttttggctgtccaacagccacatcggcctggtcaccggcgatattcttaatcacattcaaggcgagtcctatgagaaggctgcttcggcccttgcccaagtcgtcgtccaaccggagtggcgcatttcagcagacgccgccggtccgcagccgcaggataagaagaagcctcacaatgacgtggaggccattatagcccaggccaccaaacagcgcagaaaactgctttatgtcgagagcagcagcgacgacgaagatgaagatgaagatgaagatgaggagagcgacgatgaaggagacgagaaggagcagaaggaggcggccgcagatgatgccgaacccaaggtgaagaaagccaaaaaggagcccaaaaagccaaaggcaaaggaggaggagccggcggctccgttggtctccggaatcgaggaggccggcatgcacattgtattgaagaagatactcaagaacgatggcaagcgagagggcaccccgttcagccaacagctactccaaaacttgtcctccgatgtgctgaaagcctggctgggcgtcaaccgggcctgttttgtcctgctcaagctggtggaggagtgtcccgcactgctggacgactgcaagaaagccatcgcggcggagaggagccttagccagatactcgcggaccgtaagacgcccggagccaagctactggccgccaaactggacattggcaaatgagaaacgcttctagcctagacaagacctaacattttaaaatacaataaataattctatattgaaa

SEQ ID NO: 1965 - protein, 737 aa, DROSOPHILA
MVSSEPKGPANVANTASPLKAHESSGKRANGQKFKPGGAGGARKFDKFGGGAGKSFVKPGAGGAKKFDKSGPGGFKKFDKSGATGDKRLGGNKFRGKPQTQPQAPAEGEKQDWNKFKKEKKDLKLKRKSAKDTYEISKEANQIHEKLRCRRTENKDKLVEQIYKVLNVGDTISKVVKAHDTARVIQSMLKYASPALRAEISEKLLPFTVEMCQSKYAQFCVQRMLKYGAPATKAKLVDSLYGHIVRLAGHSIGSGLLDSMYQSATPNQRIYMRQEFYGDLYRKAKDSNVKTLSDTYKEATNMKASILGSVKANLDHVANKQLVDSALVHAVMLEYLRACDEDEEKLEETVTAFAALVPHMLSTKEGSEAAVICFYKSTPKNRRAIIKNIKEHLLKIANHEHGHVFLISLLNALDDTKATKKAIYDHLHGDLKALMSSPYGRRVIQWLVAPGDTTCFHPEFIRTVEEGLAFGKKEKELRRKEILEQIEAPIAQSIAEDAAFWLSNSHIGLVTGDILNHIQGESYEKAASALAQVVVQPEWRISADAAGPQPQDKKKPHNDVEAIIAQATKQRRKLLYVESSSDDEDEDEDEDEESDDEGDEKEQKEAAADDAEPKVKKAKKEPKKPKAKEEEPAAPLVSGIEEAGMHIVLKKILKNDGKREGTPFSQQLLQNLSSDVLKAWLGVNRACFVLLKLVEECPALLDDCKKAIAAERSLSQILADRKTPGAKLLAAKLDIGK

SEQ ID NO: 1966 - DNA, 2646 bp, DROSOPHILA
tgaaaattcctttggtcgatgcatttttagcggccaggtccacgagattacatgaaatgtggtggtccaatccaatttttattagcctttctgttatcttaaacagaacgcttatgagacatatacataggtaaaaagcttgaaaccactgaagggtatgctttttttgggtatcgggacagctttgatctctggtttgagctgataaccatattctgttaagcagattaaatagatccgcttttatattgttttatattgtcattgcgcgagtctggctttctgtttgctagatagattagaaagtccattcattcaaatggatttcgagtatgtagaaacaatacagttattgggtcgggtgatattgctttagtggattgagtgtttttcaacatttttaggaattcatcttcttctggagcccatgcgttgcaagttcgtttaatctgtttgtattttttttttttaatttttgatgctgtcttagatttaaaggcttttggaaatttcttctacaaaggtctggaaaattgatatttttttgtttcttatgaaattttgaagagtcttttcagctgctaaggtcttacgtgcatcttcataccttttggtacaatcaaatttctgcctcgctgcgtttcgaagtcggagtaatttttcttcttctgagcaccatcacttttttggttcgtatttgtttggtcctgcgattttaattgtgtttgcaccggttatgtagtccaatgattgtttaatggagtctaagcttgaaaaatgtacactttcaaaggcagaagatttttttttttatgttgtgaaatttgtatttatcttattaataataacttcaatcgagaagtgattgctgttaaaaattttggacttggaggagctccacgaaatatatcaaattttccaacactgcagtgtacattgcctggcaattaatcgaaatctagttatcctggcgttgatgtgtcaaaactagttttcacctgccagtgtttaaggccaaaaatctttgattttacgaacgttcgtcaacataaattgttgtactaaattcaaagaaactaaatccgcttccaagacgcgattacagtgattgcacactacacccaatattaggcgattaaattatttgtacgctccaacgattaaaaaactcaatacccaatggatgccgccgagggtcaaagcttggtgatcaaaatggcgcaaaagaacaagggtgagccaatagccaagtgtgttctcggaagattcgtgtaggaaaagtatgttcgttaaatcttgtagagacccagactgtgaagctggtgcccggaggcggtctggtcaacaactggtttgccccggctacgtatgggccagcagggattccatttggggctagtcccatgatcccaccgccgcccgttccgaatcacagcgtatcgtgccagttttacatggaccgggaggagcagctgtaccgccgcgcctgccagatgaagggcatccgggtggagcgggtctctgagatccgcgaggaggaggacgactcgaacggctccgaggaggagccttcgaagggcatccgctaccgctacaccctggacgagatgaaaagcttcaacccataccgttttatcaacttttaaatgttcccaaaacgtcccaaatagccgtcatagacgtcatagccgtcacactttcacttttacccacatcgcaccgtcagcacctcaatattcaagttgatttaagatccataactaggtctagcttcgccaccctacccacataagatgtcagcttataggtttatcttgcatgcctaaaaatcgcaaggagcatcacacgaagaacaggaacccaggacactgcccatttgcttgttgttgccgtatttccatgtagactcaagatccaagactagcactaacttcgccactacttccacaatttcacattagatgcaagattatatggacatcgtgcatgcctccaaagcgtattgggaatcacaaatgaaacaggaaccccggacacggctcatttgcttgttgttaccgtatcactcgcccgatgaaaacaataaagaattgttcataaatgacatcctgggatgtcaacaaaaagtaaggtttagttgtgctttcaggtaagggaacttaagttatccgaaaagttgcttttcaataagattcgtttctcgaattgattgtgcatgttaacagctttaagtggcaaccgaaaagtatttggataatttggcttatctcttattcattgccagcaaacggaattaatcgtacatttgttaaagcaaagccgtaaacgagcgtaaagtatccgggtcgaaggcctcatattgcttattaagtggctgccgggatgccagttaggtaaccattttgaggcccgcggcagacgagtgtgcaaataattgaacccaccaccagcaccgcatccaaagaacccaaggaggctcccgatgggatttatggtacctgtgcgacccagcccagtcaacacctgtgttaccctgggcgaagccaccattggagctcgtgatacccctctaaaaatgtcagggtttttattcgaacaccctacactcggataaatgtggtagtgtgtttaactatttcttttaaa

SEQ ID NO: 1967 - DNA, 578 bp, DROSOPHILA
gccagtgtttaaggccaaaaatctttgattttacgaacgttcgtcaacataaattgttgtactaaattcaaagaaactaaatccgcttccaagacgcgattacagtgattgcacactacacccaatattaggcgattaaattatttgtacgctccaacgattaaaaaactcaatacccaatggatgccgccgagggtcaaagcttggtgatcaaaatggcgcaaaagaacaaggagacccagactgtgaagctggtgcccggaggcggtctggtcaacaactggtttgccccggctacgtatgggccagcagggattccatttggggctagtcccatgatcccaccgccgcccgttccgaatcacagcgtatcgtgccagttttacatggaccgggaggagcagctgtaccgccgcgcctgccagatgaagggcatccgggtggagcgggtctctgagatccgcgaggaggaggacgactcgaacggctccgaggaggagccttcgaagggcatccgctaccgctacaccctggacgagatgaaaagcttcaacccataccgttttatcaacttttaa

SEQ ID NO: 1968 - protein, 132 aa, DROSOPHILA
MDAAEGQSLVIKMAQKNKETQTVKLVPGGGLVNNWFAPATYGPAGIPFGASPMIPPPPVPNHSVSCQFYMDREEQLYRRACQMKGIRVERVSEIREEEDDSNGSEEEPSKGIRYRYTLDEMKSFNPYRFINF

SEQ ID NO: 1969 - DNA, 5178 bp, DROSOPHILA
tctaaggtcaaaccaaatcgcggcatttttcacttttggaacgaaaagttgattttcgtgagctcagcgttgaccaaatgttttggtttttacttcgcttttggcctgtccgttcggactaaaaagccagaatgccgccaaagttggccgaccaagaataataaacgacaacagatgccaattattgggtgctttaatggcttcaacttcaacgtacttttggccgcaagtgagtgtcacttgaatgatgctcagtatggccgacactgcgtatacgtaacattacatggctgaaagttgagaggagctcaatactctgacacaatgtcgtgaacaatgcactttgaaaaggaaaagcgaaacaccagtaaaacataccagtgtttatttaattaaattaaatttattttctcttgatctttacatggtttgccattggaatggagtggggagatgtgtggggagctttgctgatggacactactactgctacttatgttttgcttccattaattcattttatttggtttacctcccaggctgcgttttagtcgaagacgtatttggagtacgtaataagcttaatgtacaaacaatgccatagaaacacatacaatatcatacacgttcggtttgcatacgggtctatgtggggatactactctggagggtctgaaattgcgaaacggcgaagtggcatatctatatatctcagtgtggtggctgctcatgtagatgggtaccatatacgttctgcggggggatatgttaggttgcttagactacgtttgattttgagttgacatcgctgacacggggatctatgctttataacctgacatttacaaactttgtttttttctttgtttttagtttttagttttgctgggtagtgttgttaaacatatacttagggttgctctcggctgcttaagactttatttacaattcgtatttatagctgattggccagtcagttagcctttctcttcgatggtgcttactgctgctgctgttgctgttgcggctgctgctgctgctgctgggggggcagcagttgcatcggcgacattactattatgttggtggctcctccggctgcgtggccatagtccagcggcttctgcatcgcctccacatccagatccggggcacgggtaatcacgcagtactggttcccattgtacgtgacaatgggcatgccgtgctgcatgttgctggcgtgctcgctcagctgggcctgcatatacgtggcggccgtcggcgaattggcaatgatgtgcgacaccggcaccgacacctggatttgcagggaaaaggggtaaacggaagggtaacagaatacagaatgcggaaatggtgagtttttttttttggtgttcaatgttgctgttggctgttggtgttgctgtggtttcagttcatttggtctgtttaataggtagttacttcttggctttggttgttgccgttgtggttgctactactattgttattgtacataggcgcactggtctgttgctgctgctgctgttgctgttgctgttgctgttgctgttgctgctgctgttgctgcagatgttgctggtgttttctggctgccttctttccgtgggccacgtgttgctgctgctgctgttggtgctgctgctgttgcggatgttgctgcggctgctgctgctgctggtggctggcattgagtatcatctggttttgaatgattatcttctgttttcgtgcttgggcctccatctgaatttggttttgattagcatccatttgatagttgcgactgttgttgctgctggtggtcttagcaatgactcctgccgccgctgctgctggttttgttgactctgcgactagccgttccggctgtcaatactacagttcaatgggaaagaaaaaggtaaagggttaaatccactccagccatatcacaaatatctccttggctcaactttcaccaggagtgtctaccgacatcttctcacctccagatgactcttggcgtgaatggaccactcgtcccgactcgagaacatcctgccgcacagctcgcacgtccacgacaattgctgctgatggtgcggtatgatgataccgggaatcgacgtcggcgctccttgagcagattgcactattatgttctgggcggccacctggaccgcctgctgctgcagctgcagctccaggctctgcttgttgtcctccggcggcggatccggctgctccttcttcttcaccatgttgttcagccgctttccgagtggtgcaatgttcgtgggcgtcacgtgcttgaacttgttcatgtgaatcaccagcttgtcccgccttgcgaacgccttattgcacacctgaaatgaaggattcgagagcgagggttagattagatgatcgaggctagaggtgcggggctcgagggcagcttatacttcacaaatatagggcttctcgccggtgtggatgcgcatgtggatggtcagcttgtccttgcgggcgagtcctttgccgcagaccgtgcactcgaatgccttgttggtggctgtaaaagcgaaaggttgattgattcaaatccatgtaaaagtacgttattgttggactttaacactagtgcttatattactaactttgcgaaacttttaacaatactcacactttgagggatttgtcttgcgcaccccggaggatgcctgttgcacctgttgcagggccttgagtcgactggcggggtgcatggagcccccctcgacatagggctctgtgaaggggatgaggttgggcttggggatgttgtaggtcagttgctcggccgccgaccaggttcccagactctgcaggacccgcacgcctccttcgaatcccattccgtcgtccggaactgtgaaggtgctctcccccgccgccgcggctgccacattggaggaactgatctgcggcaccttgatggttgctgcataatgctgctgctgctgttgttgctgctgctgctgctgttgctgctgctgctgctgctgttgctgctgcatgttgccattgttctggctgttgttgttgttgttggccgtgggggagttctgttgctgggacgtctgctgctgcttgaactgaatggccgcctgggccatctgctgctgcaccgccatgtgcgcctcgagatatgcgttcttctgggcaaccgtcatcttatccatgttaacggcgccgatctggcgattaataaaaaatattcagtaaaataaatatatataaagggtataccatgtcatgtagatacatcaaaaaacttattgcacatagtgtgtagtattactatcgattttaaggcttttaacttatttaacttttgataaagcctttgttaatatactagtaaatgggttaacattgatggacctttatggttctcacagtctgcgagggtattcgaatcaccgctattgtgaatgccacccctaactgtaaattgtgggggtgcttgtgtgagtgttgcgaaatcactggcgtcgacggagacgccgactgcggcagcgacgaaggcgcctgccaccccctttgcggaaaagcactcgactcgattcacttcggcctgcccttgcgcaaaaatttgtgacttgagcttttcccagcccaactttcggattgttggattgccacccccttgtggttgtgtgtgtatgccggccgcttcttcctcttccgttttttcgggcttcctcttctgcttcttcagcttttttcatttttggacccgaggtttggggcttttccgtgtctgcccggatttattttcaagcgcgctataatttagccacaatatttgagtttgggggtttcacacctccttgcgccgacactgcactatatcacttttctattttcggacattttgtggggattctgagccagctttagacacttttcagcatttacctaacccaccaccgcccctttttgttccgcctggccattgacatttccacatgcattttcactgccagttggtggggcttttctctggactttctcatgttttttccgtatttgcttgcgttttccgcttaccacacttgaaaatcaatacgagaatggtcgctgcttttccgattttccgcttttcctcgacgcgaattcggtggaaatgctgagccgccaaggattcgccgtcgtctacttcccagtgcctattgtttgtgtatgtatattgcgaaaccgaaaccgattcacttctctgccacttttttgactcgacgtcgactcaaaagctctgcgccctcacaccacctcaattattattattttgagtaattatttgttatttttggaaggccgcaggacgccgaacgcggatataggatgcgagcagagcgaaggcagccagatagcgactgtcgaattgcttttgcttattccacaaaaatcggaagcggtacgctacgcaaggcgaaaagcgttgcatatctcaaggcgtccaaacggggagagcttttgctctctctctctctctcttttctccgcctctctccgaactcacacatacattcgcagcgataactgctggtcacgcacagtggttatggcatatctaaaattgctttgtatggtttctatatttaaaaacataaggaaaatagttattgaaattcaaaaaaatacttatttgttttaaaatataactttaaatagatcatttttgtgttgaatccaaagcctgtggatcaacaaggatcagtggagatgtcttggtttatcagttccaaaatactgatgcgctgctttaatcatttaaatatgtataaaatcatacgattggattttagcctgctcgatgcagcttaaatattacttggcttgactaccaaaagtacatattaaggtgtacattaaagcacaacccaaatctagattactccttccatcaaagtaaatcgctgaaatccaaataatccaggcgaaacctattgttgttctttaattgggttaattgcaaccactgcaggccactttgccccgcgaaaaagtgtgccatatgcaacacacacttttgcaccgaaagttggcccataaatttaatttgatttcattgtttgttttaatttacaacgattttttttattggacacttgaaaggggcgaaaaaactttgccatttggccagcggcaaattggaggctaaaa

SEQ ID NO: 1970 - DNA, 1865 bp, DROSOPHILA
ggaagtagacgacggcgaatccttggcggctcagcatttccaccgaattcgcgtcgaggaaaagcggaaaatcggaaaagcagcgaccattctcgtattgattttcaagtgtgatcggcgccgttaacatggataagatgacggttgcccagaagaacgcatatctcgaggcgcacatggcggtgcagcagcagatggcccaggcggccattcagttcaagcagcagcagacgtcccagcaacagaactcccccacggccaacaacaacaacaacagccagaacaatggcaacatgcagcagcaacagcagcagcagcagcagcaacagcagcagcagcagcaacaacagcagcagcagcattatgcagcaaccatcaaggtgccgcagatcagttcctccaatgtggcagccgcggcggcgggggagagcaccttcacagttccggacgacggaatgggattcgaaggaggcgtgcgggtcctgcagagtctgggaacctggtcggcggccgagcaactgacctacaacatccccaagcccaacctcatccccttcacagagccctatgtcgaggggggctccatgcaccccgccagtcgactcaaggccctgcaacaggtgcaacaggcatcctccggggtgcgcaagacaaatccctcaaagtccaccaacaaggcattcgagtgcacggtctgcggcaaaggactcgcccgcaaggacaagctgaccatccacatgcgcatccacaccggcgagaagccctatatttgtgaagtgtgcaataaggcgttcgcaaggcgggacaagctggtgattcacatgaacaagttcaagcacgtgacgcccacgaacattgcaccactcggaaagcggctgaacaacatggtgaagaagaaggagcagccggatccgccgccggaggacaacaagcagagcctggagctgcagctgcagcagcaggcggtccaggtggccgcccagaacataatagtgcaatctgctcaaggagcgccgacgtcgattcccggtatcatcataccgcaccatcagcagcaattgtcgtggacgtgcgagctgtgcggcaggatgttctcgagtcgggacgagtggtccattcacgccaagagtcatctggagccggaacggctagtcgcagagtcaacaaaaccagcagcagcggcggcaggagtcattgctaagaccaccagcagcaacaacagtcgcaactatcaaatggatgctaatcaaaaccaaattcagatggaggcccaagcacgaaaacagaagataatcattcaaaaccagatgatactcaatgccagccaccagcagcagcagcagccgcagcaacatccgcaacagcagcagcaccaacagcagcagcagcaacacgtggcccacggaaagaaggcagccagaaaacaccagcaacatctgcagcaacagcagcagcaacagcaacagcaacagcaacagcaacagcagcagcagcaacagaccagtgcgcctatgtacaataacaatagtagtagcaaccacaacggcaacaaccaaagccaagaagtgtcggtgccggtgtcgcacatcattgccaattcgccgacggccgccacgtatatgcaggcccagctgagcgagcacgccagcaacatgcagcacggcatgcccattgtcacgtacaatgggaaccagtactgcgtgattacccgtgccccggatctggatgtggaggcgatgcagaagccgctggactatggccacgcagccggaggagccaccaacataatagtaatgtcgccgatgcaactgctgcccccccagcagcagcagcagcagccgcaacagcaacagcagcagcagtaa

SEQ ID NO: 1971 - protein, 578 aa, DROSOPHILA
MDKMTVAQKNAYLEAHMAVQQQMAQAAIQFKQQQTSQQQNSPTANNNNNSQNNGNMQQQQQQQQQQQQQQQQQQQQQHYAATIKVPQISSSNVAAAAAGESTFTVPDDGMGFEGGVRVLQSLGTWSAAEQLTYNIPKPNLIPFTEPYVEGGSMHPASRLKALQQVQQASSGVRKTNPSKSTNKAFECTVCGKGLARKDKLTIHMRIHTGEKPYICEVCNKAFARRDKLVIHMNKFKHVTPTNIAPLGKRLNNMVKKKEQPDPPPEDNKQSLELQLQQQAVQVAAQNIIVQSAQGAPTSIPGIIIPHHQQQLSWTCELCGRMFSSRDEWSIHAKSHLEPERLVAESTKPAAAAAGVIAKTTSSNNSRNYQMDANQNQIQMEAQARKQKIIIQNQMILNASHQQQQQPQQHPQQQQHQQQQQQHVAHGKKAARKHQQHLQQQQQQQQQQQQQQQQQQQQTSAPMYNNNSSSNHNGNNQSQEVSVPVSHIIANSPTAATYMQAQLSEHASNMQHGMPIVTYNGNQYCVITRAPDLDVEAMQKPLDYGHAAGGATNIIVMSPMQLLPPQQQQQQPQQQQQQQ

SEQ ID NO: 1972 - DNA, 9614 bp, DROSOPHILA
tttttcgtaaagtccacaccgcgcacaaacggcagcacgctcattttgaccacataaaatgttatatttgttttatatttgggctcaagctgctggccctgtttttcgtttcttcttctttattttgttttttttttgcactaaaaaaaagaagactaagtggtgaccgttcaccgctcacccgagcaaacggcatggtcgcaccttcgtatgcagttgccggaactggccacactgcgcattttacgagggttaggcaacactaaagtgttggaaatcacagaaggcacactcgcgttgcacttcgtaggtttggtgcagctgatttatcatatagaaggggagctttgtgggcttaaaaaatttggttcatatacggcaataattacatttgtgaccaaaatagagtttctcgcctttaaatattaattttgcatggcttttaacggtacgtccaccactgtattatacgagcttaagtcgagtgtgaccgttaatgtctaaaaatggtgtggctaatttaaaaattattttgaattcccggaaccgagctaaaagcgacttaagttttggagtttttgattctttttgaaaacagagccgttagtttcaaatggtcctatggacttacaaataatacgttgaaaactaacggagtaagtgattgaaaccaaggtttttgtttttgatttatttattatttatttaaagaaattgaaatacacatataatttgtataaactaaatttgattaactatacatttgatgtgtgccttaagacttaaatataataaattcctttttgctgatctgtgagagccgaacgcttcggactatgttagtttgctcaaaacggtcacattggatggggttcgggtttttcgaagggtccttttcgtcctgcgaaaaaacagtaacatcgtatcgtgagcataatccagagggtgtgaccaaattgaacgacacgaaattttcatactttgcccagtcttcggaatgtgaaggtcctcgctcgtgtgttttgttgcctttgcaccgatattgcaaaaacataaaatcaaacctagcctcaaaaacaatacaaacccgaatgaaatttaatagatacgccagaaatacgacaacttgattgaattaatgccaactgaaaatagtgcagcaaaaagtaataatttcgaattttttgccgatacactcggcactaggctttgtttgttgtggaaaattgtgtacccccgaaaaagggagtgttttcatttggcgtcgttcgtcacttgctcgaacgccaaattgttggcgaatttcatttattccgttattgtgtggatgtatgcgtgcgtgtgttattgttgcatttgccgttgtacaaacgcaaacgcactttgcagttggtgtgtgcgcgtctgcggggctgggtggcggcgacggaagcgatgtgggcggggcggcggaaagtgggcgcagcaattacgagagaactgccaaaaggaataaggataagaagaggatggggatggtgatggagaaggggaagcagtggccagagcagagcgaacttttaatcaatagatatacaaacgcacgcgcagccgcgtgaccgttactcgcacactcgctttcgcctctttgccatgactctccgttgctgctgctgctgggggtgttggtgttgttgctgcactggacgaagcaggaagaggaagacaagtgaacaaaattgctattgcgctgggcagcatcgttcgtcctcaatccgaaatcaagtaaaataaatttgggaaaaagcattggaaaataaaaaaatccgcgttcgcgcagttcatttaattcacttaacggaataagtacatacagatgtagctcaaatacatcaaccggctggcccgcggctttgtttttaatttaaaagtgcccgaaagtgtggggcaacctacttattgagcaattaaggccatgcccacgcatgcacgcccacatactcgtgtaggtatgggtgtgcgtgtgtgtacatgcaggagccgttagtttgagtatgccaaaaagtggggttaaaaccgaaatcgcagatccttgtagagcaggcggaagaggatgacaagacagcttctttttgcatatctcagtggatccgagaaattatcacgtagttcataaattcgcggttatttatcatgcgtcttatttccaaatcacttgcaacaaacaaaacacggacgatatgaacaataagatgaactaaatagatggtctataaaattaatggcgtaataacgagtgcacagctgtttttgagatatatctaggaccactaggatataccaatcaatcagtcatgtccgtctgaacttaagatctttaacaaaaaacattggcgaaacgcattgcaaacattgccacgcccacaaatcgcgtgattttgcggtgtgcacatttcaaatactgtgcgtgtagagctgttacgcctctttgtatgcaacgtttttgttaaccaacgctctgttttataaattatcattcgctttttttgttaaatagcatacttttctataaaagccttctcgtagctttagaacaattagtgcttttaacataaaatcaaaaatacatgagaaatgttctaatctgcttcttaaggtcaattcgttatctgtcacacgtgaaatctattaattaatcttcagtgattgtacgtgttttgaaaagcgaatataggctatctgtcagatttcaacggcttgcgttcatttcaaaaagtgctttcggggaaccagagcatacatatataaattaattaagaaaagctcacttctggttacctaatatccctttacccccttctcttctttaccctctctccaatttggatttggtgtcaagaggttaggaaactcaggcctgagagcacgtagcaggaaaacgcatctgtaacgagggaaaggaaaaccgccaggagcaacaaaggacaggaagagcaggaacacattccgattccacaaggggaggagctgaggaaagcaggccaggatgggcgactatcacgagttcacggaccagtacaaggtgccggtgatagcgaagctactccacgccctgccccactataacatcacgttccacaagatcaacagcacgttccggcccaacgatgagatctacctggaggtgagtaaactctctcttgaaattagttttaatggtgaatcgattactaactgttacatgtttgcaaagatttcgagtgttaaacaaatgagttttgaatgaatgatgtataaagtcatcagaacacttatgtatgtttttgcaataatttccaatatacatatctgaatgatactattaaatcatgaatcgtatcttttattatttggtaaataatatatgtgtagttcttgtaagttcgctggtaaatcgttctaaatcttcactcttcactccccttgattcctcttatagagcctgggcattctgggctcggttccggctgccctgctgatcgtctcgctgctgggactgctcttctatctcatgacccgctgctgtgaccggaagccccggccagcccactcgatcactagcctgaaggtggccctgtccattgtgacggtgatgtgctgcgcggcgattggattgggattatatgggaacgatgatctgcacaacggactgctggaggtgctgacggcgggcaggaaggtggacaatctagtcacgaccatccgcaatcagacgcacatcttggagaacacgctgacgaatcgcatacggccgcagctggtggaactggcggacatcttcgatcagccggtgtcgaaccaaactgccctctccaagctctttgtgtcgctcaatattgtccagggaaatgttaccctagccaccaatgcggccagcgatatcagacgacccctgatgggcatttccatgacgcacttcctcacggtaggcacattatatacacattgtaatgccaacttgattaaacttgtgtcccatatcccaatagcgcggcgaccaatgggaactcatccgctggccgggcacggtggccaccttggccctgctacttgtcttgtgtgccgtgctgctggtgggcgtggcccggcactcgcgatgcgccctaatcctgttcagcgtgtgcggcttgctagccgtcaccggttcgtggctcatgtccggtctgtatctctcctcctcggtggctgtcggcgatctgtgcatctcaccagcggattttctggtgtccacggcacccagggatctgcccacgaatgtgctgctgcattacacccaatgcgaaccaggccacacgaatccgtttacccaacgcctgagggaatcgcagaattccctaaacaatgctcgcagtgccatggccacggttatgaagatatcgctggtgctcttcaaatcctcggggctgcagcccaagctgggtgctgtaaatgcagatctgaatagcagtgagagattgctgacccagctgacggcgctcgtggattgcaaggcagtgcatcacaattttttggccgccgcccgaggactttgcgagggaggattattgggactggtactgatgctaatagccagcttcattgccgccattctgctaaccatcatggtgtgggtggactcgcacacgtggatttatatacggaaacggaatgactatgcccaggtggacgagccgtcgtatatttcgcatccggcaccgcagaaccaccagcagatgatgaacgccgccaggacattgccgcgaaatcataatgggtacgttttagaagatcccttcgtgacccgtcccgcccgattcccgcctccattctctcgatctctctttctctgttctctctcgtcccgttttctctgctcttgcgccatatctgacattccaggcacttcagtccgccggtgatcagcggctcccacacgctccagcatcccagcaagcgccagcagcacgagatgatggcccacgcccacatccagcagaacatgcgcgccatgggcacccacacgctgggccggctgccatcgcataaccacagccccacccacatgaccggtaagtggggagcccgcaccacccactcccgaaactcgatacacacgcccactactctatctgactacaccgaggaaaaaagcgcccaactgaagaggcacaaataaactaaattgaattcaaagtagccagaaaagatttcaaagattttactcaaagaatgagagcttcatttcattagaaacatttggtttattgcgtatgaattttaaaagtattagtatttgttattctgatatttttaatagctttcattgaggcgctttttatcacagtgtacatgtacatatttatatcaatctcagtgtccatatgtgtgttaagaccgaagacgaaattgagctgggaatcaattagaaaaatgttgcgcaatttagtaaaatcttaaatgaacttagtttgtgttgtaaaaaagtaaaatatgtaaaatgtatgatatgtaaagaaaaaaagtaaaattgcttactttttatttataatattcatacaatgttgtgaataaataaacaataagcgttaaaatcggttcatatcctatttggtcgaactttgaaagtaaataaccgatactgaaccgattcgcaaccgttttagatatttgtaaagcaacggcaaaccgctcaattcgctctcatcacgtttattcttctatataatctcattccatgcataattcccgcgaccatccatcgacccgctccatgaccacaccatcgtcgccacctgcaccctgcatcctgtatccgcatccaacgtccacatccacatccttcgtccaacccgcgcctattgctaatcgttgtgtgtgtgcatttttataggtcccaataatggtaaatatgcaaccctaagcaaacaatgcaagacattggaagcgaatgacttttactgaaaaccgtcgccaccccccgcagcagcagcagtcgcagcagcagcaaacgccgccgccaacatgccgccgaccacgcaggccgcccaacagcaacagcagcagcaggcgcaacagcaacagcagcaggcacagcaacagctgggaggaccacagcccatctactgccatcatccccaccagcatccgcatccccatccgcaccagcatccgcattcgcactcggctgccgccgtggccgctgcagtgcagcaccagcatgcgatctaccaccaacagcaggcgcagcaatatggcacctataccactgcggcccaccacgcaccgcatcatctggggccgggccagagccagatctaccagcagattccggcgcacttggcgccgcaactggcggccaatggcaatccccactccatttatcagccgctagttgctgttagccagggctccatatatgtatccaatatggcgacaatgcgtcgccagaacagtcagggcggcccacagataccggcgcaccagcatccacccagcttgcatcagcaacagcagcaaccaccgcccccctcgcagcagcagcaacagctgcatcagctcaagtccccgcaacagcaccagcaacagctgcagcagcaccagcagcagcagcagcagcaacaccaccagcagcaacatcaccagcagcaacaccagcagcaacagcagcaacaccatcagcagcaacagccaaacgaatcggatgtcgtgcccattagcacggccatggataccgccatctatgatcgggataagcagatctacaagtgctccactttgcggcagggcggcaagtttgatcccaagtacaagccatcgattctcaactgcccactgccggagatccccaaagatgcggagcagcctaaggtggagtccatctacgagcagcgtcagcaggcccaccaccaaaactactccaagtaggtgttgctattataccatggtgcacaaaaaaaagaatcatagctgcattgagaatgatttaaagatgataatgctttcattcttttaaccaaatacagataatttttcacaatatatctaataataaattatgtactaattattatattatgtttttttttattttttaaaacatgtttattattattatttgaaatgttcaaattcagaaaactagtatgttacaaagatatcttagattaccaataccaactttatttttaatgctattaattccgttgttagaagaagaatctcgttagattgcgagatctcttaagctagaaattttagacttagcatgctggcgttagtgtcgcctacgccggttgtttgtttttaaacgttgccgcgcccctctcatgcagaccaccctaaaccacctcattgcccacaaattttaactagaatatatgtgtgcacatcgccatctcgctcgcactagctgagtaacgggtatatgatagtcgatgaagtgaagtacagccttctctcttgttttcaagaatattagcttatttttccatctgttctcgttttaaacgagagcgccttaacatctttgcctgccttgcactgatatctcaaactgaattttctccctccgtccaggaccctgcagcgtccaccgatgatgttgccgccccagatgaaggcgattccaccgccgcgcattggtacgcccacttcgccgccaccgcccgtcgcccagccgctcaacgagtccaacggaggagtgccgtcgggtctacagaatggaggagctgttgtgggaggaggaggagcaaacgccaacgaggacacctcgttgccgccgccgccgctggaagcgcaaacggaggcgacaaaggcccgaatgggagcaggaccggcggccaatggcaaggtgctgcacaatggcggaggcggtggaagcgtgggcggtgggggcggaggagcggtggacgacgatgatgatctgccgccgccgccgccagcgataaccgacgaaagcaactatgcggtgacggagctgtaagatggttactgctgacacacccagacaacgcccagtgaaggcaggcaggcgggcaggcaggacatatgagatgaaaattggtccggacttgggattggggcgtcttcctaggattgaggcggatgtaggatagatatacatatatcgagggaatcggggaaatgggactaaggattgctgaagcggcgagtgttccttcttgatttgttgcatttaacgtatgcgtatcgtatcgtaatcgtattctagaccggaatcctgcttttcgactcttgtacatattatataccgaactatacccgaactttccgagcaagtcgacacgaaggattgaaacacagatactagatacccgcaggcggacagacggacagatggacggacacgtgtaatatatatcagcgatctattacttatataaatatatatgtatacatatatatatatatgtatatatatatatatatacacttaggacacggttattcctttttgataatagcatatttttaccaattttaaagcgctaaattgtcagaagaaacaattttacgggggctaacttactgtattatacaacattaatctacaaaaatatataaattgtatatcctctacaacaaaaaacaaaaaacagaaaaattaaccgaaatcgaaagaccgacacttgaacctaaaaagcaaccaccaaatattcaaatcgaattcggatcgtaggtcataagttctagaatcgaaatgtagtagaaaagttagaaagatttttaggcacttgtcacgggagtcaattttttaagtagaaaacgggcaactgaatggatgggcaaatgggcgtggctactagttttttgttttgtataatcaatacttttacttgtaattaggaattgcctattttccataagaaaagaattcagacaaaatatttaataatacattgaatagtcgatttttgagtctggagatcttcgtggcacccctctatttttcgtttttagtcgtttgttctataacgaactttcctaaactttcacatgtgtgataacctcatttcaagtttcgttagacgtatggcggatgtgaatacttatttatacttattttcatggcctaagttcctgactgactgcatttatacctactcctacataaatgttcacaaatggcttagcagtgctaggatgaaacttaccccacttatgtacgttacgttgcaagcgaatcgaaccgatataacctcgagtatgccaaacccacgttagttgaaggattagagttatttaaggacccaaggactcgtactgctactgttaagaccccgaacccaaacactgcccatcctcccgccacatccattcaggggaatccccgtttattgctcgactctgtcctgggtctgggttgtgctgcggacgatgcccacgcctggatgggatgcggtgggatcgtccgggactggcgggctgaatcggtcgaggattcgtgcccgcgattttattgtgtatttaacctaagcttaacatggaatgcatttattaaatctaaacttaacgaagatacatgtagatacttagtgggctaactgtatatttagtagctaaacgaaaggcatgcatagtactagcgtaatcagtaa

SEQ ID NO: 1973 - DNA, 3862 bp, DROSOPHILA
tgaaggtcctcgctcgtgtgttttgttgcctttgcaccgatattgcaaaaacataaaatcaaacctagcctcaaaaacaatacaaacccgaatgaaatttaatagatacgccagaaatacgacaacttgattgaattaatgccaactgaaaatagtgcagcaaaaaaggttaggaaactcaggcctgagagcacgtagcaggaaaacgcatctgtaacgagggaaaggaaaaccgccaggagcaacaaaggacaggaagagcaggaacacattccgattccacaaggggaggagctgaggaaagcaggccaggatgggcgactatcacgagttcacggaccagtacaaggtgccggtgatagcgaagctactccacgccctgccccactataacatcacgttccacaagatcaacagcacgttccggcccaacgatgagatctacctggagagcctgggcattctgggctcggttccggctgccctgctgatcgtctcgctgctgggactgctcttctatctcatgacccgctgctgtgaccggaagccccggccagcccactcgatcactagcctgaaggtggccctgtccattgtgacggtgatgtgctgcgcggcgattggattgggattatatgggaacgatgatctgcacaacggactgctggaggtgctgacggcgggcaggaaggtggacaatctagtcacgaccatccgcaatcagacgcacatcttggagaacacgctgacgaatcgcatacggccgcagctggtggaactggcggacatcttcgatcagccggtgtcgaaccaaactgccctctccaagctctttgtgtcgctcaatattgtccagggaaatgttaccctagccaccaatgcggccagcgatatcagacgacccctgatgggcatttccatgacgcacttcctcacgcgcggcgaccaatgggaactcatccgctggccgggcacggtggccaccttggccctgctacttgtcttgtgtgccgtgctgctggtgggcgtggcccggcactcgcgatgcgccctaatcctgttcagcgtgtgcggcttgctagccgtcaccggttcgtggctcatgtccggtctgtatctctcctcctcggtggctgtcggcgatctgtgcatctcaccagcggattttctggtgtccacggcacccagggatctgcccacgaatgtgctgctgcattacacccaatgcgaaccaggccacacgaatccgtttacccaacgcctgagggaatcgcagaattccctaaacaatgctcgcagtgccatggccacggttatgaagatatcgctggtgctcttcaaatcctcggggctgcagcccaagctgggtgctgtaaatgcagatctgaatagcagtgagagattgctgacccagctgacggcgctcgtggattgcaaggcagtgcatcacaattttttggccgccgcccgaggactttgcgagggaggattattgggactggtactgatgctaatagccagcttcattgccgccattctgctaaccatcatggtgtgggtggactcgcacacgtggatttatatacggaaacggaatgactatgcccaggtggacgagccgtcgtatatttcgcatccggcaccgcagaaccaccagcagatgatgaacgccgccaggacattgccgcgaaatcataatgggcacttcagtccgccggtgatcagcggctcccacacgctccagcatcccagcaagcgccagcagcacgagatgatggcccacgcccacatccagcagaacatgcgcgccatgggcacccacacgctgggccggctgccatcgcataaccacagccccacccacatgaccggtccccccgcagcagcagcagtcgcagcagcagcaaacgccgccgccaacatgccgccgaccacgcaggccgcccaacagcaacagcagcagcaggcgcaacagcaacagcagcaggcacagcaacagctgggaggaccacagcccatctactgccatcatccccaccagcatccgcatccccatccgcaccagcatccgcattcgcactcggctgccgccgtggccgctgcagtgcagcaccagcatgcgatctaccaccaacagcaggcgcagcaatatggcacctataccactgcggcccaccacgcaccgcatcatctggggccgggccagagccagatctaccagcagattccggcgcacttggcgccgcaactggcggccaatggcaatccccactccatttatcagccgctagttgctgttagccagggctccatatatgtatccaatatggcgacaatgcgtcgccagaacagtcagggcggcccacagataccggcgcaccagcatccacccagcttgcatcagcaacagcagcaaccaccgcccccctcgcagcagcagcaacagctgcatcagctcaagtccccgcaacagcaccagcaacagctgcagcagcaccagcagcagcagcagcagcaacaccaccagcagcaacatcaccagcagcaacaccagcagcaacagcagcaacaccatcagcagcaacagccaaacgaatcggatgtcgtgcccattagcacggccatggataccgccatctatgatcgggataagcagatctacaagtgctccactttgcggcagggcggcaagtttgatcccaagtacaagccatcgattctcaactgcccactgccggagatccccaaagatgcggagcagcctaaggtggagtccatctacgagcagcgtcagcaggcccaccaccaaaactactccaagaccctgcagcgtccaccgatgatgttgccgccccagatgaaggcgattccaccgccgcgcattggtacgcccacttcgccgccaccgcccgtcgcccagccgctcaacgagtccaacggaggagtgccgtcgggtctacagaatggaggagctgttgtgggaggaggaggagcaaacgccaacgaggacacctcgttgccgccgccgccgctggaagcgcaaacggaggcgacaaaggcccgaatgggagcaggaccggcggccaatggcaaggtgctgcacaatggcggaggcggtggaagcgtgggcggtgggggcggaggagcggtggacgacgatgatgatctgccgccgccgccgccagcgataaccgacgaaagcaactatgcggtgacggagctgtaagatggttactgctgacacacccagacaacgcccagtgaaggcaggcaggcgggcaggcaggacatatgagatgaaaattggtccggacttgggattggggcgtcttcctaggattgaggcggatgtaggatagatatacatatatcgagggaatcggggaaatgggactaaggattgctgaagcggcgagtgttccttcttgatttgttgcatttaacgtatgcgtatcgtatcgtaatcgtattctagaccggaatcctgcttttcgactcttgtacatattatataccgaactatacccgaactttccgagcaagtcgacacgaaggattgaaacacagatactagatacccgcaggcggacagacggacagatggacggacacgtgtaatatatatcagcgatctattacttatataaatatatatgtatacatatatatatatatgtatatatatatatatatacacttaggacacggttattcctttttgataatagcatatttttaccaattttaaagcgctaaattgtcagaagaaacaattttacgggggctaacttactgtattatacaacattaatctacaaaaatatataaattgtatatcctctacaacaaaaaacaaaaaaca

SEQ ID NO: 1974 - protein, 970 aa, DROSOPHILA
MGDYHEFTDQYKVPVIAKLLHALPHYNITFHKINSTFRPNDEIYLESLGILGSVPAALLIVSLLGLLFYLMTRCCDRKPRPAHSITSLKVALSIVTVMCCAAIGLGLYGNDDLHNGLLEVLTAGRKVDNLVTTIRNQTHILENTLTNRIRPQLVELADIFDQPVSNQTALSKLFVSLNIVQGNVTLATNAASDIRRPLMGISMTHFLTRGDQWELIRWPGTVATLALLLVLCAVLLVGVARHSRCALILFSVCGLLAVTGSWLMSGLYLSSSVAVGDLCISPADFLVSTAPRDLPTNVLLHYTQCEPGHTNPFTQRLRESQNSLNNARSAMATVMKISLVLFKSSGLQPKLGAVNADLNSSERLLTQLTALVDCKAVHHNFLAAARGLCEGGLLGLVLMLIASFIAAILLTIMVWVDSHTWIYIRKRNDYAQVDEPSYISHPAPQNHQQMMNAARTLPRNHNGHFSPPVISGSHTLQHPSKRQQHEMMAHAHIQQNMRAMGTHTLGRLPSHNHSPTHMTGPPAAAAVAAAANAAANMPPTTQAAQQQQQQQAQQQQQQAQQQLGGPQPIYCHHPHQHPHPHPHQHPHSHSAAAVAAAVQHQHAIYHQQQAQQYGTYTTAAHHAPHHLGPGQSQIYQQIPAHLAPQLAANGNPHSIYQPLVAVSQGSIYVSNMATMRRQNSQGGPQIPAHQHPPSLHQQQQQPPPPSQQQQQLHQLKSPQQHQQQLQQHQQQQQQQHHQQQHHQQQHQQQQQQHHQQQQPNESDVVPISTAMDTAIYDRDKQIYKCSTLRQGGKFDPKYKPSILNCPLPEIPKDAEQPKVESIYEQRQQAHHQNYSKTLQRPPMMLPPQMKAIPPPRIGTPTSPPPPVAQPLNESNGGVPSGLQNGGAVVGGGGANANEDTSLPPPPLEAQTEATKARMGAGPAANGKVLHNGGGGGSVGGGGGGAVDDDDDLPPPPPAITDESNYAVTEL

SEQ ID NO: 1975 - DNA, 3048 bp, DROSOPHILA
gaccggcgtctgtcttctcgatcttgttgcagaaggtgccctgcggccagtcgagcacggcggcggtcatctgggccgtttggttggcatcatcgtcgatggcctgcttgccaaggatgaccaggtcggctttttcgtcaagagccaacttggccagaatcttcgacacgtggatgggctgcagaagctcgtactcggcggccgggatctctacgtggacgccgcgatcggcgcccatggccagggcggtgcggatcacctcctgcgactgggccgggcccacggagacggcgatcacctcctcggccagctttttctccttcagcttcaccgcctcctccacggcgatctcgtcgaagggattcatcgagtgcttcacgccctgggtgaccacgccagtcttgtcgggcttgacgcgcacctggacatgataaatgtaacctgaattagtttaattgccgcttaattaaggcgattacgcaaaacagagcgcaacaagtgataaaaagacaatgggacaagatgcgcaacaggcgacttttcaggctcaccttgacggcgtagtcgatcacacgcttaactccaaccaaaacacgcgccattttctgccaaattagttataaaattgatgaaatttacggaaatttactgagtttcaagaacttacctcttcaagatggaaatgaactgatttgttggcggcgggggcgcgggtggtccaaaggtcttctccggctacagcgttgccagacagagcagccgattatttgcagctataaaatgtccaaatattcccgctgaaatacatttttaaattcatgtatcttaaaggactaacaactttaagcaaaactaggaaacataatttctgaaactgtggagttgatgaattacgaattcaactatttacgggggagtagctaaactttgtgcttttcgctcctctctagccgccaacagctgttctactttcaccgcaatcacttctctgcagcgacgaaaacatctcattccaatcttgaaaagatctcccgcatccttgtcccatacaaataaaataacgatggctgcaactgctccggtaattatgcgcgtcatggcgtcctcgatcagcaccgccaagcgggctggcggcatcatacgcgacgtgctcaagaagggtgacctgggcatagtggacaagggcaagaacgatccgcagacggaggcagatcgctctgcccagcgttgcattatcgcctccttggccaaaaagttccccaccgtcaagatcattggcgaggagggtggatccgatctgaatgtctgcgacgactggctggtgaacgagttggatgaggaattcctgcagcacagttgccccgctgagtggaaggatgtcaagcccgaggactttgtcatatgggtagatcccctagacggcacagcggagtatacacagggtgcgatctggagatacctgtagagctccttatataaaactaaatgttctcctttcatccgcaggacacgttgaacacgtgaccgtcctgatcggcatagccgtgaaggatgctgctgtgggcggcatcattcatcagccattctaccaacagcccgatggcgaaatgggtcgcaccatttggggcctgaagggtctgggcacgggaggattcacggcagtccccgcgccagccggccagttcatcataaccaccactcgctcgcattccaatgccctgcatcagcaagccctcaacgcattcgcatccacagaagttctgaaagtcggaggcgctgggttcaaagtgctccagctgctggagggaaaggcccacgcgtacgtcttcgccacgccgggctgcaagaagtgggacacctgcgcacccgaggccgttctagaggcccagggcggctgcctcaccaacatcaacggcgagcactacgcctacaatgcggatgtggagcacgtgaatcgacagggagtgctggccagcctgggacaggaccatgccgcgctggtggaaaagattcccgccgaggtgcgggcagcagtgggagccaagtgagatagctttgaattccagcactttattagtttatttgcactaaaagtaaacacacataaattaagcaataacaggttagaaatttgaaaattgttaaaactgggctcagaatgcattctttatttatcgaaactgccgctgttgttgctctgtgtgctgctgttggccaccgagttgttcaggtagcgattccgcttggccttggtcattttgcaggagtttacggaggccgcgaagcgcagcgacttgacggactcttggaaacagtcttggaacggcgagacgttgatgaacataagcgttttcgagttgccgcccagcgagggcatcagcaggtgcgtcagcttggagttcctgtacgggatgtggtcctgcttctgcagcagcgccaggattacgttggtgagctccgatagcgagcgattgatgttctttgtctcggtcatccgggtgctcgtcttgggagactcagagccggccaaatccaccaggtttatggaacccacggagatctcttgcttttcggcatggcgtccgatgagctcaagcttggtaaccgcgtgggaacgagaggagcgctcgttgccagctgtcgaggcggtggcacggttcatcttggccgtgtgcatgaggtggcgcaggtgatttggatccagaaccgtctcctccgttatgttggacacgtagatgtcgttcttgttgttcttggccattcgaatctccatgtccttctgctcgttgctcagcagatcgtagagcacctcgttgtagatctccagaaaggtggccttgatctcgtactcccagcccaagttgcgatatccccggatggagtcgaagagcagatccaccgtgcgcggtatgacgcccacactctccggcactccgtccattgtgtaggtcttgccactgcccgtctgtccgtaggcaaagatgcagatattgtagccatccagggccgactggatgagcggcgagaccatctcgaagatgtccgact

SEQ ID NO: 1976 - DNA, 984 bp, DROSOPHILA
aaacatctcattccaatcttgaaaagatctcccgcatccttgtcccatacaaataaaataacgatggctgcaactgctccggtaattatgcgcgtcatggcgtcctcgatcagcaccgccaagcgggctggcggcatcatacgcgacgtgctcaagaagggtgacctgggcatagtggacaagggcaagaacgatccgcagacggaggcagatcgctctgcccagcgttgcattatcgcctccttggccaaaaagttccccaccgtcaagatcattggcgaggagggtggatccgatctgaatgtctgcgacgactggctggtgaacgagttggatgaggaattcctgcagcacagttgccccgctgagtggaaggatgtcaagcccgaggactttgtcatatgggtagatcccctagacggcacagcggagtatacacagggacacgttgaacacgtgaccgtcctgatcggcatagccgtgaaggatgctgctgtgggcggcatcattcatcagccattctaccaacagcccgatggcgaaatgggtcgcaccatttggggcctgaagggtctgggcacgggaggattcacggcagtccccgcgccagccggccagttcatcataaccaccactcgctcgcattccaatgccctgcatcagcaagccctcaacgcattcgcatccacagaagttctgaaagtcggaggcgctgggttcaaagtgctccagctgctggagggaaaggcccacgcgtacgtcttcgccacgccgggctgcaagaagtgggacacctgcgcacccgaggccgttctagaggcccagggcggctgcctcaccaacatcaacggcgagcactacgcctacaatgcggatgtggagcacgtgaatcgacagggagtgctggccagcctgggacaggaccatgccgcgctggtggaaaagattcccgccgaggtgcgggcagcagtgggagccaagtga

SEQ ID NO: 1977 - protein, 306 aa, DROSOPHILA
MAATAPVIMRVMASSISTAKRAGGIIRDVLKKGDLGIVDKGKNDPQTEADRSAQRCIIASLAKKFPTVKIIGEEGGSDLNVCDDWLVNELDEEFLQHSCPAEWKDVKPEDFVIWVDPLDGTAEYTQGHVEHVTVLIGIAVKDAAVGGIIHQPFYQQPDGEMGRTIWGLKGLGTGGFTAVPAPAGQFIITTTRSHSNALHQQALNAFASTEVLKVGGAGFKVLQLLEGKAHAYVFATPGCKKWDTCAPEAVLEAQGGCLTNINGEHYAYNADVEHVNRQGVLASLGQDHAALVEKIPAEVRAAVGAK

SEQ ID NO: 1978 - DNA, 9820 bp, DROSOPHILA
aacagaatgaaggcggccagggcgcaggtgatgatgaagatgacgctgtgcagcgaggacagccaaacgtcggcggtgcgggcgtcatcccagttttgcagcggtgaaccaggcaatggtgtctgttccttggcattctgggggatcaggggattattaattattattattattagtatagagtagatgtgattccagccggcttacatcattcaggttgaggtagaccggcggcagacccgccttgtccttgacgattccaccgcccaacgaataggaggaggaggatgatgatgatgaggaactgttcccagagcttcccgcttgctgggacaccgaaatgggcgaggatgcggataatgagccggatgagaggcccatgctatttggcggttttccgtgcaccggatttgacatatttacgtcttaatctcgagtagtttcccggtttttcttactttccttccgaaactttcccagtcaagttgctctctcgctctcttcgtagattttccgttgctttcctattgtttttgttgtggcttttccgttgtccttgacatttaacgcatttcgatttttcgattgtttggcagcccatgtgcgtggaattcgaaacgaattcggcctgctggcaagcgcactgaataaataataataattataaataattgttaactttgcaacatgaaacgtttgtacaaaacaaaaaaaaagtgcgagcgattatttttgaattttcctaatcaagctctctcgctctctctctctctatcgctatctcgcacgcagtgtgaccatgccaagcatggccaataatataccacagactgagcgaggacatctaccctgtacgtagcctaggtactcatcccgaaaacaaaatctcgcttggcaacactgcgcgcagtgcataaacaacaagaaagaagaagaccgccgacggagagaaaaatcgaagttgcattggtattggtgtctcgccgtgtgcatgtgacagcaagtgcagttagtttctaactaatcgtttcagggatttgggatggcacgcaaagagtagatatcactgcaaatcggacacaaatctgcatcccccgtcgttggactgcgcgatttagcatccggaggctgcggctagcccgctgcgctacacccgccgcaccaccccgccctcacttcgcccacaaatggaggagtcgggtccgccaagcaatccgtctccggttgcgtcacgtggccgcggacgtggtcgcccgccgaaagtggcgctttccgcgttgggaaatacgcccccgcacattaatccatcgttaaaacacgccgatgcagaggcatcgcccacggcgccggaggatcaggattccggacagagcgagtgccggcgcagttcgcgcaagaaaatcatcaagttcgatgtccgggatttgctaaacaagaaccgcaaggcgcacaaaatccagatcgaggcacggatcgactcgaatcccagtaccggccactcccagtcaggcacaactgcagcatccacatccatgtcaacagcaacagcatcagccgcatctgcatcctcagccgcgaccgtgagccgtttgttttccatgttcgagatgagccaccaatcattgccgccaccaccaccgccgccaaccgccctcgagatcttcgccaagccaagacccacacagagtctgattgtggcccaggttaccagtgaaccatcggctgttggtggcgcacatcctgtgcagacgatggccggcctgccgccggtgacacctcgcaagcggggtcgtccccgtaagagtcaactagcggatgcggccattattccaactgtcattgtgcccagctgctccgattccgatacgaactccaccagcacgaccacttccaacatgagcagtgacagcggcgagcttcctggctttcccatacagaaacccaagtccaagttgcgggtctcactcaaacgcttgaaactgggcggccggctggagtcctccgattcggggaactcgccatcgtcctcttcgccggaggttgagccaccagcactccaggatgagaacgccatggacgaacggccaaagcaggagcagaacctgagccgaatggtcgatgccgaggaaaactccgattccgactcacagatcatattcattgagatcgaaacggagagccccaagggagaggaggagcaggaagagggacggccagtcgaggtggaaccacaagatttgatcgacatcgacatggagctggccaagcaggaaccaactcccgacccggaagaagatctagatgagattatggtggaggtgctcagtgggccacccagtctctggtcagcggacgatgaagccgaggaagaggaggatgcgacagttcagagagccactccaccgggaaaggagcctgcagcggattcctgctcttcagctccacggcgcagcaggcggtcagcgccgttgagtggcagcagtcgccaggggaagactctcgaggagaccttcgccgagatagccgctgagagcagcaagcagatcctggaggcggaggaatcacaggatcaggaggagcagcacatactgatagatctcatcgaagacacgctaagtgagtcagaggttacgtcgtccgtgtcgcccactatcgagcacatggtggtggaagaagtcgtagtcgaagagaaccagttggtggatgaagcggatgaaatccttgattccaagcaagaatttgtcattaaaaaagtattttcagagtcagacaatattgctgcaagcttgaacaaagacattttcgagccaaaagtggaaactaaagctacgtgtggcgaagtggtcccacggccagaaatggtcaccgaagatgtttatattacagaaggaattgctgcaactcttgaaaaatcagccgtagtaacaaaaccaactacagaaatgattgcagaaacaaaactatccgatgaagtcgtaatagagccgccactaaaagatgaatccgatccaaagcaaacggaggtagaactgcccgaatcgaagccagcagtaaacattccaaagtccgagcgaattttatccgccgaagtggaaacgacgtcgtctccacttgtgccgccagaatgttgcaccctggaaagtgtaagtggaccggtactattagaaacatcattgtcaacggaagaaaagtcgaacgaaaatgtagaaaccactccattgaagactgaggcagcgaaagaggatagtccaccggccgctccggaagaagaggcatcgaatagttcggaagaacctaattttttgctagaagattacgaaagcaaccaggaacaagtagctgaagacgaaatgatgaagtgcaacaatcaaaaggggcaaaagcaaacaccgttgccagagatgaaggagcccgagaaacccgtcgccgaaactgtgtccaaaaaggagaaggcaatggaaaatccggccaggtcttcgccagcaattgtggataaaaaagtacgcgcaggtgaaatggaaaagaaggtcgtaaaatccacgaaagggactgttccagaaaagaaaatggattcgaagaaatcttgtgcagccgtaactcctgctaagcaaaaagagagtggaaaatctgcaaaggaagctattttgaagaaggaaactgaaaaggagaagtcttcagcaaaattagattcgtcatcacctaatacactggataaaaagggaaaagatactgcccaatggtcacctcagctccaaactttgccaaagagcagtactaagccaccacaagaatctgcaccgtcagtgatctcgaaaaccacatcgaatcaacccgcacccaaagaggaacaacatgcagcaaagaaaggtctttccgacaattcgccaccatcggttctcaaggccaaagagaaagctgtgtccggtttcgttgagtgcgatgccatgtttaaggcaatggatttggcaaacgcccagttgcgtctcgatgagaagaacaagaaaaagctgaagaaggtgccgaccaaggtagaggcaccgccaaaggtagaaccacccaccgccgtgcctgttcctgggcaaaaaaagtcgctgtctggtaagaccagcttgcgcaggaacaccgtctacgaagactcacccaatttggaacggaacagttctcccagctccgattccgctcaagcaaacacttcggctggcaagttgaagccatcgaaggtcaaaaagaagattaatccgcgacgcagcacgatatgtgaggcagccaaggatctcagatcgagctcgagtagcagcacacccactagggaggtggccgccagctcgccagtttccacctcatcggattcctcatcgaagcgaaacggatccaagagaaccacgtctgatctggacggtggctccaagttggatcaacgacggtacaccatctgcgaggatcgtcaacccgagaccgccataccagtaccgctgaccaagcgccgcttctcgatgcatcccaaggcatctgcgaatccgctgcacgatacccttcttcaaacggcgggcaagaagcggggccgaaaggaaggcaaagagtcactgagccgccagaattcgctagactccagttcgagtgcctcccaaggagcaccgaaaaagaaggccctaaagtctgcagaaattctaagtgcggcgctcttggaaactgagtcgtccgagtccacttcatcgggaagcaaaatgagccgctgggatgtgcaaacctcgccggaactggaggctgccaatccgttcggcgacattgccaagtttatcgaggacggcgtgaatcttctcaagcgcgacaaggtggatgaagatcaacggaaggaggggcaggatgaagtgaagcgagaagccgatcccgaggaggatgaattcgcgcaacgggtggctaatatggagaccccggccacaacgcctaccccatcgcccacgcaatcgaatccggaggactcagcatccaccacgactgttctcaaggagcttgagaccggcggaggcgtgcgccgctcccatcggatcaagcagaagccgcagggaccacgcgctagccagggcagaggtgtggccagcgttgcgctagcaccaatcagcatggacgagcagctggccgagctggccaacatcgaggccatcaacgagcagtttctgcgcagcgagggcctgaacactttccagttgctaaaggaaaacttctatcgttgtgccaggcaggtgagtgatcgattgggttccacacgatccgcactagaacttcatccattccataatttctgtgctttcaggtgagccaagagaatgccgaaatgcaatgcgattgctttctcactggcgacgaggaggcgcagggtcatctaagctgcggcgccggctgcatcaatcgaatgctgatgatcgagtgcggaccactgtgctcaaatggcgcgcggtgcaccaacaagcgcttccagcagcaccagtgctggccatgtcgcgtttttcgcacggagaagaagggatgcggcatcacggcggaactgctaataccgccgggtgaattcatcatggagtatgtgggcgaggtgatcgatagcgaggagttcgagcgccgacagcatctgtactcgaaggatcgcaatcgtcactactatttcatggcgctgcgaggagaagccgtcatcgacgccacctccaagggtaatatctcgcggtacatcaaccacagttgcgatccgaatgccgagacgcagaaatggacggtcaacggagagctacgcattggtttcttcagcgtgaagcctattcaacccggcgaggagattaccttcgattaccagtacctgaggtatggccgagatgcgcagcgttgctactgcgaggcagccaactgcaggggttggattggaggtgaaccggactcggatgagggcgagcaactggatgaggaaagcgacagcgatgctgagatggacgaggaggagctggaagccgagccggaggagggccagccgcgcaagtcagccaaggcaaaggcgaagtcgaagctcaaggcgaagctaccactggccaccggtcgcaagcgcaaggagcagaccaagcccaaggatcgcgaatacaaagccggccgctggctgaagccctctgctaccgggtcatcatcatcggccgaaaagcctccaaagaaaccaaaggtcaacaaattccaggcaatgctcgaggatcccgatgtggtggaggagctctcgctgcttaggcgcggcgggcttaagaaccaacaggacacgctgcgcttctcgcgttgcttggttcgtgccaagttgctcaagactcggctggcacttttgcgtgtgcttacccatggagagctaccatgtcgccggcttttcctggactatcacggcttgagattgctacatgcctggataagcgagaatggcaatgatgaccagctgagagaagcccttctggacaccctcgaatccctgcccatcccgaatcgcaccatgctaagtgatagtcgcgtataccagagtgtccaactgtggagcaacagtctggagcagcagttagctgtggtgccgcaggagaagcaggcggctcttcacaaacggatggtagccttgctccaaaaatggcaagctctgccggagatcttccgcatccctaagcgcgaacgaatcgagcagatgaaggagcacgaacgtgaggcggatcgccaacaaaagcatgtccatgccagcaccgctctggaggatcagcgcgagcgggagagcagcaacgatcgcttcaggcaggaccgtttccgacgggacacaacgagcagtcgaataggcaaacccatccgcatgagcggaaacaataccatatgcacgataaccactcagcagaagggcagcaacggagccccagacggaatgaccagaaacgataatcggcgcaggtccgacattggaccgccgtccgagcaaaggcgtacgctgtccaaggagctccggcgcagtctgtttgagaggaaggtggctctggatgaggctgagaggcgcgtgtgcaccgaggaccggctcgagcacgagctgcgctgcgagttctttggcgctgatatcaacacggatcccaagcagttgcccttctatcaaaaaacggatactaacgagtggttcaacagcgacgacgtgcccgtaccggcaccgccgcgcacagaactgttgacgaaggcgctgctatcacccgatatcgatgttggccagggtgcaactgacgtcgagtataaactgccgcctggagtggatcccctgccgcccgcttggaactggcaggtgacgagcgacggtgacatctactactacaatctgcgagagcgcatatcgcaatgggagccacccagtccggaacagcgccttcagacgctgctggaggagaataccacgcagcagccgctgcatgagcttcaaatcgatcccgcggtcctggaaaacgagctcattcaggtcgacacggactacgtgggctcgctcagtgccaagtccctggcacagtatattgaggccaaggtgcgggagcgacgtgatctgcgtcgcagtaaactggtctccatccgactgattagtccacgacgggatgaggatcgtttgtacaatcagttggagtcccggaagtacaaggagaacaaggagaagatccggcgacgcaaggagctctaccgacgacgcaaaatcgaggtcctaccggatgcggttgacgaaattcctgttcctggcaaggcactacctattcagccctacttgttctcttccgacgaggaagaaactaaagtcgcagcgatcgaacagcccgccgctgaggaggagcaggattcactgaacatggcaccgagcaccagtcatgccgccatggcggctctgggcaaggcagtggcccagccgactggattggggacggttggcaaacgtaagctaccaatgccaccgagtgttacggtgaagaagcatcgccaggaacagaggagcaagaaggtcaagaggtgagtttgcgtttggttgattgctatactgttgggcttattctaattacctgtgtgctatcagttcccagagtcccctgaccgcaaccagtgcacgcgaggcccacgagaagttccgctttgagataagcgggcatgtggccaatttcctgcgtccgtatcgcaaggagagctgcacgctgggtcggatcaccagcgatgaggactacaagttcctggttaatagggtgagttgtgaacattcgtttcttgctgcgcatttcctttatctcgactctctttccccgaacagctaagctatcatattaccaccaaggagatgcggtattgcgaggtcagcgggaatcccctgtcctgcacggagtctgtgaagcacaagtcctacgacttcatcaatcagtacatgcggcaaaaggggcccgtctacaagaagccggcggaaaacgattagaaaatcaagaaattgtgttcttctgcggcaccagaaatcgaacctgaaccaaatcccacacggaactagaactttaactttagatacgaatttagttaagcacattcgacccctaggatgcgatctacccctcgtagtgggtagcgttttaagtgggggcagccaaattgtacagttaatgaaatggcgtaagatgtaagtggaaaaattcacaatactttttgtttcttaaaattgtctaaaatttctaataaattcgcattttcattattattttcatcgacatttattagctgacaaacaataaataaaacaacataaaatgttgtgaaattctcattttattgtgattttggtagcaagaaatataaaataattaacatggaaagaaaagagatggtatgctagttatgtatgtcattccaataagaaaactgcttgcacgtaaaactgcttacttcacaaagcgtacagtagctgagagctgtactaaaatgttatccttagtgctttccaagttgtgtactaaaatacatcatattgtgcagttaactgcttgcctgttactaacatgcagtaaaggcgcaagtccaaactgcttggccacttggcgcgcattttgattattcattcaaacatttattgtattcattttgtaaaaatattcctattttggaaattaaataacaaaacttttaaattattaaaatgttatcgaataaaagcaacttttatgtactacttgctcaactaaatttcgtatcgtttcgcaaaattctttatttattcataatctattgagttggatttaatgtgaaaaacacaattgcatacgcattgttgttcggtttttttttctggcatttgaggagcgcttttcggttattaaaaattcgccatcagatcgactgggtagccacaccagaccaacaaaaaatcactccatctctgtgggcggtcgtatctgccggcggcaatctctgttggccagtggaagcgatgggaggaatgtggcaaaagccacgggtaagtggggcatgcaaatctcggggttttcgttagggggggggggggagggtgcagtgtgcatttgtggcggacgtcgatgtggcaaattaaccgcacaaagcggtggcaatatggtgagcgggcgaacacgtgacttggagcattaagcaatttgccagacggattgttggttctgttcattgagcgcctaagcaattgaattagcctttaccctttggacaacagggatcccgatctctggcgcttctctacgattggaggcgattggagtgtactggcagaaattgtcactagtttcaaattgaatctatatct

SEQ ID NO: 1979 - DNA, 7620 bp, DROSOPHILA
caagtgcagttagtttctaactaatcgtttcagggatttgggatggcacgcaaagagtagatatcactgcaaatcggacacaaatctgcatcccccgtcgttggactgcgcgatttagcatccggaggctgcggctagcccgctgcgctacacccgccgcaccaccccgccctcacttcgcccacaaatggaggagtcgggtccgccaagcaatccgtctccggttgcgtcacgtggccgcggacgtggtcgcccgccgaaagtggcgctttccgcgttgggaaatacgcccccgcacattaatccatcgttaaaacacgccgatgcagaggcatcgcccacggcgccggaggatcaggattccggacagagcgagtgccggcgcagttcgcgcaagaaaatcatcaagttcgatgtccgggatttgctaaacaagaaccgcaaggcgcacaaaatccagatcgaggcacggatcgactcgaatcccagtaccggccactcccagtcaggcacaactgcagcatccacatccatgtcaacagcaacagcatcagccgcatctgcatcctcagccgcgaccgtgagccgtttgttttccatgttcgagatgagccaccaatcattgccgccaccaccaccgccgccaaccgccctcgagatcttcgccaagccaagacccacacagagtctgattgtggcccaggttaccagtgaaccatcggctgttggtggcgcacatcctgtgcagacgatggccggcctgccgccggtgacacctcgcaagcggggtcgtccccgtaagagtcaactagcggatgcggccattattccaactgtcattgtgcccagctgctccgattccgatacgaactccaccagcacgaccacttccaacatgagcagtgacagcggcgagcttcctggctttcccatacagaaacccaagtccaagttgcgggtctcactcaaacgcttgaaactgggcggccggctggagtcctccgattcggggaactcgccatcgtcctcttcgccggaggttgagccaccagcactccaggatgagaacgccatggacgaacggccaaagcaggagcagaacctgagccgaatggtcgatgccgaggaaaactccgattccgactcacagatcatattcattgagatcgaaacggagagccccaagggagaggaggagcaggaagagggacggccagtcgaggtggaaccacaagatttgatcgacatcgacatggagctggccaagcaggaaccaactcccgacccggaagaagatctagatgagattatggtggaggtgctcagtgggccacccagtctctggtcagcggacgatgaagccgaggaagaggaggatgcgacagttcagagagccactccaccgggaaaggagcctgcagcggattcctgctcttcagctccacggcgcagcaggcggtcagcgccgttgagtggcagcagtcgccaggggaagactctcgaggagaccttcgccgagatagccgctgagagcagcaagcagatcctggaggcggaggaatcacaggatcaggaggagcagcacatactgatagatctcatcgaagacacgctaagtgagtcagaggttacgtcgtccgtgtcgcccactatcgagcacatggtggtggaagaagtcgtagtcgaagagaaccagttggtggatgaagcggatgaaatccttgattccaagcaagaatttgtcattaaaaaagtattttcagagtcagacaatattgctgcaagcttgaacaaagacattttcgagccaaaagtggaaactaaagctacgtgtggcgaagtggtcccacggccagaaatggtcaccgaagatgtttatattacagaaggaattgctgcaactcttgaaaaatcagccgtagtaacaaaaccaactacagaaatgattgcagaaacaaaactatccgatgaagtcgtaatagagccgccactaaaagatgaatccgatccaaagcaaacggaggtagaactgcccgaatcgaagccagcagtaaacattccaaagtccgagcgaattttatccgccgaagtggaaacgacgtcgtctccacttgtgccgccagaatgttgcaccctggaaagtgtaagtggaccggtactattagaaacatcattgtcaacggaagaaaagtcgaacgaaaatgtagaaaccactccattgaagactgaggcagcgaaagaggatagtccaccggccgctccggaagaagaggcatcgaatagttcggaagaacctaattttttgctagaagattacgaaagcaaccaggaacaagtagctgaagacgaaatgatgaagtgcaacaatcaaaaggggcaaaagcaaacaccgttgccagagatgaaggagcccgagaaacccgtcgccgaaactgtgtccaaaaaggagaaggcaatggaaaatccggccaggtcttcgccagcaattgtggataaaaaagtacgcgcaggtgaaatggaaaagaaggtcgtaaaatccacgaaagggactgttccagaaaagaaaatggattcgaagaaatcttgtgcagccgtaactcctgctaagcaaaaagagagtggaaaatctgcaaaggaagctattttgaagaaggaaactgaaaaggagaagtcttcagcaaaattagattcgtcatcacctaatacactggataaaaagggaaaagatactgcccaatggtcacctcagctccaaactttgccaaagagcagtactaagccaccacaagaatctgcaccgtcagtgatctcgaaaaccacatcgaatcaacccgcacccaaagaggaacaacatgcagcaaagaaaggtctttccgacaattcgccaccatcggttctcaaggccaaagagaaagctgtgtccggtttcgttgagtgcgatgccatgtttaaggcaatggatttggcaaacgcccagttgcgtctcgatgagaagaacaagaaaaagctgaagaaggtgccgaccaaggtagaggcaccgccaaaggtagaaccacccaccgccgtgcctgttcctgggcaaaaaaagtcgctgtctggtaagaccagcttgcgcaggaacaccgtctacgaagactcacccaatttggaacggaacagttctcccagctccgattccgctcaagcaaacacttcggctggcaagttgaagccatcgaaggtcaaaaagaagattaatccgcgacgcagcacgatatgtgaggcagccaaggatctcagatcgagctcgagtagcagcacacccactagggaggtggccgccagctcgccagtttccacctcatcggattcctcatcgaagcgaaacggatccaagagaaccacgtctgatctggacggtggctccaagttggatcaacgacggtacaccatctgcgaggatcgtcaacccgagaccgccataccagtaccgctgaccaagcgccgcttctcgatgcatcccaaggcatctgcgaatccgctgcacgatacccttcttcaaacggcgggcaagaagcggggccgaaaggaaggcaaagagtcactgagccgccagaattcgctagactccagttcgagtgcctcccaaggagcaccgaaaaagaaggccctaaagtctgcagaaattctaagtgcggcgctcttggaaactgagtcgtccgagtccacttcatcgggaagcaaaatgagccgctgggatgtgcaaacctcgccggaactggaggctgccaatccgttcggcgacattgccaagtttatcgaggacggcgtgaatcttctcaagcgcgacaaggtggatgaagatcaacggaaggaggggcaggatgaagtgaagcgagaagccgatcccgaggaggatgaattcgcgcaacgggtggctaatatggagaccccggccacaacgcctaccccatcgcccacgcaatcgaatccggaggactcagcatccaccacgactgttctcaaggagcttgagaccggcggaggcgtgcgccgctcccatcggatcaagcagaagccgcagggaccacgcgctagccagggcagaggtgtggccagcgttgcgctagcaccaatcagcatggacgagcagctggccgagctggccaacatcgaggccatcaacgagcagtttctgcgcagcgagggcctgaacactttccagttgctaaaggaaaacttctatcgttgtgccaggcaggtgagccaagagaatgccgaaatgcaatgcgattgctttctcactggcgacgaggaggcgcagggtcatctaagctgcggcgccggctgcatcaatcgaatgctgatgatcgagtgcggaccactgtgctcaaatggcgcgcggtgcaccaacaagcgcttccagcagcaccagtgctggccatgtcgcgtttttcgcacggagaagaagggatgcggcatcacggcggaactgctaataccgccgggtgaattcatcatggagtatgtgggcgaggtgatcgatagcgaggagttcgagcgccgacagcatctgtactcgaaggatcgcaatcgtcactactatttcatggcgctgcgaggagaagccgtcatcgacgccacctccaagggtaatatctcgcggtacatcaaccacagttgcgatccgaatgccgagacgcagaaatggacggtcaacggagagctacgcattggtttcttcagcgtgaagcctattcaacccggcgaggagattaccttcgattaccagtacctgaggtatggccgagatgcgcagcgttgctactgcgaggcagccaactgcaggggttggattggaggtgaaccggactcggatgagggcgagcaactggatgaggaaagcgacagcgatgctgagatggacgaggaggagctggaagccgagccggaggagggccagccgcgcaagtcagccaaggcaaaggcgaagtcgaagctcaaggcgaagctaccactggccaccggtcgcaagcgcaaggagcagaccaagcccaaggatcgcgaatacaaagccggccgctggctgaagccctctgctaccgggtcatcatcatcggccgaaaagcctccaaagaaaccaaaggtcaacaaattccaggcaatgctcgaggatcccgatgtggtggaggagctctcgctgcttaggcgcggcgggcttaagaaccaacaggacacgctgcgcttctcgcgttgcttggttcgtgccaagttgctcaagactcggctggcacttttgcgtgtgcttacccatggagagctaccatgtcgccggcttttcctggactatcacggcttgagattgctacatgcctggataagcgagaatggcaatgatgaccagctgagagaagcccttctggacaccctcgaatccctgcccatcccgaatcgcaccatgctaagtgatagtcgcgtataccagagtgtccaactgtggagcaacagtctggagcagcagttagctgtggtgccgcaggagaagcaggcggctcttcacaaacggatggtagccttgctccaaaaatggcaagctctgccggagatcttccgcatccctaagcgcgaacgaatcgagcagatgaaggagcacgaacgtgaggcggatcgccaacaaaagcatgtccatgccagcaccgctctggaggatcagcgcgagcgggagagcagcaacgatcgcttcaggcaggaccgtttccgacgggacacaacgagcagtcgaataggcaaacccatccgcatgagcggaaacaataccatatgcacgataaccactcagcagaagggcagcaacggagccccagacggaatgaccagaaacgataatcggcgcaggtccgacattggaccgccgtccgagcaaaggcgtacgctgtccaaggagctccggcgcagtctgtttgagaggaaggtggctctggatgaggctgagaggcgcgtgtgcaccgaggaccggctcgagcacgagctgcgctgcgagttctttggcgctgatatcaacacggatcccaagcagttgcccttctatcaaaaaacggatactaacgagtggttcaacagcgacgacgtgcccgtaccggcaccgccgcgcacagaactgttgacgaaggcgctgctatcacccgatatcgatgttggccagggtgcaactgacgtcgagtataaactgccgcctggagtggatcccctgccgcccgcttggaactggcaggtgacgagcgacggtgacatctactactacaatctgcgagagcgcatatcgcaatgggagccacccagtccggaacagcgccttcagacgctgctggaggagaataccacgcagcagccgctgcatgagcttcaaatcgatcccgcggtcctggaaaacgagctcattcaggtcgacacggactacgtgggctcgctcagtgccaagtccctggcacagtatattgaggccaaggtgcgggagcgacgtgatctgcgtcgcagtaaactggtctccatccgactgattagtccacgacgggatgaggatcgtttgtacaatcagttggagtcccggaagtacaaggagaacaaggagaagatccggcgacgcaaggagctctaccgacgacgcaaaatcgaggtcctaccggatgcggttgacgaaattcctgttcctggcaaggcactacctattcagccctacttgttctcttccgacgaggaagaaactaaagtcgcagcgatcgaacagcccgccgctgaggaggagcaggattcactgaacatggcaccgagcaccagtcatgccgccatggcggctctgggcaaggcagtggcccagccgactggattggggacggttggcaaacgtaagctaccaatgccaccgagtgttacggtgaagaagcatcgccaggaacagaggagcaagaaggtcaagagttcccagagtcccctgaccgcaaccagtgcacgcgaggcccacgagaagttccgctttgagataagcgggcatgtggccaatttcctgcgtccgtatcgcaaggagagctgcacgctgggtcggatcaccagcgatgaggactacaagttcctggttaataggctaagctatcatattaccaccaaggagatgcggtattgcgaggtcagcgggaatcccctgtcctgcacggagtctgtgaagcacaagtcctacgacttcatcaatcagtacatgcggcaaaaggggcccgtctacaagaagccggcggaaaacgattagaaaatcaagaaattgtgttcttctgcggcaccagaaatcgaacctgaaccaaatcccacacggaactagaactttaactttagatacgaatttagttaagcacattcgacccctaggatgcgatctacccctcgtagtgggtagcgttttaagtgggggcagccaaattgtacagttaatgaaatggcgtaagatgtaagtggaaaaattcacaatactttttgtttcttaaaattgtctaaaatttctaataaattcgcattttcattattattttcatcgacatttattagctgacaaacaataaataaaacaacataaaatgttgtgaaattctcatttta

SEQ ID NO: 1980 - protein, 2362 aa, DROSOPHILA
MEESGPPSNPSPVASRGRGRGRPPKVALSALGNTPPHINPSLKHADAEASPTAPEDQDSGQSECRRSSRKKIIKFDVRDLLNKNRKAHKIQIEARIDSNPSTGHSQSGTTAASTSMSTATASAASASSAATVSRLFSMFEMSHQSLPPPPPPPTALEIFAKPRPTQSLIVAQVTSEPSAVGGAHPVQTMAGLPPVTPRKRGRPRKSQLADAAIIPTVIVPSCSDSDTNSTSTTTSNMSSDSGELPGFPIQKPKSKLRVSLKRLKLGGRLESSDSGNSPSSSSPEVEPPALQDENAMDERPKQEQNLSRMVDAEENSDSDSQIIFIEIETESPKGEEEQEEGRPVEVEPQDLIDIDMELAKQEPTPDPEEDLDEIMVEVLSGPPSLWSADDEAEEEEDATVQRATPPGKEPAADSCSSAPRRSRRSAPLSGSSRQGKTLEETFAEIAAESSKQILEAEESQDQEEQHILIDLIEDTLSESEVTSSVSPTIEHMVVEEVVVEENQLVDEADEILDSKQEFVIKKVFSESDNIAASLNKDIFEPKVETKATCGEVVPRPEMVTEDVYITEGIAATLEKSAVVTKPTTEMIAETKLSDEVVIEPPLKDESDPKQTEVELPESKPAVNIPKSERILSAEVETTSSPLVPPECCTLESVSGPVLLETSLSTEEKSNENVETTPLKTEAAKEDSPPAAPEEEASNSSEEPNFLLEDYESNQEQVAEDEMMKCNNQKGQKQTPLPEMKEPEKPVAETVSKKEKAMENPARSSPAIVDKKVRAGEMEKKVVKSTKGTVPEKKMDSKKSCAAVTPAKQKESGKSAKEAILKKETEKEKSSAKLDSSSPNTLDKKGKDTAQWSPQLQTLPKSSTKPPQESAPSVISKTTSNQPAPKEEQHAAKKGLSDNSPPSVLKAKEKAVSGFVECDAMFKAMDLANAQLRLDEKNKKKLKKVPTKVEAPPKVEPPTAVPVPGQKKSLSGKTSLRRNTVYEDSPNLERNSSPSSDSAQANTSAGKLKPSKVKKKINPRRSTICEAAKDLRSSSSSSTPTREVAASSPVSTSSDSSSKRNGSKRTTSDLDGGSKLDQRRYTICEDRQPETAIPVPLTKRRFSMHPKASANPLHDTLLQTAGKKRGRKEGKESLSRQNSLDSSSSASQGAPKKKALKSAEILSAALLETESSESTSSGSKMSRWDVQTSPELEAANPFGDIAKFIEDGVNLLKRDKVDEDQRKEGQDEVKREADPEEDEFAQRVANMETPATTPTPSPTQSNPEDSASTTTVLKELETGGGVRRSHRIKQKPQGPRASQGRGVASVALAPISMDEQLAELANIEAINEQFLRSEGLNTFQLLKENFYRCARQVSQENAEMQCDCFLTGDEEAQGHLSCGAGCINRMLMIECGPLCSNGARCTNKRFQQHQCWPCRVFRTEKKGCGITAELLIPPGEFIMEYVGEVIDSEEFERRQHLYSKDRNRHYYFMALRGEAVIDATSKGNISRYINHSCDPNAETQKWTVNGELRIGFFSVKPIQPGEEITFDYQYLRYGRDAQRCYCEAANCRGWIGGEPDSDEGEQLDEESDSDAEMDEEELEAEPEEGQPRKSAKAKAKSKLKAKLPLATGRKRKEQTKPKDREYKAGRWLKPSATGSSSSAEKPPKKPKVNKFQAMLEDPDVVEELSLLRRGGLKNQQDTLRFSRCLVRAKLLKTRLALLRVLTHGELPCRRLFLDYHGLRLLHAWISENGNDDQLREALLDTLESLPIPNRTMLSDSRVYQSVQLWSNSLEQQLAVVPQEKQAALHKRMVALLQKWQALPEIFRIPKRERIEQMKEHEREADRQQKHVHASTALEDQRERESSNDRFRQDRFRRDTTSSRIGKPIRMSGNNTICTITTQQKGSNGAPDGMTRNDNRRRSDIGPPSEQRRTLSKELRRSLFERKVALDEAERRVCTEDRLEHELRCEFFGADINTDPKQLPFYQKTDTNEWFNSDDVPVPAPPRTELLTKALLSPDIDVGQGATDVEYKLPPGVDPLPPAWNWQVTSDGDIYYYNLRERISQWEPPSPEQRLQTLLEENTTQQPLHELQIDPAVLENELIQVDTDYVGSLSAKSLAQYIEAKVRERRDLRRSKLVSIRLISPRRDEDRLYNQLESRKYKENKEKIRRRKELYRRRKIEVLPDAVDEIPVPGKALPIQPYLFSSDEEETKVAAIEQPAAEEEQDSLNMAPSTSHAAMAALGKAVAQPTGLGTVGKRKLPMPPSVTVKKHRQEQRSKKVKSSQSPLTATSAREAHEKFRFEISGHVANFLRPYRKESCTLGRITSDEDYKFLVNRLSYHITTKEMRYCEVSGNPLSCTESVKHKSYDFINQYMRQKGPVYKKPAEND

SEQ ID NO: 1981 - DNA, 13804 bp, DROSOPHILA
ctgcaatccgaatgcttgaatcataggctaagtgaactgtgtaattaacccaaactagcccatctctgtgtacatttgtctgcctatcgaaatagtgagaactcgtatgttgtctggaattcaaatgaatttgtgtaaataaacggaatttttggaattttcgaatttctctgctttttggcattcggcaggtaatcggatacagaggccacaaacgtttctcgcataccaagtacttgtgaagaagttaagcagcttttcatctgagtataaatatctggttcttcatgtcaccttttgcatctgctgaattatgtgtaacctaatcacatttacatatattattgcccactccgtcataaaaaagcagaggaaaacggcatttgtatttatcttaattctggctgaaaacccaaatgtttcccccaataaacaataattcctgcgcttatccccgctgagtgttagccaaaaaaagcatcaggtttcatgcaaaacacacaagcacacctgaaacattgttgccaaaaaaaaaatacgtacacgttctgaaacttcgaacgttcatcatcttttcgagacacacgacgcatacaaagtgtgtttagagtggcgcataaatttcaaagtgccacgcgtcatcaaaatcaaatgccagccgcagctaccactccctccaacttggccaaggacctcaatttacatatatagaagccccaaaaaaagagcagtactggaagcggcaggccaagcggcaaaaagttgtggcccaaatcaattgatacgacatcaaattgaatttataattctttcgtttatccgccgacttgtgtatgtttgtatctcaattgcctttgatgctcctggcttgcgactttacgcacgttttcaccagaaagaacttaagccccggagggtcagtcatggttgcttcattctaaggacgcttcattgactatatgcaaaagctattctcacaaataacaagcgcctcccacttaatttgcctaaataactttattccttctttacggataaatacaagtgtgtaactagaatatacggaaggcatctagtggacctatgtagatttatcacccgtgtccatgccacaatcacatttagtttcgatgctttggccgctggggactcgtgctggcaatggagctaatgtcggaaacattatccctgcccaagtgcccgcccttctcgtccagatcgaccacgtggatgtcgaaattcgaattatcggagcgcacaccatctgaggcacgagtgttttcccggttgccgccctccacggagaagggggcgtgggtggtgggcttataggtgggtgtaggagcagttggtgctgatttcttaggaggagcagtgggagcagatggtgccgagttcgctatcagcttgctgggacacaatggaagctctcggtttcggaattgcgaaagagcagtgtgggaaactcctggagttggagtcggagtgggagctggtgaggatttcctgctgatcttcagctcgggagctgtgagagacctggtgttattggcggccattgcccgggcaggcactgtcttaagtggtggccgccagatgggcctaattttaggtttttcactatcgctaatctcagcactgatttggttgagtagctccagcaaagtgctcgtcttctcatcctcgaactcgatgcgaatcggtgactcccgaccggagggacaacctggattgagcattataagcctggaagagaatggatcattaatagtagattttactaaaccaatgagtaataatcccacctcttggcctcttcgatggccctgcccagattctggaggctcttccgctcgtttttggtgcagcgacctatttgggaatccttggcagcacgaagcaccacgttccacttgtgggtagtggactgaagaagtacggtgcgggccactcgctggaatcgctccttggcggtttccttggctggctttgagggtatggactccaccttgatctcctgcatttctccctgcccgtttacattcccaaaggcatcgagctcacagccattttgcactggcgccacctggaagcccttcatcaagcgccgttcccacactttgatacgccgaggtcgtggttctgaaaggatcctcgacatggtacttcatagatttataaagagacgtcaacttacgcctctcctttttgttggccgaggaaacatccattccgctgttctcgaatatctcgagcatctcataacgcatcgtattgatctcactcttgacctcattgatatcgtcctccgatacgggattattctcgaacttgcgatgcatggcggccacatatcgccaaaccagggagcgcattatattatcatactcgctaaactgctcctgctcctttcgtttctgttgaaatgaaagaaatacacaccaataaataggacattaaagtgctctttaaatatatcgtgtgagttattgcagatttattttcaacgaaagcttctcttgttataaacggatctttaatgcttcactttctccacggactcaccttggagcgttgacgatcgatggtcttgctagacttgcggaaaatcctgatgacccacttgacggagggcaggacattgaagggtggcggcagggtggcactgtcctcgaaatagctcatccacaacttggttcgggcaaacttccactccgtgtccgagtgctcctggaaaaaacaaaagagttgaatagcccttacataagagttgctgaaggggtccgaacttacatcaatcatggcatacgaattggacatcatggcgatgagcagattcagcagcacaatcacgttaatgacgctgtacgagccgaacatgagcagtccccagaatcgcgtatacgacttgatgccactgagctcgaagtcgtccagtccgaccatcccaaagctggcccaaaagagcgactgcgaggactcgaaaaggctgcgggaacggatatggggacattgaatgagtgggcaccaactgaccggcggctaattggcctgctgactggacttacttgccaaaccggcgccatttcatgcaggagtctccgtgtgagccccaatccgcctcgccacccggcaggacatagcacttgctcttctccagggcggcaaagtaccagagcagttggttcagtccacaggcgaaggcgaacagcaccagggtgtagataaagaaaaattttactatatcgatgaccatgcgacctagggagatctgcagcggacccaggtgcggattgatgctgaacaggtgcaccagcttcaaggccgagaagacattggccgccgcaaagagaccttcggctattagttgcgggtcaaaatcgtgccatttctcgcgtggtatgtaagccatctgcggatcccttgctatttctgtggcctgctggatgtaggcaaaggctctggaggagagtagtaaaggcattataaagtagatttcacaaaagcacattttaagctcaccttaaacacatcacactcacgtagagactgttgcgcagaaagtcgatgaagttccacatgttgcgcaaataactcttcatgcccacggcaaatatctcctgcacctcctcccacacgaacccaatcacgtacatcaccacgatgagctccagcttgctgggtgtctggcctcgctgacgcagctcctgctccgccagctccttcttcatcctggtcgtcccgaagatgcgtacaaagtcatcgtccgctcgctgagacaccagaatcaagatgactgcaaggcaaacaacaatgagtccccaactcggtgtgttatcataaggggagctgaaggagaaggagctcttaatcggagggagacgcctcctcaaagtaaagttatttcttataccctgcagtttttcacatcacatttgattaatgacaaagatttgtaatgatatacatttaaagataaagggtacttaatatatttgattacatttgaactgttgaaacatagtagaaaacatgtttctattctaattgcctattaagcttagtaccttaattacttttttaataaagttcattaataaataatattagttattaaaatagaaaaagtttgatactgaatgcttcaatcccactgagggtacctgtccattgtgggcttctcctccaatggagctcatgctcatgtttgctttgtgcaccgaccgcactcgacatactcacacaggaagaacaaataggaggaggcatggatcaggaatttcataaagggcttgcgcatcaactggcccgtccggcaattcggggcgcacatgtagatgaggcagtagagcgggaagagcacggccacctgggcgatgcagatgactttgtccacaatgctcttgcgccggaatccggggaggccgtcataccaaatcgaggacagtaattgctgaatattcgagtgcgcaacgaactatcgcaggaaatggagaattttagcagcagaaccacgtcggagaaacatacctttttttgcttgtaggaaattgcctgcaccaggcgggtcaggctcatccggtcgccgggctcatagctcgacatctgcggatcgtagttcaggatgatggccagctcgttggaggtgcgcgtctgatccagcagatccacggcgaacttctggcactgccttcgcaggtccatgtactctgacttgcactcctgctcggtgagggccaggttcctcagttcccaggacaactggaaggccgtgatgatggggtcgttggaggttaggcagatcagcgatggactgcacagagcccggtagatgttcacccgggagagggagtgcctcagagagtcctccgcggtcaggcggacgcactcctcacaaccgcaactatatttaataatgtgattaataatgggatatgggacccatgttagatgtaccagctcaccgtatatcatgtggcactggcaccgctgctccgcgatccaacagaatgcgaagtatctcaaagttgttcttgtgggcggccagcatcagaggcgtgatatccggcgcaaacatagccgtgtttatgtctactttttgccaactctgtggaaagaaaaaatatattcacttcaatatatataataattcaatgctaaaaaagtattgcctacaatatccagtaagcaacttgatatcagatgtgcgttgcacgcaacattttataaaaaatattactttcaatgaagtcaaataatcatgaaagattttattcagtaagcaacttgatattacttgttcgttacacgtaacatttaattaataagtaagcatacaattagtgaaataatcgggaattactttaatcagcacgaaaatcgattttagacctttctacacgttacatttttaaaaaaaaaatttacatttattgtaaagcacataaagttattgtagaaatcggaattccacttaatacacttgtctactgcctcacatgactgaactacattttgtcaatctcggtggctgttcctccaaaatatcctaaacttattccaggaactgctcaatggcccactcgaagagggccgtcttcatcgttttgtggatgttattaagcctgttaaacgttttattgcatatgcgatacaatagtaattttcacgctccaacagcgcccaatggctgcctaatgaagcgtgcctgtgtgcataaatatgaggccgacggagcccagacgactttatttgcaataagcgtaaaccgtatcctgtcctctgttctccgtatgccggagaggtcctcaatgtactggattttgaggggatgtggacggatgtgggcgaatgtgggcgaatgtggatggatgtggttggatgtgggggttcttggtcgttggccgcttatcgcacactcccaatcactcgagagtcgagatcctgcgagtacgtgcccaatggcgaagatgatcccgatgggtgggccactccggccactccaagcataccatccatccaaacgccccacgctcctcgcacggaaactgattaaaatcgtgttagcttcaacttacagggcctcaacgcctacggacgataatgtgggctacaaattagctgagcacagcagacaaaacaaaggatacactgcgaaaaaaagttccaaacgtagataaaggacctaaacccccattgtgaataatgtgtatctcagtgaattaaaactatcaaattataaatataatatctttaagtaaatggtaaactgttatctaatttttaccctatatctgaactgttgctcaaaataaaatatttgtttgaagaaaaaacagcaacggctataaacaaataacaccactgccaaattattgtagaatgatcttaataaaagtatctttagctactaaaactcttgcttcgttctttgttcttttgtactgctttaattaaatggtatagtagcattcgatttctccaggtgtctgtgtaatgacttacgtagggctcgccctccttgtagataagctcctcgtgctcgagcaggagctccacagcctcgacaaactccgcattgatggcgtgcagtagggcgtccttggtctccacccccatgacgacgagcagctctaccatctccaggttctcgttgtctatcgctagggtgagggcccgacggcccaatgggtccatgcagttgatgttgatgtgctgatggcgcagcgccttctgcaggatcctgcaattatttgaatttacttaataaagagggtggcattgctgctaattggggctaggcgcccaccgaagggtccacaataacttttcttttcttctcctgtgcacagatttccgatgccccaagaattcccgatgtcaagtcaaaagttggagtccaagtttctaattacatcgcggccgcagccttcaaacaaactttcccaatcaattgggcgccgaaaaagggactaatatcaaatttttatttatttatttttttttttttgtgttttacgttaccgcgtcattcttaaatgtcgtgaaattatttggccaccctcgtgtacgtggaaattgccaaggacttaagattgtaaagatttataggtttattttaatttgatgtcttagtaagcgtttatatttttggtttttccagggctgaaattgttgtatttgaaacagctgaataagatgtgggatacgttatcaacgttaagttggtcattttatttaaagtataattgtcaaatgcgtttttgctaagaagtcttgtaattattttgatttctgtagacttattgacattagacatttgggatttttaaaccatagtttttttaatgtgcctgagaaaagtgtgcagtatcgccgctgtttgtttgcagaaaattctgtttatttcttttccctgtctttttaagtgaatttcagtcgtggcatctttaatgcttcaacttactacggtgaaaattcctttggtcgatgcatttttagcggccaggtccacgagattacatgaaatgtggtggtccaatccaatttttattagcctttctgttatcttaaacagaacgcttatgagacatatacataggtaaaaagcttgaaaccactgaagggtatgctttttttgggtatcgggacagctttgatctctggtttgagctgataaccatattctgttaagcagattaaatagatccgcttttatattgttttatattgtcattgcgcgagtctggctttctgtttgctagatagattagaaagtccattcattcaaatggatttcgagtatgtagaaacaatacagttattgggtcgggtgatattgctttagtggattgagtgtttttcaacatttttaggaattcatcttcttctggagcccatgcgttgcaagttcgtttaatctgtttgtattttttttttttaatttttgatgctgtcttagatttaaaggcttttggaaatttcttctacaaaggtctggaaaattgatatttttttgtttcttatgaaattttgaagagtcttttcagctgctaaggtcttacgtgcatcttcataccttttggtacaatcaaatttctgcctcgctgcgtttcgaagtcggagtaatttttcttcttctgagcaccatcacttttttggttcgtatttgtttggtcctgcgattttaattgtgtttgcaccggttatgtagtccaatgattgtttaatggagtctaagcttgaaaaatgtacactttcaaaggcagaagatttttttttttatgttgtgaaatttgtatttatcttattaataataacttcaatcgagaagtgattgctgttaaaaattttggacttggaggagctccacgaaatatatcaaattttccaacactgcagtgtacattgcctggcaattaatcgaaatctagttatcctggcgttgatgtgtcaaaactagttttcacctgccagtgtttaaggccaaaaatctttgattttacgaacgttcgtcaacataaattgttgtactaaattcaaagaaactaaatccgcttccaagacgcgattacagtgattgcacactacacccaatattaggcgattaaattatttgtacgctccaacgattaaaaaactcaatacccaatggatgccgccgagggtcaaagcttggtgatcaaaatggcgcaaaagaacaagggtgagccaatagccaagtgtgttctcggaagattcgtgtaggaaaagtatgttcgttaaatcttgtagagacccagactgtgaagctggtgcccggaggcggtctggtcaacaactggtttgccccggctacgtatgggccagcagggattccatttggggctagtcccatgatcccaccgccgcccgttccgaatcacagcgtatcgtgccagttttacatggaccgggaggagcagctgtaccgccgcgcctgccagatgaagggcatccgggtggagcgggtctctgagatccgcgaggaggaggacgactcgaacggctccgaggaggagccttcgaagggcatccgctaccgctacaccctggacgagatgaaaagcttcaacccataccgttttatcaacttttaaatgttcccaaaacgtcccaaatagccgtcatagacgtcatagccgtcacactttcacttttacccacatcgcaccgtcagcacctcaatattcaagttgatttaagatccataactaggtctagcttcgccaccctacccacataagatgtcagcttataggtttatcttgcatgcctaaaaatcgcaaggagcatcacacgaagaacaggaacccaggacactgcccatttgcttgttgttgccgtatttccatgtagactcaagatccaagactagcactaacttcgccactacttccacaatttcacattagatgcaagattatatggacatcgtgcatgcctccaaagcgtattgggaatcacaaatgaaacaggaaccccggacacggctcatttgcttgttgttaccgtatcactcgcccgatgaaaacaataaagaattgttcataaatgacatcctgggatgtcaacaaaaagtaaggtttagttgtgctttcaggtaagggaacttaagttatccgaaaagttgcttttcaataagattcgtttctcgaattgattgtgcatgttaacagctttaagtggcaaccgaaaagtatttggataatttggcttatctcttattcattgccagcaaacggaattaatcgtacatttgttaaagcaaagccgtaaacgagcgtaaagtatccgggtcgaaggcctcatattgcttattaagtggctgccgggatgccagttaggtaaccattttgaggcccgcggcagacgagtgtgcaaataattgaacccaccaccagcaccgcatccaaagaacccaaggaggctcccgatgggatttatggtacctgtgcgacccagcccagtcaacacctgtgttaccctgggcgaagccaccattggagctcgtgatacccctctaaaaatgtcagggtttttattcgaacaccctacactcggataaatgtggtagtgtgtttaactatttcttttaaattgaaggctaaatatatcaatatacattaggttctactcgattgatacattcattagctaagcttgtacattaactttgaatactaatgctcatccaacacctgattgtggtaagagtttcttgcagtgtatccctcccgcccaagatgccatacagaaacaccacccaccccccccccctccctgctgggcatcggaggcgtgaaaagcgctactcacctgcgcacattcggcatatcgccgcgctcgacagccagcaggaacttcttctcctcgagcagcagaggctgtggtaatcccagcggcacacagcacccgcccaccgatttgggggcggaggaggcgtggctgacgccagacgatacctggcataatttaaagagacaggtgagcaggagccacatacgtacatgccgatgtggcgagggggaaatcgtgtatgcggaattgcaaataaataaaaaataaacatacaagaaaattaagtgcaaagtggaggatgctgggctgattgtctggcttccatctaaatggcattggaggcgtttaaggtaagcggcgtttagctaatactggcggctttaagacatgctacttgctggatacggatctggatcgggatcctggatgggtttctacttacgcccgtcggcagcttctttttgcgacccattctagagttagtgcacttcacttaaccgaacgccagcagttcgtaactagtattccatgtaccaagtccagggttcagagttcaaaatccgacttcatgtcgcagggctttgcacacttgcagtgaaaagtgaacgatatttacatatatggcatatatatttatatacacaatggcaaagccaaaaaagtccaatactaagccgggccacatgcaactttcaagttgattttgcttttgtactcatagttgtatagtccatagttatatgtccaactgggtgtgcttgtgtgtgttggtgtgtgtgtgtgtgtgtctggtggtttttgacttggtttatggtttctggtttccggcgtgcaaaaagtttctatttaagctgtttataatgtttttctttttatttccgccactgaccgagctggctaaaccctttttaagtgccatctgcatgggcaagatttaagttttgccaatttagtgagttgattagacactgtgcagtttcactgtttcccgactgttactggtcaattccaaaggccacactgaacaccaaattcgcgagcacttattgcaccacttatgaccaattgttcaatcggctttctgttttgatttacatttttattgcactcatctcattagcaacgaactgcagtttgtattagttgttgctgctctcattggattgttcacatcatcgccaatcgtttctcccattagaattaatttctttgtttcccaatattttcccacacccgatgaaaatatttttattttccgctgccttcctccgcatgtgtgaacacaatgccaaaatgaatatttaaggagcttttttcgataatccgcaaagaaaaaatgcattccgtctacatgcttttgctttaaactggctttatgctcctgcggatgcggatctgcatgcggatatggatgcggatgctgcagatgcatttaaaagtgtttgggctggtcataaaaaatgcaagtgctttgtatgcgcggcaggcaaaaactcggaaccatcatcatggcggttgttccataaaaaacacttccggtaccaacaaaaggtggttctgactaccccaggagccccgatggtgcattgtttaattaacttaatagaaatataagtgcggaggacgggcgaaaatgcggacggacataaaaatgtcgcaataaattcggttttatccgccacttcatgggaagcgtttataaatggatttatagctgttcacctgcacagcaggtgcatactgcgactgcccatcgaaatgggattatatctgcacctgtatatattataacaagtataaactattcggttaacatacgatgtaaaatgcatatgatatttcactctaatttctccctctgcagccgagatgtgttaattctgcctggcaccgatcgaagtatcataattttgtcgcaagcgcactggagttcattaaaactagaacaaattttgagtattttacagagttcataaaaacgaagggcttatcgcgatggcagccagttgaatcgaaactccagcagtcacagaccacaagctccgcacacacagccccaacttgacaatcaacggaagaggtaggagcaacctgcagctgccaggagcaaccaggagcagtcaggagcaaccaggagcacaatgaatgaaggatatagccacgtaattcagttggctcacggactgcacttaagccacttataaccaagcgtacggatacgtacttcttgcattccggcacataaaaacgtgtgcaattgttcgactcgctggcacaatggacgttggaatttcatgtgaccggcttaggtgagaggactgcgactatgaattgtatgctggcatatactttataacaatacgtttggccaccgaactcccgaattcccgtacaatgtgtgttgtagtttatgtatatctgaatttcagctcttttgaaggcgaaaacccgccgagagacaacccgcgacgcagcccgaacgtgtgccacctgcgaaatttacacgctgctactaacgcgcagaaatttatacctttcccgagggccgagcggcgatgtggctaatttaattagactaaaacgtcaaatatttgtcacccatcgcatggatacgcctggaggttgtccgtgcaacatttatccacacatatatatatatatatatttctataggtttatatatacgtttgtggtgttatgaattgtggaggtcgagggctgaaacacagtatcaacaagttttcgccaagttcgcctaaggggattaggacccaaacatatgtaggggctggtgctgaggtgggactggtggtggaggtgggggccacgatccagacggcgactgtcggcaattgaattacaactaatttgccatgatttgatttgggttgctacagctattgtttgccacttgctcttcgggctcttttccggccacaaactgctgcacatttgcggatactttcgtgctgcccaatgcagcgtgcgtaatttgatttggaaaatttcagtttagcctgcagttcgattgacattgattagctgctgttttcaatatatgttaatagctgcgactcgaaacatcttgcatataaatctactgctccttctaccattatacacttgctataaatctgaaatctactactagtgttttcattgcctaatttttttatattgcaattatttcatcgtaacgcagcataatacttgtaattgtttgaattcaattaattaatttttcacttgtaccgaattttttcaaatgctgatacccattaaactgatttcaagtaaacctaaagagcctatgattgtgttatttcaatagtttgtttcattttcaacttgctattgaaaagggttcctggttccactggctgctccacttcaattgggatacaacgaactgctagacagtccaagagggtccttcacatgttcatatgtctccggcagagtcagccttttgacgggcataaacaaa

SEQ ID NO: 1982 - DNA, 3750 bp, DROSOPHILA
gcacacgttcgggctgcgtcgcgggttgtctctcggcgggttttcgccttcaaaagagctgaaattcagatatacataaactacaacacacattgtacgggaattcgggagttcggtggccaaacgtattgttataaatgtgcaaagccctgcgacatgaagtcggattttgaactctgaaccctggacttggtacatggaatactagttacgaactgctggcgttcggttaagtgaagtgcactaactctagaatgggtcgcaaaaagaagctgccgacgggcgtatcgtctggcgtcagccacgcctcctccgcccccaaatcggtgggcgggtgctgtgtgccgctgggattaccacagcctctgctgctcgaggagaagaagttcctgctggctgtcgagcgcggcgatatgccgaatgtgcgcaggatcctgcagaaggcgctgcgccatcagcacatcaacatcaactgcatggacccattgggccgtcgggccctcaccctagcgatagacaacgagaacctggagatggtagagctgctcgtcgtcatgggggtggagaccaaggacgccctactgcacgccatcaatgcggagtttgtcgaggctgtggagctcctgctcgagcacgaggagcttatctacaaggagggcgagccctacagttggcaaaaagtagacataaacacggctatgtttgcgccggatatcacgcctctgatgctggccgcccacaagaacaactttgagatacttcgcattctgttggatcgcggagcagcggtgccagtgccacatgatatacgttgcggttgtgaggagtgcgtccgcctgaccgcggaggactctctgaggcactccctctcccgggtgaacatctaccgggctctgtgcagtccatcgctgatctgcctaacctccaacgaccccatcatcacggccttccagttgtcctgggaactgaggaacctggccctcaccgagcaggagtgcaagtcagagtacatggacctgcgaaggcagtgccagaagttcgccgtggatctgctggatcagacgcgcacctccaacgagctggccatcatcctgaactacgatccgcagatgtcgagctatgagcccggcgaccggatgagcctgacccgcctggtgcaggcaatttcctacaagcaaaaaaagttcgttgcgcactcgaatattcagcaattactgtcctcgatttggtatgacggcctccccggattccggcgcaagagcattgtggacaaagtcatctgcatcgcccaggtggccgtgctcttcccgctctactgcctcatctacatgtgcgccccgaattgccggacgggccagttgatgcgcaagccctttatgaaattcctgatccatgcctcctcctatttgttcttcctgttcatcttgattctggtgtctcagcgagcggacgatgactttgtacgcatcttcgggacgaccaggatgaagaaggagctggcggagcaggagctgcgtcagcgaggccagacacccagcaagctggagctcatcgtggtgatgtacgtgattgggttcgtgtgggaggaggtgcaggagatatttgccgtgggcatgaagagttatttgcgcaacatgtggaacttcatcgactttctgcgcaacagtctctacgtgagtgtgatgtgtttaagagcctttgcctacatccagcaggccacagaaatagcaagggatccgcagatggcttacataccacgcgagaaatggcacgattttgacccgcaactaatagccgaaggtctctttgcggcggccaatgtcttctcggccttgaagctggtgcacctgttcagcatcaatccgcacctgggtccgctgcagatctccctaggtcgcatggtcatcgatatagtaaaatttttctttatctacaccctggtgctgttcgccttcgcctgtggactgaaccaactgctctggtactttgccgccctggagaagagcaagtgctatgtcctgccgggtggcgaggcggattggggctcacacggagactcctgcatgaaatggcgccggtttggcaaccttttcgagtcctcgcagtcgctcttttgggccagctttgggatggtcggactggacgacttcgagctcagtggcatcaagtcgtatacgcgattctggggactgctcatgttcggctcgtacagcgtcattaacgtgattgtgctgctgaatctgctcatcgccatgatgtccaattcgtatgccatgattgatgagcactcggacacggagtggaagtttgcccgaaccaagttgtggatgagctatttcgaggacagtgccaccctgccgccacccttcaatgtcctgccctccgtcaagtgggtcatcaggattttccgcaagtctagcaagaccatcgatcgtcaacgctccaagaaacgaaaggagcaggagcagtttagcgagtatgataatataatgcgctccctggtttggcgatatgtggccgccatgcatcgcaagttcgagaataatcccgtatcggaggacgatatcaatgaggtcaagagtgagatcaatacgatgcgttatgagatgctcgagatattcgagaacagcggaatggatgtttcctcggccaacaaaaaggagaggcaaccacgacctcggcgtatcaaagtgtgggaacggcgcttgatgaagggcttccaggtggcgccagtgcaaaatggctgtgagctcgatgcctttgggaatgtaaacgggcagggagaaatgcaggagatcaaggtggagtccataccctcaaagccagccaaggaaaccgccaaggagcgattccagcgagtggcccgcaccgtacttcttcagtccactacccacaagtggaacgtggtgcttcgtgctgccaaggattcccaaataggtcgctgcaccaaaaacgagcggaagagcctccagaatctgggcagggccatcgaagaggccaagaggcttataatgctcaatccaggttgtccctccggtcgggagtcaccgattcgcatcgagttcgaggatgagaagacgagcactttgctggagctactcaaccaaatcagtgctgagattagcgatagtgaaaaacctaaaattaggcccatctggcggccaccacttaagacagtgcctgcccgggcaatggccgccaataacaccaggtctctcacagctcccgagctgaagatcagcaggaaatcctcaccagctcccactccgactccaactccaggagtttcccacactgctctttcgcaattccgaaaccgagagcttccattgtgtcccagcaagctgatagcgaactcggcaccatctgctcccactgctcctcctaagaaatcagcaccaactgctcctacacccacctataagcccaccacccacgcccccttctccgtggagggcggcaaccgggaaaacactcgtgcctcagatggtgtgcgctccgataattcgaatttcgacatccacgtggtcgatctggacgagaagggcgggcacttgggcagggataatgtttccgacattagctccattgccagcacgagtccccagcggccaaagcatcgaaactaaatgtgattgtggcatggacacgggtgataaatctacataggtccactagatgccttccgtatattctagttacacacttgtatttatccgtaaagaaggaataaagttatttaggcaaatt

SEQ ID NO: 1983 - protein, 1124 aa, DROSOPHILA
MGRKKKLPTGVSSGVSHASSAPKSVGGCCVPLGLPQPLLLEEKKFLLAVERGDMPNVRRILQKALRHQHININCMDPLGRRALTLAIDNENLEMVELLVVMGVETKDALLHAINAEFVEAVELLLEHEELIYKEGEPYSWQKVDINTAMFAPDITPLMLAAHKNNFEILRILLDRGAAVPVPHDIRCGCEECVRLTAEDSLRHSLSRVNIYRALCSPSLICLTSNDPIITAFQLSWELRNLALTEQECKSEYMDLRRQCQKFAVDLLDQTRTSNELAIILNYDPQMSSYEPGDRMSLTRLVQAISYKQKKFVAHSNIQQLLSSIWYDGLPGFRRKSIVDKVICIAQVAVLFPLYCLIYMCAPNCRTGQLMRKPFMKFLIHASSYLFFLFILILVSQRADDDFVRIFGTTRMKKELAEQELRQRGQTPSKLELIVVMYVIGFVWEEVQEIFAVGMKSYLRNMWNFIDFLRNSLYVSVMCLRAFAYIQQATEIARDPQMAYIPREKWHDFDPQLIAEGLFAAANVFSALKLVHLFSINPHLGPLQISLGRMVIDIVKFFFIYTLVLFAFACGLNQLLWYFAALEKSKCYVLPGGEADWGSHGDSCMKWRRFGNLFESSQSLFWASFGMVGLDDFELSGIKSYTRFWGLLMFGSYSVINVIVLLNLLIAMMSNSYAMIDEHSDTEWKFARTKLWMSYFEDSATLPPPFNVLPSVKWVIRIFRKSSKTIDRQRSKKRKEQEQFSEYDNIMRSLVWRYVAAMHRKFENNPVSEDDINEVKSEINTMRYEMLEIFENSGMDVSSANKKERQPRPRRIKVWERRLMKGFQVAPVQNGCELDAFGNVNGQGEMQEIKVESIPSKPAKETAKERFQRVARTVLLQSTTHKWNVVLRAAKDSQIGRCTKNERKSLQNLGRAIEEAKRLIMLNPGCPSGRESPIRIEFEDEKTSTLLELLNQISAEISDSEKPKIRPIWRPPLKTVPARAMAANNTRSLTAPELKISRKSSPAPTPTPTPGVSHTALSQFRNRELPLCPSKLIANSAPSAPTAPPKKSAPTAPTPTYKPTTHAPFSVEGGNRENTRASDGVRSDNSNFDIHVVDLDEKGGHLGRDNVSDISSIASTSPQRPKHRN

SEQ ID NO: 1984 - DNA, 5189 bp, DROSOPHILA
taaagaggatccgaaacgcttccttctatcttcaattattattcaaataatttagtttgtatcattcctcgttaagccttcgaggatgaattctccgacctagtaccatatgtttatagggtacacttttggatttcaaagtcaactcatggtcatgggctctgttaaaatgtattttcaatcggaaatcatttcaaaatgtgcgatattcagggaaataattcgatgcgagtcctattccaatttaatcatcagctgacacttataaataaccaatttcctctcgctaccagaattggtgtcgatgggcgattgggaacccacacacgcggatcacggggatcatggggagttcctcgtcgaggctattgcataaatcaatgccacaaagacacacacagttgaattgtgtgcagcgcccgcggcacttgaccactgaccactggtcgcatcctcctccccgccagtcgactactctggctaatccgctccagcagccgggtaaccaaactcccagcgagatcctctgccaaaggtgttaatattcaattaaaattctaggctcaccgggcgagcggctaataaattagcgcccaacaagcgcgttgccaatttcaatttgttttcgtatcacttcgacgggtgaagaaatcggtggaggatcgggtggatgcggttggagctggccaatttatttattaagctgcgcaggtggctgcgattgagatttgctgcgaatttgtttgcattgctgacctcggaggtgggtcagacatgctgggaatggcgttggacctaatcagatcagatcggaaatggaattggtaatggaaatggagactccggctgcgaagagtcccattcgaatccccatatcgaccagtctcaatcacgactcgtgcccagctcactgggctgctctccgcatgggatcttgtaatcgatgttgtagctggacagactggacagactggacagtatggacagtccaacgcgcgacatggagccacctaatggaggatctgaactcgtggctgccacggagcgatatttatcgcctcagattgagttggatccacggtgtcgtacggataggtggcattccagctccacgaaatgaggtccaatctttgggccatgatcccttacaatgggtaatcgaactcgagccgcaattagatgcgattgtttccaatcataaaattaaaggaacagctaaaatttgaaggcgctaaccagctacaagatacaatatcttgatcagcatcgttaaatcacatgctttataaaattggatctttactactcacatactttaaggtaagttcctagtttaaaaggaatcatcatatcacacctgcaacttcccttcatcagcgagattaacaagctcattactggtgggcaggtcccttgatctttcctaactgggggtccatggtcgcgccgccagaggaggggagttccattagagacattaaaataatttcaaaagacataaattttgaattatggccacacaacgtggccacgatgccacaaactgtgtggtacatatccatatgtccatgtggatgtgcatctgaatggtttgggaaacgcgattgcaggagtattttgaatcaaatccgctgggggagtgctgtgctgtgtgccaagtgttttcactataattacagacaatttcaggcatccaccgtcgtgcctgtggagcacctcctgtccctccccccgctggatgcactgcagctcgctgagatggccatttaaattgatttatgactgcctgatcgagcgcatttgttcgggtgagggagggcggcggagagtgagtgggagggctgactatatattatatatatgcggccataactcacgatcgctaattaaatttgcatagggggcgcacatatttgccagtgggcgtggttcggggggacagctgccgcttgttgctttcgggtgattccagttattcccatcaggtagccagacatctgatggcccaaccctcgtcagcaaagttgaagaagtgctcgagatggcccagttttgagacaacccctaacaaggccaaaagggtcaaggggtcagtggttcgttagtcgtggaaacaatgccttctttaattgatttaagatgcccgagatccgacgcatttgtcagcgatctacggtgtgctttaattgcctgtgcctgggaaatctgtaactcaatcagtccggcattgtattgcactagttgagcactaattgcagacattccgatacgtaggaacctaaactctcagaaacaaaacggtaattgggttcgagacagccagccagaactggggaataataatgcaaaaaggccaactttggcaggcatttttcggcgactattcaaacgaaagtgtcgataggcggaaccacatttggcgagggtcccaaggatgcgaaggagtggagcagggaagcggggaagcagggaagcggggaagcaacggaacagccagaggaagtgccataaaaatgcaattttagattccatcaactgataagaaaagtttttaaattagccgccaaatgggcaagcgaactgcgaaactgtaaagtgagcaacagacagcaaaactctttgattagaaaacggaaaacaaggacatcagtcgaggatggcagtggcagtggggcaggaggaagttggctaaaaggcaacagtcggcctacaaattgccctcgacacgccactagaccgttagaaactttatgcattttccgctgcattcgaaagaccacccaccacggcccaccatttcccgcaagtgtgtacataactatgtacctgtgtgccatgggaatcctcaaaggaaacgcactccagcgagaaaagagagcaaaagtatcggtttcagcttatcaaatgcctgccatcgccagtgggacagattaggagcagtatcaaagggaatggaaatgcaattgaaaatggaaatggaaatagaaatgcaatgaggcgcactatttcggcatttcgaaatcttaaagccccgatcttcggttcgaagggcagagacggcgctcaagtaattaacgcccctacagaggagctgcatccgcatccttgagcgcgggacctaggccaatccgaagaatacggtagctggccgacggcgccttgaggatttgcccaaatgttaatgatgatccgatctccgagggaatcccctgcctgagtgtgggtgagctactgctgccgctttccatggcagcccggaaaacgcgatctggtgtgaagatcggggcggttttcagtctgtttgttttccctttgacccgataatcgccgatacgaaattaatttgtgccatactccgtgtcttagtatctactttgttagtggagtaataatatatatgataataagtatgtaaaatgtattagcaacaatagaggtagcttttaccttcggttatctgaagtttgtatgccctgtcgtttatgaaagtcctcttttttatggcagctactcaaaagagtcatttaaacccacgttcaagctatataacttttataatattattattatataatcgttatattgccaccaaattccttcaagtgtacctttcctaaggtatgaccaattaaatccgtgtctgactaatagattcattatattcgctatataagcgaaggcatgtagagatcaaatccgagtattatcgccacattcagaaatgcgactttttccagtttactttggtaagttcgagttgcttgatttataaacccaatttatacccaaatgaactcctgactcttcagctataatcttcctgtttcaatatgatgtctactccatatcggataatttgaaaaccgaactgcgatcctggtttggaaatataaagcaactgcacaatccggcaacgctcaacactctgaaaatgctgtgcgttgtggaagtgatgcggggcagcaaacatcggataaatgttggcaatattgacattttgaataagaatactttggaaaacttcatcaagctgccgagctttaaaatgccgaacatcacaattgtcatcgtggaagacgagttgtccaagattgcgagaagcgggagtcagtataaggaacgggaaatggaaaagctagttcaacattttaaggaatgtatacttgcaaaacttaaggcactatcttagttacaagctaaaattctcttttgaaagaaatgtattttttgtggtgtttataaaattgtaagaactactaaaggggggattttttccgttaaagtttttgtgtagttccaaatgaattataggtccaacaaattttagaatattgaattttgtatcttttttcactatccttatcgagctaaagtttttgtgaacaaaatttagaatacaagcaagagaccacgacagttggtttggaaattggcaaataaaactagtaaaataaaaaagttcctgacatattcataattataattatatatataattatttcggcatatagataaaaattgttaaggctaaagaagaaagaaaaaaaaacgacgttcatacggacggacagtcatttggacggccagaaagattcacctagtgatcctgatcaagaatataaatcatttataggatcagaaacgctatattgtatgtaaaagaaaaaacgcgataaatatatttattgttttatatagcaacaacttatacaaaattgaaataatttaaatattttatagtgattgacaaagacgccgaaagacaaataaagaaaaaacgatcgcttttatttccaaaagacccacaaaatattgcatatatcgcttgttcattttgggccgtcgatcccaacagctacaatttttaaaatagcaattttttatcttttaccctgtttaattcaaactaattcttttgatatgcaatatgaggttccaaagatcataaaatattaaaacggttttgatctgaccattctggaagatatttaattcaacggctctaaattcatagtactcttctttatatatatatatatatatgaaaatatattgtttagtttctaaattaaattgacaagttcttttaaaagagtatccatgaacagaaagttttaaaatatttaactcaaaatttgatcatgtggttggagtgctggctaagagcgcagcgaagtgcccaacctcga

SEQ ID NO: 1985 - DNA, 465 bp, DROSOPHILA
atggagccacctaatggaggatctgaactcgtggctgccacggagcgatatttatcgcctcagattgagttggatccacggtgtcctataatcttcctgtttcaatatgatgtctactccatatcggataatttgaaaaccgaactgcgatcctggtttggaaatataaagcaactgcacaatccggcaacgctcaacactctgaaaatgctgtgcgttgtggaagtgatgcggggcagcaaacatcggataaatgttggcaatattgacattttgaataagaatactttggaaaacttcatcaagctgccgagctttaaaatgccgaacatcacaattgtcatcgtggaagacgagttgtccaagattgcgagaagcgggagtcagtataaggaacgggaaatggaaaagctagttcaacattttaaggaatgtatacttgcaaaacttaaggcactatcttag

SEQ ID NO: 1986 - protein, 154 aa, DROSOPHILA
MEPPNGGSELVAATERYLSPQIELDPRCPIIFLFQYDVYSISDNLKTELRSWFGNIKQLHNPATLNTLKMLCVVEVMRGSKHRINVGNIDILNKNTLENFIKLPSFKMPNITIVIVEDELSKIARSGSQYKEREMEKLVQHFKECILAKLKALS

SEQ ID NO: 1987 - DNA, 4732 bp, DROSOPHILA
ccagatgcgacaaataggccacaatgctgtgcgatatgagagccaagtgggagacgtcatccagggcgggcagcgggaactccggatcatcgtcgctgtccgtgtaagaaaccaattgctccagcgacttaagaatgtcggagggcacgcgatgcttcgctggcaggaggtcctcgctggtcacccgctccccagcctcttcctcgttctcgacgggatttgggctctccggcgtggtcgacaccttaacgttctctaagcgctgcagcacctgcgaagatcgcagctccagctccgccaggcccgatcgaatctatgtggcgaatacatggctaattaggtgggatagtggacaaggtaaacaacagcgctccagaagttgacgtgtcttccgtcgtcgtcagcaaaaaaaaaaaagatagaagcagggcgaaaaaaaccaaacactcacactggaagcggcgatttcggccaccgctggcgttgattggcccggatccggctcttggtctacgagtgggctctggccgggatcgtccaccgatctaccagccgctgacatggtttcagtgcggtctaaatcacttttaacttatcgcctgcgatgcaaaataattgttttcgtttcgtgccactgcgtctgtgtgggtgggtgtgtgtgcgtgtgtgtgtggggcgggcgagtgtgtgtgtgtgttgatggaagagaggctgatgtggaatggtgtgaccgtagtgggtgcgtctgactaagatcgcaaatagtgtgcgattgttggcccatggttctggtgatggaataggtcgcaaggaagttggaaaactattataatatccgccactaaaagacgttggacagcagcacacaaacgtacatacatagcacctactcgtaaccttaaacgacgagttttcacagtggtttgtgtcacggtttgtgtctcagcgattttgaagacagcaccgcacggtcatactacacagccatcgatagttgcggaaaactcatcgatgctgcgaaagtgcgatagtatcgaataaacatgagtgtgtgcatgagtgtgggaatttattaaacaaaaacgaaacgcggacaaactatatttatgtaataaacactaagccgcagcgccaacgagtaatgaacagtccacggccaggtcgtactattcaggcgaacgcacctcgcaatcgactgcaatcaaagtgcaatagctcaatcaattgattcgttttgctcaaccaaaaacaaaatctattcccaaatcggtgcgatagttgccaaaatataaaaactacactacgctaaaaaaaaaacaatacactcacacactggcgtacaagacaacaaaagagaagaagaagagcagacgccagatataaaaagcccccaaaagaattggaaataagaccatacccctccttctcccttgaaaagggaccttaaaactaggcgacaccgaataattgaactcaagtaaaaaaccgggaaaagagaaaaacactttcaacaaaatatctagaagccttgttatcgattttgttccgggttttttttgtgtgagtgtgtgttgtgtgaagcgcgcccgcgggtgtgtgggtgagtgtgcgtgtggctctcggcgcgttatcaaaaacaacaacaattcgttgcaaaagaaaaaataaagtagaggaggcggaagaagaagaggaatctgctcgcaccgcggtcaatcgcggatcgtggtcgatttatcgaattaatcgccccgaacaaaaaaaacaccgtacaaggacttgcactatttccaatgatttcgctgctgcaaatgaaattccgtgcgcttttgttgttgctatcaaaagtatggacatgcatttgtttcatgttcaatcgccaagtgcgagctgtaagtactgaaattacccgaaagcaggagtaaatcacaaaacaaaaatagtcctatttttacccgcccgaaacgccgaaattattcccaacccgctcccgctatcgaaacttaagtactactgctacagaataataataataaaagcggccgcactgataagattttcaatgatacaggtagtactcgctagagagtatggatgtgtttgcctcggaaatttatttgaagatttgcatgaatagaaacgttgaacttaaaattaattcatatattttagatctttgtatctgcaaatctctcatatcaataatatggtttcatttatattttcaaattatatttacgttacttcaatgtgcgatctattaaatttagagtaactttcaatatatacgaatacgagatatttattcctaaatatttgcaaaattttaaattttcgtaaagttacatatatttttgctgggtaccgcttagccagtgacacctgtcttaaagtaagcctctatcaagattttccgccacacgtttaatggttcgtgttccaccgaatccccacccgtcccagaagtgctgtccacggttctcccatccgccttatcgaccacccgccttcaatactctctcagtactgggccggcgattttggccagatatcgtgacgcggcagaggcactgaccttcgacctgcttatatacatagatatcgatgaatccacatcaacattatatgctattgcacagctaataattgttaattgttttgtaaaagcataatatatcagtaaattggggtttcccatgcactagtgataacttggccattgagcacctctaacatctccttgcaccgcaacccaaccccaacagagtgtagcgacgcatagccaccaagcccatcatatgaaccccatgtcgaatgcctttcaagtactgctccgttgattatgtattaactttctcagtttatccagtatcaaccggttaaatacgaactcttcccgttgtcacccgtctcgcggcaccgcctgagcctggtgcagcgcaagaccctcgttctggacctggacgaaacgctaatccactcccatcacaatgcgatgccccggaatacggtgaagccgggcacgccgcacgatttcactgtcaaagtgaccatcgatcggaatccagtgcgctttttcgtgcacaagcgaccgcatgtggactacttcctggacgtggtaagttcccgaattgattggccaagcaaatagatgcattcccgcatttaagtcaacacattaacttacgccctactgcccgcaggtctcgcagtggtacgatctggtggtcttcacggccagcatggagatttacggagcggcggtggcagacaagctggacaacggacgaaacatcctccggaggcgatactacagacagcactgcacgcccgactacggatcctacaccaaagacctgtcggccatctgcagtgacctaaatagggtaagcgggaacaagtgactccatgcgagccatcagttgcaaatcgataaagtagagggtgctgcataagatcgtactttatatacgagtattttgttctaaattgagcatcgttccttgcagatatttatcatcgacaattcgcccggcgcctatcgctgttttcccaacaacgccatacccatcaagagttggttctcggacccgatggacacggcgctgctgtcgctgctgcccatgctggatgcgctgaggttcacgaacgacgtgagatcggtgctgtcgaggaacttgcacctgcaccgcctctggtagcaggtgggccgcctgtcgctagtttagtttatctatttagaaggagcactgagggccagcgaagtggggagaatatcttctgaaattaacaacaaacaaggtggtgctgtgacacattaacgaatttgttcattattatttaaaatttgtaccattcagtcaaatgagcggagataagatgagacaaacagataaagcagaaagttgaggatatattgggagatttggaagcgatggtttatttctccttttgtgtatagactaacagtttttttttaacaatctaattatgcatacatacttgtccatatatgtagagaccagctatttttattagacatttttttcgcttgtttttttgggtgtatattttgattataatatcaaataaaaactcttgaacacagacagtatatagtataaagtatatatatacagtatacagtatatatatgaatgtaaagctgagcagaaggcgaagccacaacataaagaacaaatttgtcaagttatatatcatattattgtaatttaaatctaaggccacttacaacaacagtcttgtaatttctataccatgataacaattaactattatgacactggagttgtttttgtgcagatacgaactaacaagacgaagcaaaatacttatagttatacaaattagttaattacgaaacttaacttggacatcattattatggataattattaaatatgtaaccgattctgtatagacttacgtacgttctgcccttgtttcctgtacaaaactaaacggatgaaagatcttcaagagtttcattgcttgcaaaccaaacataacacttttctatggataagatttttggggaagttatatatttacgactaagcaacaacccacaactataaactactattaaagtaaacaacaaccgaggagcaagcaagtaaggcaaaatttatattttgtaaggcgagccaagtagcgaaaagaattaaaaatcaaattaattctgataggatcggatcagatcaggttaatg

SEQ ID NO: 1988 - DNA, 1556 bp, DROSOPHILA
aaaactcatcgatgctgcgaaagtgcgatagtatcgaataaacatgagtgtgtgcatgagtgtgggaatttattaaacaaaaacgaaacgcggacaaactatatttatgtaataaacactaagccgcagcgccaacgagtaatgaacagtccacggccaggtcgtactattcaggcgaacgcacctcgcaatcgactgcaatcaaagtgcaatagctcaatcaattgattcgttttgctcaaccaaaaacaaaatctattcccaaatcggtgcgatagttgccaaaatataaaaactacactacgctaaaaaaaaaacaatacactcacacactggcgtacaagacaacaaaagagaagaagaagagcagacgccagatataaaaagcccccaaaagaattggaaataagaccatacccctccttctcccttgaaaagggaccttaaaactaggcgacaccgaataattgaactcaagtaaaaaaccgggaaaagagaaaaacactttcaacaaaatatctagaagccttgttatcgattttgttccgggttttttttgtgtgagtgtgtgttgtgtgaagcgcgcccgcgggtgtgtgggtgagtgtgcgtgtggctctcggcgcgttatcaaaaacaacaacaattcgttgcaaaagaaaaaataaagtagaggaggcggaagaagaagaggaatctgctcgcaccgcggtcaatcgcggatcgtggtcgatttatcgaattaatcgccccgaacaaaaaaaacaccgtacaaggacttgcactatttccaatgatttcgctgctgcaaatgaaattccgtgcgcttttgttgttgctatcaaaagtatggacatgcatttgtttcatgttcaatcgccaagtgcgagcttttatccagtatcaaccggttaaatacgaactcttcccgttgtcacccgtctcgcggcaccgcctgagcctggtgcagcgcaagaccctcgttctggacctggacgaaacgctaatccactcccatcacaatgcgatgccccggaatacggtgaagccgggcacgccgcacgatttcactgtcaaagtgaccatcgatcggaatccagtgcgctttttcgtgcacaagcgaccgcatgtggactacttcctggacgtggtctcgcagtggtacgatctggtggtcttcacggccagcatggagatttacggagcggcggtggcagacaagctggacaacggacgaaacatcctccggaggcgatactacagacagcactgcacgcccgactacggatcctacaccaaagacctgtcggccatctgcagtgacctaaataggatatttatcatcgacaattcgcccggcgcctatcgctgttttcccaacaacgccatacccatcaagagttggttctcggacccgatggacacggcgctgctgtcgctgctgcccatgctggatgcgctgaggttcacgaacgacgtgagatcggtgctgtcgaggaacttgcacctgcaccgcctctggtagcaggtgggccgcctgtcgctagtttagttta

SEQ ID NO: 1989 - protein, 243 aa, DROSOPHILA
MISLLQMKFRALLLLLSKVWTCICFMFNRQVRAFIQYQPVKYELFPLSPVSRHRLSLVQRKTLVLDLDETLIHSHHNAMPRNTVKPGTPHDFTVKVTIDRNPVRFFVHKRPHVDYFLDVVSQWYDLVVFTASMEIYGAAVADKLDNGRNILRRRYYRQHCTPDYGSYTKDLSAICSDLNRIFIIDNSPGAYRCFPNNAIPIKSWFSDPMDTALLSLLPMLDALRFTNDVRSVLSRNLHLHRLW

SEQ ID NO: 1990 - DNA, 7876 bp, DROSOPHILA
gccacagcagccatgccttcgtcgttccgtacgtctagcgggtaggatgcgttcgcagaactatagagccattcccaaggttatgaatttgcggcgcagcacgcggctggcgggaatccgggaacatgccacctccgttgttgtggaaaacgggacgcgccttcaaagtgcagtccaaaagaaacgcacgcgaaaagtgaaacctgcgcccaaggcctggatggccaataatactaaatgtttactgggccatcttaacaatggaaacgttaagcaattgcaggagattccagggatcggttcaaagaccgcctctattttggccgtgcacaggtcagttgacatacgttcatttgcgttttacccaataacccttaatccttaatccacatttttcagatcccgcctgggttgcttcaagaatctaattgaagtcaaatccctgcccatttggtcgggaaataaatggaaacgattttctcaaattaactgtcttgacacttgatacaattactaattaaatagcattttaattcgaatatagtatagtgattgttatttatgtggcatatactttgattttacaactatagtaggagtaaaaaaaaaggagccggatatccttaaagaaacagttatatatgtgatttattttttaaataggcttacctaggatatattatataatatattaaattaacaaaacaagttggcattttaaattaaagcacaaattgattgttataaaagtattaaacaaaaaaaactagtcaaaaaagaaaaactttcaaataaatgacttattaaaagtgaccaaataaataatattcattaactttttttttcaaatttaactccctttcagcgttgccagattgggttgcatgcgggatttgattatttttatgcacaaattctgggtagagagccacttgtgctgctccggcagctggtcacactgtacagtcgcgcagtttggtttctttggtgcgagaagacggttggtgttgttatttttttttttagttcgctccgctgtttttaggtgctacgcgctttatggcccgctcttaatcttatcgcaaatcaaatcaaaccgcggccaatgagcaccgtaatttcactttttggctaacggtaacggcacttccgctctccgaattcgatattcaaacagtcgcattccatcgaaaagcgaaacaagaagtggccgcaaaaatgcccgtgaaaacagtgaatcgccagcagagccaaacgcccgcccaacaactgcaattgcagcagcagcgggacgtcgagaatgggctctatcccacgattccggccgagcgacgatcgcccccctcgcgtccgcaaacgctgcgacaggacaccatcgatatggaggaaataccgctcaatcagacgaacagccaggagccagaggatcggcgcaaaatgcacgagatatttgacaaggtatgtaggacttataatactcgcaattcccttccccagcacaagtggcagctcctcctaagtattagatcttttctggtttgtagagccagctaaccaagtagtagccatggtaactatacctataaaggtattactgttcacacggtgttacaacttagcactatatctttaaagtaaatctatgatgatttaacgttgatttaatagttatgccacattattatcggatagaatacaggaaatgtaggatttaggtaagggaataataaatttctattagttttcaagtcattttggagagcacatagtggttaattcattagttagaaccagctacgactaattatcccatttaaactggctggtggtaggcaacagaaggttaatgctgagatcttgtgaaattgcaccatattaatgcatgggaaattcgcgaaaaacagaagaacgactgtaattaaaacacacagccggcacttcgcggcactcacacacacacactcatacgtgcgtgtgaatgaagttgcttgtgcttgtgtggtcggccctgttgccgtcttcttctcaccctcggtgaaagttgagttcgatgaatcatctgagcatcgatccgctatggcggcgctcttcactcttcgcactctcccaagaaaaccccacctttaacccttcaatgggccggcgggcgaaaaccgacacgatcagatgcttttgtttgcaaacatgccagtggaacaaacttaaggtatacattattaaaaaaaaaccttgtatcttgtggtgattaataaatacgtgagatttgattcccgtttaacattaatgggttaagaattcgattatagtgcctaaataatcaactgctatatgtacttatatcatacaagcataattacacttttcggtgtatttaacccatcaccgcttgtctgtcagtcaattttgcactttcgcagaattccgtatcacattttataagctttttttcgctgcagtttgttttcttaaagtagaaaaatcgtgtgtgctgcaaaaaaaaatgggggggagggtggttgcctactgttgggggactgagttttcttatcgtgacagagggttgggggaaaaagaccagcaaaaaaagaagaagaaaaaccggttataaattattgtttgttcgctttgagttctgcctttgttgttgttgttgctcttgctttattcttggtggcgttagtcacttaacccccaactgacacccaccgcccacctgtttgcccgagtgttaccattatcaatttaacaatttgtggatttcgtcttttttaattctaccagtgcgattgcctcaacgtgcaacgtcctcttgattcaccatttgtttatagccatatagagtgtgtagcgttcatatcgcgttcaatgtaccccggcaacaaggggattctatctacgaatccatcagttttggccgcttcgattccagtttagttagcactctctcctggttgatttggacagatacgtatatatgtatgtatataggtattctaaccatacgattagcatacaagatgagctgccaatccaatccaaacacattcgatgccgctggaaatcggcattccagacacattcctattctcttttggctggaaatcttatctgaattccctcgctacaaacattcaagtggccaaaatactctgcttgggttttccgagcgttgattcaataatctagccatgatataacaaccaaaataatagcaagctatagaacatattttgtcaaaaaaaaaaaaatcaccaatctcaaccaacattattcgttggaaagttcaacttgaacccggaggggactgtatcattttgatatttttgaaatatcatgtttgatatgtcacagataacagtctttctgatatgggaaaatagcagatagatgaccattttcgttgatatttttattcattgagctgtgcaaaagagtaaatcttaagttgtctgttggctaatataggaaagttttggaacttcaggtgttccaatggttttacaattaactttttccgaaaaccatattttttacaaactgaccaagtggctttcgtgtgttccgaacacacttgacgactatgactaagtcccaatccccgcgagactccgttaccgctggcagcttatcgcctggttttgataataaccaactttttggttttgttttttccccctgttctgttttattttaagaacacctaaaggtgtaaaatattagtttacgactggaaaggaggatacatatttatgtgcatgtacatacatgggcacctatctaattgtctatagtatatgccaatgtctttcctctttttttttgcgtgaatctaacttttaagtgcgagcgttgacttttcgctgggttttctttgttatcccagttcctagttatttactttactaaataccttaaccatacttaaaaggtcagtgcgcatagcttacctatgacaaatgttttttatgatcgaaaaccgagaatacaaagcgataagacagtaacatccatatagggactttctattggcgaaatggcaattgagaatttcgaacttctgaaaggaataggtgacaaatgttttttttttagcaaaatccttttgtatttaccaatggggattattgacgttttgcaaaaaccatcagttgcgtttagttcacaataactttggatgcctttgtgcaacttcatgtgactttgtttcgatttgttttcgattagccccgttttggatttctagtttctcgtctcgatctgtggcatttattcctgcccatttatggccactttttggtccgacagcgttcgcggctgtgttgcaagtgctgatggtgatgcaatcaaaaaggaggaaaatcactcaacaaacataataatatgtgggtacttgtttatttgtgaactcatgctgcaggtttgagtgtgttacgctatgatttagaatagttcctcgggtgaatgagattcattcggagtctaagggaaggtcaaagaaagtggaattttggctcttgggggcgaggcaactggtggcctgctcctcctctggcgcatccacagcatcgtgccaatcctgggaatcgtgctcctcctgctccttctgatccgttagctggagcagacgcatccgcaagcgctgctcttccagttgaatgactgaaggcctaggagcagccacttcgcgaataagcgatggcatggcggtcgtccagtttggcagcagagttaaccccgttgccctgccctgccgctccagacgctgcaactggcggcgctccatggccatcagttcccgcttggcccgggcccgcacctggtcgtcgctggtcgtggtgcagagactcagggccgcaaagatgccggccatgcccaggtagagaaccagtacggtcacaatgccggacgattcctgcagcggctcctcctcctccgcgacgtcgcatgtgggcgtcggtgtccagccaagccaagaggtcacgtggcgggtcatctccatcagttgcgacatcgttctcggttgaatcttgaggcgaagatacaaatatatataatatatgtatggtttatactaaataattatgtcattaaccgatgacaccaagcaaatggtagtttctttacttccttctagggaaatgtattcagtagtttatttttattacagcctagttttaaaaggtaggatgaatgcgctgatatgtacccaattgtaatcggtgtttccaagatgttgtatttcaagattttttggattcggtgcgggcctgcccgaccactcggaatttcagctaggtactgagtgttcgaatccctaatgttttcgaacccccatgacgctttagtatatggcctactgtgtttaaatgttgacttacccagattctatgtgtgagcttaatcatgatgactaaccaaccatatgtatatgcctctcacacagcacgactctgacagagatgggctgatcaacacgcacgagctgaaggaactgatctcggatggctattgccgggacattcccgcctacatcgccgaccagatcctgaagcgcagcgatcaggataacgacggccacctggacttcgaggaattctatgcgatgtccctgcgccacaagtggatggtgcgcaacatgctgacccgctactgtcgctacgttgtgccgccaccgaagcccttagagggcgatgagcccgacggtgcctacgagaagcaaatgtccatctgcccgccgccgctcaccatggtgctcttctcgattatcgagataatcatgttcctcgtggacgtcatacatttccagtgagtagtgatggtacaattggttgtatatgataataacactagtaatctgctatgttcagggacgatcccaactaccaggatcgcataggcgagagcacaagtggaccagcggccaccctgttcatctacaatccgtacaagcgctatgagggatggcgctttgttagctacatgttcgttcacgtgggcatcatgcatctgatgatgaacctgattatccagatctttctgggcatcgccctggagctggtgcatcactggtggcgcgtgggtctggtctacctggctggcgtgttagccggttccatgggcacctcgctaaccagtcctcgcatctttctagcgggcgcatcgggtggagtatacgcactgatcacagcccacattgccacgataattatggtaagtctttgttatactatttgatattattccataattaccttatggtcgccaaacagaactactcggaaatggagtacgccattgtccagctgctggcctttctggtcttctgcttcaccgacttgggtacctcggtgtaccgccacttgaccgaccagcacgatcagattggctatgtggcgcatttgtccggtgccgtcgccggtttgctggtggggatcggtgtgctgcgcaatttggaggtgcggcgatgggagcgcattctctggtgggtcgccgtcatcgtttactttgccctcatgaccactggcatcatcatacacgtgtttgttcccgactacttcccaaaacaggagtacaactagccccatcactagctctagccctagccctaacccttaaccatgtccaaagtgcacttcgatattgagccgaggttgcagtacgcacagtactatatataggatttcttctgaccatgtgcctatgccagctgcaaaaataatttatttttttacaacttgccatgtcagcttcattcccaatccgaaagtggtgcaagcatgtcgtacgtatttttatatatttatatacatacatacatatatagtaacgtaattatgccttcctcataattctcttatacaaaagaccgaccgcggtggtccgccgtatcgattccttgttactcgatattgcgcatccacttaagccgtaaccaaaacccagacactaggcaggcacatacatagccacgtagcacataagaattctttttcatatgtatgcacaaaagcataagcaagaagcgctctcgcgcagatcaagtaaacaacccactaaccaagtacatttaagattttctcacaccatttgtttcagtcttaagctgatattcaatcaataaaaacgcaaagcgaattcattcgaagtttttattcatttcggttcaaatacggatcatttattcgactcaaaagcaaaaattattttactatatgtattctcgatccacatgacgcgacgcggcgcaacgaaatgtcgacggagaacaaaactcagagctgcatttgtattacacatttcgttgacattttttttttttcaagaaaaacgagaaatatctttaaacaaagtgtactgtatatttttggagatttattattaagatcttatatatttaaatgtaataaaaacaatgtctttgtacgaagaagatgggtgttttgcgtatgatttttatttttttaattgtgtcattcatgttcaaatgtaatgagtacaactttgatcttgccttcgtaggaccagcaagaccaggcagaactacttacacgcaatcttacataagtactatatttttatagtgaaatttatagttcacttcccaaaacagtggtttaagtcgatttagtatgatccagcaattaacccatttatttattatgtttacatgtttttcttttctgttcattacaagctgtcaatttgtaagcagcgtcgcttgattgcatcgttcacagcttgggacaaagtaatgtactgaatgtcgttcaaagatattgttgagagtgtgtttaaatgtggtgttcggaggtgatgcttctcgagaagactcagtcttggcattctctgctactgggagggcttatatatgagctaa

SEQ ID NO: 1991 - DNA, 1770 bp, DROSOPHILA
gttggtgttgttatttttttttttagttcgctccgctgtttttaggtgctacgcgctttatggcccgctcttaatcttatcgcaaatcaaatcaaaccgcggccaatgagcaccgtaatttcactttttggctaacggtaacggcacttccgctctccgaattcgatattcaaacagtcgcattccatcgaaaagcgaaacaagaagtggccgcaaaaatgcccgtgaaaacagtgaatcgccagcagagccaaacgcccgcccaacaactgcaattgcagcagcagcgggacgtcgagaatgggctctatcccacgattccggccgagcgacgatcgcccccctcgcgtccgcaaacgctgcgacaggacaccatcgatatggaggaaataccgctcaatcagacgaacagccaggagccagaggatcggcgcaaaatgcacgagatatttgacaagcacgactctgacagagatgggctgatcaacacgcacgagctgaaggaactgatctcggatggctattgccgggacattcccgcctacatcgccgaccagatcctgaagcgcagcgatcaggataacgacggccacctggacttcgaggaattctatgcgatgtccctgcgccacaagtggatggtgcgcaacatgctgacccgctactgtcgctacgttgtgccgccaccgaagcccttagagggcgatgagcccgacggtgcctacgagaagcaaatgtccatctgcccgccgccgctcaccatggtgctcttctcgattatcgagataatcatgttcctcgtggacgtcatacatttccaggacgatcccaactaccaggatcgcataggcgagagcacaagtggaccagcggccaccctgttcatctacaatccgtacaagcgctatgagggatggcgctttgttagctacatgttcgttcacgtgggcatcatgcatctgatgatgaacctgattatccagatctttctgggcatcgccctggagctggtgcatcactggtggcgcgtgggtctggtctacctggctggcgtgttagccggttccatgggcacctcgctaaccagtcctcgcatctttctagcgggcgcatcgggtggagtatacgcactgatcacagcccacattgccacgataattatgaactactcggaaatggagtacgccattgtccagctgctggcctttctggtcttctgcttcaccgacttgggtacctcggtgtaccgccacttgaccgaccagcacgatcagattggctatgtggcgcatttgtccggtgccgtcgccggtttgctggtggggatcggtgtgctgcgcaatttggaggtgcggcgatgggagcgcattctctggtgggtcgccgtcatcgtttactttgccctcatgaccactggcatcatcatacacgtgtttgttcccgactacttcccaaaacaggagtacaactagccccatcactagctctagccctagccctaacccttaaccatgtccaaagtgcacttcgatattgagccgaggttgcagtacgcacagtactatatataggatttcttctgaccatgtgcctatgccagctgcaaaaataatttatttttttacaacttgccatgtcagcttcattcccaatccgaaagtggtgcaagcatgtcgtacgtatttttatatatttatatacatacatacatatatagtaacgtaattatgccttcctcataattctcttatacaaaagaccgaccgcggt

SEQ ID NO: 1992 - protein, 417 aa, DROSOPHILA
MPVKTVNRQQSQTPAQQLQLQQQRDVENGLYPTIPAERRSPPSRPQTLRQDTIDMEEIPLNQTNSQEPEDRRKMHEIFDKHDSDRDGLINTHELKELISDGYCRDIPAYIADQILKRSDQDNDGHLDFEEFYAMSLRHKWMVRNMLTRYCRYVVPPPKPLEGDEPDGAYEKQMSICPPPLTMVLFSIIEIIMFLVDVIHFQDDPNYQDRIGESTSGPAATLFIYNPYKRYEGWRFVSYMFVHVGIMHLMMNLIIQIFLGIALELVHHWWRVGLVYLAGVLAGSMGTSLTSPRIFLAGASGGVYALITAHIATIIMNYSEMEYAIVQLLAFLVFCFTDLGTSVYRHLTDQHDQIGYVAHLSGAVAGLLVGIGVLRNLEVRRWERILWWVAVIVYFALMTTGIIIHVFVPDYFPKQEYN

SEQ ID NO: 1993 - DNA, 11187 bp, DROSOPHILA
tacaattaacgtgttctttacaatattacattaagaagattacaattttctcgtactgtttctgttttttttttctttcttttccgtttgctatcagagaataagtgttgaatttcccccgcgttttcctcgtggggctaaacaatttcatttggcattcaacaagttggtctaacattgctagcttttcacataggctacgtctaagtttgttcttttggatgggatgaggagggagggagggggggcacactcagttgaagagcagtgatagacgaattggatagcaggacactaattacacatacatgggtcctgttctcccagtttagatttagattaggcttataagacccgcttatatcgctgccgtgcgacttttggtctccgttcgttctccatcgcacacctcgcaatctcaattctgaatgggaagtaaatgggatggccggatgcaaccagcctgctgagttcgaatccggccaccgatcggaggtggagaaaggagaggagtgaagtggttgggtaaattcgcgtctcgtttagtttaaggcgttttgttttgctttgctttgagcaccagaaaggttcgatttccagttggtcccttttgaattctaacaatttaaaaatatatatttgttgtggagtagtagtgcacaaggatatactatgttcagttaaaggtcgaaggtcctgactcgctcctctcggtttcatctctactcggctccgttttatatttattcagttcatgccctacaggcatatatatatatatatatatcaaatatatgtatattatttgtatgtatatacgtagctcccgcctctactgtctcctataatttatataatgtatatagatagtttcattctatagccacgcttcctttacaatgcaagcccactcaatggtttctatcccctttttgtgactatttgactaacaatgattcgggggcggggtgttggtgttgggcacatggagagcatccatttcagacgtaaaccggcgcctgatcgtccgtcatatccggcggctgcttgtcgtcgaagaagcgacggaaggtaaattcgaaaaagccgtggaaggtgcggtcgttctggtcgacatcatcgccgctgctcatggtggagtcattcgagcgcagcttctccggatccacgggatcaaagttggatgtgtccgtcgggtgcttgatttccggtatatagggcgccttctgcttccgcatgtccgcaaagtcgatgcccttgaagaagtcgtggctcttgacctcgtccacgctcttgcccagccgcttgtcagccgacgcacagagcctccttatcaagtccgtagcctcgcgggataactcggcctgcggcggaatatgcagggttttctcccagttgatgacctgtaaatgaagcaagtcattgttgtaatgcacttggctttataaggaatccaaagagcgaaccttttgttgcgtttccagcggactgttggccagaaagggcggctgacccaccagcatctcatagaggatgacgcccacgctccagtagtcgcacagctgcgtgtacccacttctctccagcacctcgggagctatgtagttcggggtgcccaccagcgagtgggccaggactctttggtgatcgcgcatccgtcgcctgcgagttcggcatacttttattaacggccgatcctattaattaagtgtacgaaactcacctctccagcacggtgggcttcggtccgttctcggagtattcctcccagggctccatcgagtcctggcgcgagtgattgcctatcagagtaggaatgatattattaaagctgttaaacactacgttagctggggttccatctcaccgttctcctggtagtacttcgagttgtgcgtccatcggaatcccgtgcacaggccaaagtcggtgagctttatgtgtccgtccctatcgatgagtatgttgtcaggcttgatgtctctgtggatgaatccataacaatatgtaaatgtgactgtgataactgaagcaactgctaattacctgtgaatgaagcccattttgtgaacgctgtccacggcgcaggtgacctcggcgatgtagaatctggccagttcctcctcgaaaatgcccagtttgatgagcagcgacatcagatcaccacctgtcgacaatccacaatgacatttgcactccgatacacatcgttggactgcttaagtttccactcacctggtatgtagtccatcacaaagtacagattatccttgtcctggaagctgtagtacaacttcaccacccagttattgtcggcttccgcgaggatatccctctcggccttcacgtgtgccacctgattccgcttgagaacgtccgctttccgcagggttttcatcgcatacaaatggttcgaggtatcgattttgctcaccagcgttacctcgccaaatgcacccactccaatgggcttcagtttgacgaacatgctcttgtccatcttggcgcgcttcaatcgaatgtagttgctctccttttggttcagcattttcctcatctcgatttgggtctgatcgggcagtcccactttgtgcatctccttctccagctgattcttgcgatacgtgcgctggcgatacgacttgatcacgttctctatgtgctgctccatgaagaacttgaaggcttgcggcgagtactgcctgatgcggaactccttgcgctcctcctccttctccttggagatcttcttgcgctccgggatgggcgaggcgtgcttgatcttcttgcagctggtcgacgaggaggcggtggtgccggtggatccgttgctgccgcccgagctattcgcgcccgtgttggaggagttgttattgtatttggcaggcggaatgggtggtgtcgtcgccaggttgctgttgcttatctgtatgttgttgttgttgcagctcggcggtttgatctcgctgttgttgttgttgttgctctgatagggcggcggcggaagcatctgccggccaggatttccgttggccagcttctgctgatcccgttcccgctcccgttgatcccgctcccgttgatcccgctccctctgagcctgtgcctggagcaccctcaaggcctgcagttgctgttgctgctgctgctgctgctgttgcacctgctgctgctggacctgttgttgctgctgctgctgctgttgctgctgctgcaccaccgtggccgccttggcctgcatgctcttggcataggacggtggctccaggcaattgggcttgctattcagacccaccaagggcggtgtggtgggcgttggtggtttggattgctggtgctgatgctgctgctggtgggccgccgctgctgcctgttgctgctgctgcaccactgccgcggacttctgagggtaagagggtggagcggccagcacgtggactggtgaattgctggccgaggcactcgatggcgattggggcgccactgctgtttgcagcacgggcttttggacctgcgtgctcttcacactctgcatgatgatcggctgctgactcctggcctggtagactcgtggttgtggcttcgccagcggcgccggcggcagggacacagttatggggctcggcgagcccgccgaggtggccgagtatatcccactgctcggggatttcctgtagtccgattgttgggattgtgtgggcgactgccgcgactgcatggaggccgtgtaactgggtggtggcggcggcggtgctgctcctccggctccgccttgaattaggtagggcggcggtggctccacaactgctccactgcctccgcctgggtataggttcagggacttcagctgctgcgtcaactgctgctgcgggttcttcagcccgttctgggttattacaggtgagttgccccgctgagtgggtggcgctatcgccggcgggcggttgttcagggccggtgatcgccgcttcacgtacgcctggctagtgggcggcactggcggtgggggcgtggccgcgctgcaggcggtgggattgcgtggcggcggcgccggtggagccacctcactgaaaccgcttggcgacggagaaaatccaccatttccacctggattacccaccgtcctcgagctcggctggtgggtgtggtgcgaatgggggctgtccgatcgggagctaccggctccggagtccagagccggactgcagcgcaggtagtgactgctcgccgtgtcccgttcgatgctcggcttccggatcagtttgtttggcattagggccgtcatcatctttggcacacgtccgttcgccacacccaccactccaacgcccacaccggatacggatatggagccggctccgggctgacctacaatggcgggcggcggcggtatgaccacgtccggagcaggagaggcggagggtggcggctccatcggctgcttggcgtggtgatagtcaggagtaagtgcatcgttgcgtccgttggtcgccgtgtatcgcagaggtgtgtaattctggaagagatgggttcaagggattagttaaatcatattagttagatcatatttgtacgccagttcataagtatagaactataagcacccaatcccctatttaaatctactttccactacgtccctgtgtgatcgacattcctgcactgaaagaaataccccacattcttttgaagtaaatcgtttctatcaaaaaccaaacaaaaggcgtgcatgctgaaaacaaaaacaaagagcaacaaaagcgaatcgaaggctaaaacaaaagacccaagaaacgaggcgaccaaagcaacgaaataaaattcttgccgtcgtcgttaaattcctaaaagtcaggcgcaggccatgagagcgagcgagacggagcaaacggatgggcgggggagaatgaggagcaggaagaagagagggagagagaaggggaagaagagccggctgccagatgcgctccaaaacgcaagaacaaatacacttgcagcgaaggttgcccttgcctccatctcgcttgcactcgcttgttggtcctgcactgctccttgtgcctctcgttcgctcctcgtcagctacccgttttacgcgttcttttgatacctctcctccttcgtcgaccctccttaccacccgccgatcatctcttgcccttttgtgactgatcctcgattttatgactttggatgccccccccctctctgactatctcttccttctagagatgacaccgtgatgggaattcgtatgcgatacttcaaattattcaggattttgttcaatttcaatttaatttatgcgtgctaagttaaaaaaaagcagtaaataactcaacaatctgtaagtcatttaatactatgatgcaattaaaattatttattatattcacgcttaaaaagattacaaatcgtttaaagtgaatgaatgtagaccggtttgtcaagggattacgcattttatttaataaatgaacctttcagtataacgcttaaagtaataattgaggattataggtattaaaaacaagatttttggaagaagttatgcataaattgattaaagtcgttgtgggttataatctttgaactttgaatgatgccaaagtggcctctttctttgaggaatgattgtggggaatttcacccactctacatgtcgcgattttaatgggcatcaaattaaatccaaggacgcgagccaagcgaaacccgacaaagacccccagcagactgtgcgtcgctctttgagggggtctcttagcccacgcatcccggtgccaccccccttttgcctatcactcttacatgaaagccaatttacggcaaattagcgaaagccaatgggctcactaaatcagcaagtgcaacaagaagaccgcgaagaaagtgtcgcccacgcaaattggcattgctacatttgctacattttcaaataaaataaattggatttacggcggacttaagggagaccgcaacacgaaccgtagaattgccgaaacactttcgctaatccacttaagctcctctgctctgcggtctccaatgcactttgcacagcgattagactgtggcaaggtcaaaggaatttggggattacttaagaatatacaaaagtatgcattataccagaatgtgaatggtaaaaagtaagtcaacatctttccaatatagcttatatttaaattacgtaaccagaagtgcaggtcggggtcacctttttgcaaccacgcagccttgaacatggcatactatgtaactgagatataataaccaacagaatacatcaaaattcgaaattcttggcagctctataatagttgtgtaaaatgtggttacagggaagaccagctacgaggatcgcattagtttagattagattggcaaatgcaagtgcttccattccaattcgaactaaagtctctggctaccctgggttgttttagggaagaaatcattcgtatcgcaccgatagattccgtagaatcactactatatggatatggccaaacattcttctgtttgtgtttgtactttgggggctgtgcgtgtgtctgttgtcttttgttattattagaggcaacacacattctttttcggcgatcgcagcttctgatatatagggatatggctgtactatgtgcgatatatatttaggtgaaaattcctgagaaaaatcgctgaagcacggagcagagcgcgagaataaagaaaatcgagcgaaagcgacccaccgacaggttcaacaaatttttcgcacgaaaatcgcgcaaattagttgaaaattgcaccccaaggaattccatttcgctcgaaatgaaatgtgtcccccataaaatgttcacagacagcgaaacacagtggcaacgaaaagtgttccgatacccggggataccaaaaaagtgttcccttaaagaaactatctgcaatctataggtgcaccattgtgtacagtagtgcactaataggtagataggtaggcatacttttggcatccactgtgcccacacttattataaatagctgggttcgcaccaaatctatatggggattacatgtgtagcaccaaatatgtcagagatcttgaggataggatatacccgattggattggtaagagtttgggacctccgcttccagcagtcgactgcttcgttttgtttactaatttatttatggattattttaatttttattgtaatggcatttggctcactgctgaatgcgttggcgtcgcgtctactcggcggcttgtttattcgctcggcgttcggttttttatttattatcgacgtttgttattttaattaatttctctgcatacttgcggcccaaccattttcgatatggatatttatagcagaagctgaatgagtttcaaggcgttgttcgctggtagctaaccggctaaaacgccgccaaaaagagaagtcatacgccgaagaatggactataagatacccattacgataatagttttagtggcgctaaaagcaaagacagaatcaaagtaaaacgatagatataagaacagataaaaataaataataataaaagataaaagtatgtgtgtgactacatttaaaggggtatcaaatagttcatcagcctgccccattggcaatcgtttgtgtgggcgtgctaaaagtgttgatcgggtcgtgcataaatttcatgtttatttatcgtctatcgtttatcgccgcgacatggactgcccacatatggaggaaaacccgctcggatagagtattccgaacatatgagccatatatgagcagattatgggtttctggtatttagcgctcagcatgaccaattagccgggccattgtgcttggccattcggggaggcgtaggccgaaaagccgggcgaaagttggccaaaaccgaagccgccgaacccaagagccaccaccatcgtccaaagagcaatgccaatggcaccgcaattgcagcactaaattggcctgtcccaactggccgcagtcataacaattagccagctcctcgcaggcatatgttttatggccaaaacctgagcacgcccatcgcctggattaagagaaaactccgcctccctgcttccacggagcctctggaatttcgttcgctcgcctgatcctcgagagcgaatccaaagagccgggaacataatttacaggcgcagcaaacagtagctggcaagtggaggtcgtaaaactttaaattgatgacccgtcagataatatttaagaatttttatgtcctcaacccgcgactcctttctgcgcagccatttcgcatttcttaaagcccgtttcggaactttgggcattgcagcgattgaaatctttaatagtggcttaaaggaaatgctgacagcggagcactcatcgaaatgggttagtcatccaaaccgccggctatgggagtcgtgaattattgaaaagacactcactctcttaaaaaacatatgaataaccataaacaagtcatttcctagatagttacagtctcttcaaaaagagtagcattatacatacgttggaaatcagtataggcaataaagattcaggacactctattaactgagaatccttgcaagaaatgaagcatttgggatcgaggagaagatatccagttaagaggcataattgcagactttattgctgaaaccttcaaccgaccattagtcattcgggcgctgctgtgcaatcttttggggaattttgggcattcattgaaatcaatagcaacccactcatcaattggcttggaatatatctacatatatacacatattccgatcggatcgtttgagttcacagtgtgacgtcaatgccaagaatccagggcgatcgcgtgcacgcacacttcaaagctctgaagatcgtctcgtgtgtgtgtgatctcgattccgttctttctacacggaaaaaagaaaattcattttgcaatggcagtagctcgactcttgtccctctgccgctggtcacccatcccacccactcagaaggcagaaggtcaattgcacttcggctggcagtttattaatttggcttattcatatatacatatagctcgtctagctatttgattttcagccaggctaatggccaactcccgtggctgagtttcccacagctgactgaccaacaaccaaccagccacccaccacccagtccgcccacctgatgaccttgtgcaaactcgcgcgcgcaggtgaaaagtctgcggctcgtgccagtttctaaaattaaatcttacgttagtgttggcagaagagaatttcggttgtagatcccaggcacacttaattgatttaactatataataatttaactgtataaaagctataaaatgaagtatccacacgtttccacgtctcgcaacgaaaagcacccactcttttcgaaagatatatgtatattgttcctttgtggctggcatttatctggttgttagttagttttaatagttgtcttctttgcctgccttgtgtcgtcttgtggttgtcgcatcatttgtcgaccgaccataaaaaccgtgataagcgtttaatggcataacttccacgcgagagccaagacgatcctaagtagcatggagccggactaagccgagatctaccatgatgagctctgagtggcacgaagctaaacggttatttaaattccttaagcctgttctgcagctcgaatcgagcattcgggtgagtcaaatgtggagatacttttggaaaacgactaaaaatcgaatctatgctatgcttcaatttgaattaagtctcaagaacttgtgaataaactgatagttcgcatatctagttttggtttatcaactgctgttgtgttaactgaatggaagatctgtattcaacccattcatcatttgataagatctacaatctgattcgcataacatactagcaaatgcatgcaaatttatgccacactgattgtagtgaatcttttgcagtttgctaaagaatttgcggtgataagaggtactgattaaaccaggaagaaacaaccccacatacatatatatcaagctatgttacacaatatatatatttacctgattattcctatggttattttgtacttcaaatcgggttaggtcctgcttgatgctctcgagggcttccgccgtgtatttatcattggggcgaccgccccttttttcgcccgctggatgcatgatgctgctgcttcgccctgtggcatttagcactcatatcacagaaatgctccgcacactaacactcgcacagcacagcacagcacacacacacacacacgcacacacactggggcacatcggcggccgggaatttgatttggctctgcctctctacgattattattatttttattattatttaattggttgttttgtatgaaatagatgctttacttgtttgtctggcgatgccgacaccacctttttgcctttgaatatctatatctgtggcgagactacaacgaactaaggcgcgggttttaggatgctttattatctcgatcttgatattgttgctctcaataaagataattgtgtttgcactgctctttctcgcggtgtaggcttctgctttgtttgtcgtcggattatttatcactcgcgccgggaattcttccactcgcattcgcattcgcattcacattcacatttgcattataagagaaacccccctccctttcgcctatccagcattcatttggcatgtaaatactgctccccgcatttcatttgtatttgtatttgttgttcttccgattttattcctctgctttatcagagattctgcgccagccgcagacacacaattcaaattcaaaaatagttggcagatccgaataaaagtcgcaggcgatgaatgaattccatttgaatatctgaataccaaaatattagttgattttaatttgatttgagccgattctcgaccactcggaatcttaattgatcctacacacgaatcgatggcggccaacttggagctgaaaatagacgaaagacgggggagtcgggtgagaaaattgatcaaacgaaaattgtcacacgctcaacgttaaatacaaaatgctaaatgccaaatgccaaatgccacatgatggaatcaagcttttcagtcgcctccaaagtgacaaattcattgggttcacacaaactgaacttgattacagtggttccgaga

SEQ ID NO: 1994 - DNA, 3319 bp, DROSOPHILA
atgcatccagcgggcgaaaaaaggggcggtcgccccaatgataaatacacggcggaagccctcgagagcatcaagcaggacctaacccgatttgaagtacaaaataaccataggaataatcagaattacacacctctgcgatacacggcgaccaacggacgcaacgatgcacttactcctgactatcaccacgccaagcagccgatggagccgccaccctccgcctctcctgctccggacgtggtcataccgccgccgcccgccattgtaggtcagcccggagccggctccatatccgtatccggtgtgggcgttggagtggtgggtgtggcgaacggacgtgtgccaaagatgatgacggccctaatgccaaacaaactgatccggaagccgagcatcgaacgggacacggcgagcagtcactacctgcgctgcagtccggctctggactccggagccggtagctcccgatcggacagcccccattcgcaccacacccaccagccgagctcgaggacggtgggtaatccaggtggaaatggtggattttctccgtcgccaagcggtttcagtgaggtggctccaccggcgccgccgccacgcaatcccaccgcctgcagcgcggccacgcccccaccgccagtgccgcccactagccaggcgtacgtgaagcggcgatcaccggccctgaacaaccgcccgccggcgatagcgccacccactcagcggggcaactcacctgtaataacccagaacgggctgaagaacccgcagcagcagttgacgcagcagctgaagtccctgaacctatacccaggcggaggcagtggagcagttgtggagccaccgccgccctacctaattcaaggcggagccggaggagcagcaccgccgccgccaccacccagttacacggcctccatgcagtcgcggcagtcgcccacacaatcccaacaatcggactacaggaaatccccgagcagtgggatatactcggccacctcggcgggctcgccgagccccataactgtgtccctgccgccggcgccgctggcgaagccacaaccacgagtctaccaggccaggagtcagcagccgatcatcatgcagagtgtgaagagcacgcaggtccaaaagcccgtgctgcaaacagcagtggcgccccaatcgccatcgagtgcctcggccagcaattcaccagtccacgtgctggccgctccaccctcttaccctcagaagtccgcggcagtggtgcagcagcagcaacaggcagcagcggcggcccaccagcagcagcatcagcaccagcaatccaaaccaccaacgcccaccacaccgcccttggtgggtctgaatagcaagcccaattgcctggagccaccgtcctatgccaagagcatgcaggccaaggcggccacggtggtgcagcagcagcaacagcagcagcagcagcaacaacaggtccagcagcagcaggtgcaacagcagcagcagcagcagcaacagcaactgcaggccttgagggtgctccaggcacaggctcagagggagcgggatcaacgggagcgggatcaacgggagcgggaacgggatcagcagaagctggccaacggaaatcctggccggcagatgcttccgccgccgccctatcagagcaacaacaacaacaacagcgagatcaaaccgccgagctgcaacaacaacaacatacagataagcaacagcaacctggcgacgacaccacccattccgcctgccaaatacaataacaactcctccaacacgggcgcgaatagctcgggcggcagcaacggatccaccggcaccaccgcctcctcgtcgaccagctgcaagaagatcaagcacgcctcgcccatcccggagcgcaagaagatctccaaggagaaggaggaggagcgcaaggagttccgcatcaggcagtactcgccgcaagccttcaagttcttcatggagcagcacatagagaacgtgatcaagtcgtatcgccagcgcacgtatcgcaagaatcagctggagaaggagatgcacaaagtgggactgcccgatcagacccaaatcgagatgaggaaaatgctgaaccaaaaggagagcaactacattcgattgaagcgcgccaagatggacaagagcatgttcgtcaaactgaagcccattggagtgggtgcatttggcgaggtaacgctggtgagcaaaatcgatacctcgaaccatttgtatgcgatgaaaaccctgcggaaagcggacgttctcaagcggaatcaggtggcacacgtgaaggccgagagggatatcctcgcggaagccgacaataactgggtggtgaagttgtactacagcttccaggacaaggataatctgtactttgtgatggactacataccaggtggtgatctgatgtcgctgctcatcaaactgggcattttcgaggaggaactggccagattctacatcgccgaggtcacctgcgccgtggacagcgttcacaaaatgggcttcattcacagagacatcaagcctgacaacatactcatcgatagggacggacacataaagctcaccgactttggcctgtgcacgggattccgatggacgcacaactcgaagtactaccaggagaacggcaatcactcgcgccaggactcgatggagccctgggaggaatactccgagaacggaccgaagcccaccgtgctggagaggcgacggatgcgcgatcaccaaagagtcctggcccactcgctggtgggcaccccgaactacatagctcccgaggtgctggagagaagtgggtacacgcagctgtgcgactactggagcgtgggcgtcatcctctatgagatgctggtgggtcagccgccctttctggccaacagtccgctggaaacgcaacaaaaggtcatcaactgggagaaaaccctgcatattccgccgcaggccgagttatcccgcgaggctacggacttgataaggaggctctgtgcgtcggctgacaagcggctgggcaagagcgtggacgaggtcaagagccacgacttcttcaagggcatcgactttgcggacatgcggaagcagaaggcgccctatataccggaaatcaagcacccgacggacacatccaactttgatcccgtggatccggagaagctgcgctcgaatgactccaccatgagcagcggcgatgatgtcgaccagaacgaccgcaccttccacggctttttcgaatttaccttccgtcgcttcttcgacgacaagcagccgccggatatgacggacgatcaggcgccggtttacgtctgaa

SEQ ID NO: 1995 - protein, 1105 aa, DROSOPHILA
MHPAGEKRGGRPNDKYTAEALESIKQDLTRFEVQNNHRNNQNYTPLRYTATNGRNDALTPDYHHAKQPMEPPPSASPAPDVVIPPPPAIVGQPGAGSISVSGVGVGVVGVANGRVPKMMTALMPNKLIRKPSIERDTASSHYLRCSPALDSGAGSSRSDSPHSHHTHQPSSRTVGNPGGNGGFSPSPSGFSEVAPPAPPPRNPTACSAATPPPPVPPTSQAYVKRRSPALNNRPPAIAPPTQRGNSPVITQNGLKNPQQQLTQQLKSLNLYPGGGSGAVVEPPPPYLIQGGAGGAAPPPPPPSYTASMQSRQSPTQSQQSDYRKSPSSGIYSATSAGSPSPITVSLPPAPLAKPQPRVYQARSQQPIIMQSVKSTQVQKPVLQTAVAPQSPSSASASNSPVHVLAAPPSYPQKSAAVVQQQQQAAAAAHQQQHQHQQSKPPTPTTPPLVGLNSKPNCLEPPSYAKSMQAKAATVVQQQQQQQQQQQQVQQQQVQQQQQQQQQQLQALRVLQAQAQRERDQRERDQRERERDQQKLANGNPGRQMLPPPPYQSNNNNNSEIKPPSCNNNNIQISNSNLATTPPIPPAKYNNNSSNTGANSSGGSNGSTGTTASSSTSCKKIKHASPIPERKKISKEKEEERKEFRIRQYSPQAFKFFMEQHIENVIKSYRQRTYRKNQLEKEMHKVGLPDQTQIEMRKMLNQKESNYIRLKRAKMDKSMFVKLKPIGVGAFGEVTLVSKIDTSNHLYAMKTLRKADVLKRNQVAHVKAERDILAEADNNWVVKLYYSFQDKDNLYFVMDYIPGGDLMSLLIKLGIFEEELARFYIAEVTCAVDSVHKMGFIHRDIKPDNILIDRDGHIKLTDFGLCTGFRWTHNSKYYQENGNHSRQDSMEPWEEYSENGPKPTVLERRRMRDHQRVLAHSLVGTPNYIAPEVLERSGYTQLCDYWSVGVILYEMLVGQPPFLANSPLETQQKVINWEKTLHIPPQAELSREATDLIRRLCASADKRLGKSVDEVKSHDFFKGIDFADMRKQKAPYIPEIKHPTDTSNFDPVDPEKLRSNDSTMSSGDDVDQNDRTFHGFFEFTFRRFFDDKQPPDMTDDQAPVYV
